United States Patent Application Publication US 2007/0099251 A1 - sequence listing, part 5

SEQ ID NO: 12446 - DNA, 2286 bp, Homo sapiens
gcgggtagcgccccgcgtccgagcctcgggccgggccctgagcgcgcgggctccgcgccgccgccgcgccatggcggagaccaagattatctaccacatggacgaggaggagacgccgtacctggtcaagctgcccgtggcccccgagcgcgtcacgctggccgacttcaagaacgtgctcagcaaccggcccgtgcacgcctacaaattcttctttaagtccatggaccaggacttcggggtggtgaaggaggagatctttgatgacaatgccaagcttccctgcttcaacggccgcgtggtctcctggctggtcctggctgagggtgctcactcggatgcggggtcccagggcacggacagccacacagacctgcccccgcctcttgagcggacaggcggcatcggggactcccggcccccctccttccacccgaatgtggccagcagccgtgacgggatggacaacgagacaggcacggagtccatggtcagtcaccggcgggagcgtgcccgacgccggaaccgcgaggaggccgcccggaccaatgggcacccaaggggagaccgacggcgggatgtggggctgcccccagacagcgcgtccaccgccctcagcagcgagcttgagtccagcagctttgtggactcggacgaggatggcagcacgagcaggctcagcagctccacggagcagagcacctcatccagactcacccggaagtacgccagcagcttgctgaagcacggcttcctgcggcacacggtcaacaagatcaccttctccgagcagtgctactacgtcttcggggatctctgcagcaatctcgccaccctgaacctcaacagtggctccagtgggacttcggatcaggacacgctggccccgctgccccacccggctgccccctggcctctgggtcagggctacccctaccagtacccgggacccccaccctgcttcccgcctgcctaccaggacccgggctttagctatggcagcggcagcaccgggagtcagcagagtgaagggagcaaaagcagtgggtccacccggagcagccgccgggccccgggccgtgagaaggagcgtcgggcggcgggagctgggggcagtggcagtgaatcggatcacacggcaccgagtggggtggggagcagctggcgagagcgtccggccggccagctcagccgtggcagcagcccacgcagtcaggcctcggctaccgccccggggctccccccgccccaccccacgaccaaggcctatacagtggtgggggggccacccgggggaccccctgtccgggagctggctgccgtccccccggaattgacaggcagccgccagtccttccagaaggctatggggaacccctgcgagttcttcgtggacatcatgtgactcgtggcgcatgccccagccctgcctgaggtggggagctggcggtcctgccgcatgcagagctcgcgtgggcttgccttcgtgggggccaggacgggaggcagggtggggggcaggctggaccaccaccatctgccctggcagcctggctgctccagctcctgacagcacctgtgtctgagcagccgtgttgggggcgctccctctctgcccctcagcgagagcctcggacctcccaaccccttgtgtctggtggggatccctcctgggatgaggaagaccccctcgggctctcggctgacccccacctcctgcacagctgtgcccaggcccccagggtggtccatgcggggcaaccccctgcggtgcacaggccccctgtctggagtagggatctaatttatttatttattgcctggccggtgactcgggggaggaggcgaccctgtcatctgtcccacctgctgctgccccttggagcagcctgcaccttctctcctcccatccggcaacagtctgaaagtacgtggaggacgggaccggaagacgagagagggctggacatcctgcccaccgtgtcccagccagggcagggagggaccatggcccgcagggtcaaggggccccgatgtgcacagctgccacagggagggaggtcttggggagatgggcagtcaggtggcccgtccttggtgagtgcacacactgcgcgcacacatcgcggccttcctggcttctctggcccccacgtgtctgtgctgtagatactgtatcaaagtcccagcgtttagatggttaacatagagctgcttctgtgtaaatgctgcttattttaaacactaaaaagcgtttaattttatgggaaaaaaaaaaaaaaaaaa

SEQ ID NO: 12447 - DNA, 2520 bp, Homo sapiens
gcattgtgagctctcgcggtaagaggctgaggagccggcctgcaacctgccggggcggctccgctacgcgcagccgcctcagtggcttcctccacagccacctccggagggatctggctgaggaggaagtggaggtgtcactggccccggcctttgccccaatcttgtgtgggcactgaagggggactacaggttcgagagttatgggtgctacatgtgtgctttcagagcagtagtgtgaggaagcttggagtgggatggcaggacggcctcatccctatgatggtaactccagtgatccagagaattgggatcggaaattgcatagtagacctcgtaaactttataaacattcaagtacttcctcgcgtattgctaaaggaggagttgaccacaccaaaatgagtctacatggtgctagtgggggacatgagagatcaagagatagacgaaggtcaagtgacagatcacgagattcatctcatgaaagaacggagtctcagctcactccttgtattagaaatgtgacttctccaacacgacagcaccatgttgaacgagaaaaagatcacagttcctctcgtccaagcagtccgcgtcctcaaaaagcatccccaaatggttccattagcagtgctgggaacagcagcagaaacagtagtcagtcaagttcagatggtagctgtaagacagctggggagatggtgtttgtatatgaaaatgcaaaagaaggagctcggaatataagaacgtcagaacgagtgacactaatagtggataacactagatttgttgtagacccatccatttttactgcacagccaaatacaatgttgggcaggatgtttggatctggccgagaacataactttacacgacccaatgagaaaggagagtatgaggtggcagagggaattggttccactgtgtttcgagcgattctggattactataaaacaggaataatccgttgtcctgatggcatatctattcctgaactgagagaagcatgtgactatctttgtatctcttttgaatatagcactattaaatgtagagatctcagtgccctaatgcatgagttatcaaatgatggtgctcgtagacaatttgaattttatctggaagaaatgatcctccctctcatggtagctagtgcccagagtggggaacgggaatgtcatatagtggtgcttacagatgatgatgtggttgattgggatgaagaatatccaccacagatgggagaagaatattcacaaattatttatagcacaaaattatatagatttttcaagtatattgaaaacagagatgtggccaagtcagttttgaaggagaggggtcttaagaagattagattgggaatagaaggttatcctacctacaaagaaaaagtaaagaaaaggcctggaggccgcccagaagtgatctacaactatgtccaaagaccctttattcgaatgtcctgggagaaggaagaaggaaagagtcggcatgtagactttcagtgtgtaaagagtaaatctatcaccaatcttgcagcagctgcagcagacattccccaggaccagctggtagtcatgcatccaactccacaagtggatgagctggatattctccctatccatcccccttctggcaacagtgacctcgatcctgatgcacagaatccaatgctgtgatgctgatcttccttgaaaccatagcatgctactcttcacagtgacgttgtactctcctcattctgcactgcaaggccactcttcttcattgtgagatgcacataacaatgtttaggatattgcagtgtaggcttttttaaagaccaaaggtagctgaatggtttttttttaaatgagtacaactctagcattttgaagttccagttgtaaatgtatttgtttaccagtaggtttgtgaaattggttctttgtatgggggatggtcctttttcacacagctaggtcttttcagaagtggtggaaattggcagctggggtactttcagtttggactgatattcatcacacctcagataaaatgcagagtaatatatagttgcactttataaatggtggttaaatggaaatgttcaagccattttatagttgtgatgcacaatataatttaagtgcttctgtcaaagtattcctccagtacaatttgtatagtttgctgcccttgatgagcaaaaagtatttatcttgggcttatctgaatgatcaggatgagatttaatgcccatatcttaccagttcagttatctccagagccatttcaccctttagagtgagtcacatgcagggagtgtgaatgtcagaggtggtttattatccagtctgccttacccttaatctgttcacagatatttatttactaatgctttttttttcttaagagttatgggataggaaaatgaagtgtttgctcttcatttactaaatgattgtaaacttgagtttttcatcaaaataaaattccattgttttaatgtttctgaccaaaaaaaaaaaaaaa

SEQ ID NO: 12448 - DNA, 3826 bp, Homo sapiens
ccggcgcgggagtaactcctcgcagaggcctctgggagttgtagtttttttgcctttgcctctccatgacgcaattcctgtgcgacatacgtagcggccgccattgttccgcgccgatggcgagatccttgttcctcagatagcgttcatcgcccgtcgtggtcaacgggccagccgagtctggagtggttgcgaacccttctggctgcagatctggaggtggaggcagtaccctggactctattctgctgccccttcagggtttggaggagccggagcatccctcgcgtcctgtcacttccagcgaggcacacaaaactgaccgtagggatggccaccagggtccggacagcttctatttgggtcccacctctccaagaacgaaacagttcatgggataggatcagaaagctccaaggtcaggaatccatcttgggccaagggactcctggtctgcaacctctccctggaacacccaggcagaagcagaagagtcgcagaatagagaaagtcctagagtggctgtttatttcccaagagcagccaaaaatcaccaagtcctggggacctttgtcattcatggatgtgtttgtggattttacctgggaggagtggcagctgctagacccagcacagaagtgcctgtacaggagtgtgatgttggagaactatagcaacctggtgtccctagggtaccaacacaccaaacctgatatcatcttcaagttggaacaaggagaagagctgtgtatggtgcaggcccaagttccaaatcagacctgtccaaacacagtctggaaaattgatgatcttatggattggcatcaggaaaataaagacaagctgggaagtacggcaaaaagctttgaatgcactacatttggaaaactatgtcttcttagtacaaagtatctttcaagacaaaaacctcataaatgtggcacgcatggaaagagtttgaaatatatagatttcactagtgattatgctagaaataatcctaatgggtttcaggtacatggaaaatcattcttccattctaaacatgagcaaactgttattggaataaaatactgtgaaagtattgaatctggaaaaaccgtcaataagaaatcgcaacttatgtgccaacaaatgtatatgggcgaaaaaccctttggatgcagctgttgtgagaaagccttcagcagcaagtcataccttctagtgcatcagcaaactcatgccgaagagaaaccctatggttgtaatgaatgtgggaaagacttcagtagtaaatcatacctcattgtacatcagagaattcatacaggagagaaactacatgaatgcagtgaatgcaggaaaacattcagtttccattcacagcttgttatacatcagagaattcacacaggtgagaatccctatgagtgctgtgaatgtgggaaagtcttcagtaggaaagaccagcttgtttcacaccagaaaactcattcaggacagaaaccatatgtgtgtaatgaatgtgggaaagcttttggtttaaaatcacagctcattatacatgaaagaattcatacaggagagaaaccatatgaatgcaatgaatgtcagaaagcctttaatacaaagtcaaaccttatggtacatcagagaacccatacaggggagaaaccttatgtttgtagtgattgtggaaaagcctttacattcaagtcacagctcattgtacatcaggggattcacacaggagtaaagccctatgggtgtattcagtgtggtaaaggattcagtttgaaatcacagctcattgtacatcagagaagtcacacaggaatgaaaccttatgtatgcaatgaatgtggcaaagccttcaggagcaagtcataccttattatacatacaaggactcatacaggagaaaaactccatgaatgcaacaattgtgggaaagccttcagttttaaatcacagctcattatacatcagaggattcatacaggagagaacccctatgaatgccatgaatgtgggaaagccttcagtcggaaataccagcttatttcacaccagagaactcatgcaggagagaagccttatgaatgcaccgactgtggaaaggcttttggtttaaagtcacagcttattatacaccagagaactcatacaggggagaaaccatttgaatgtagtgagtgtcagaaagcctttaatacaaagtcaaacctgattgtacatcagagaactcatacaggagagaaaccctatagttgtaatgaatgtggaaaagcctttacgttcaaatcacagctcattgtacataaaggagtgcacactggagtaaaaccctatggatgcagtcaatgtgcaaaaacctttagtttgaagtcccagctcattgtacatcagagaagtcacacaggagtaaaaccatatggatgcagtgagtgtgggaaagccttcaggagcaagtcataccttattatacatatgagaactcatacaggagagaaaccacatgagtgcagggaatgcgggaaatcctttagtttcaattcacaactcattgtgcatcagagaattcacacaggagaaaatccctatgaatgcagtgaatgtgggaaagcctttaataggaaagaccagctcatttcacatcagcgaactcatgcaggggaaaagccttatgggtgcagtgaatgtgggaaagcttttagcagcaagtcatacctaattatacacatgagaactcattcaggtgaaaaaccatatgaatgtaatgaatgtgggaaagccttcatttggaaatcactactcattgtacatgagcgaactcatgcaggggtcaacccttataaatgcagtcaatgtgagaaatccttcagtgggaaattacgccttcttgtacaccagagaatgcacacaagagagaaaccatatgaatgcagtgagtgtggaaaagccttcattaggaattctcaactcattgtacatcaaagaactcattcaggagagaaaccctatgggtgcaatgaatgtgggaaaaccttctctcaaaaatcaattctcagtgcacatcagagaacacatacaggagagaagccttgtaagtgcactgaatgtgggaaagccttttgttggaagtcacagctcattatgcatcagagaactcatgtagatgacaaacattgataattttacgaaactctgaaaagtggattcacaagagatagaaacaatcatatataaagagaaactctgtaagtggaatcatcttgtcatcttccagaaaactcatactgaatagaactttatgaatgcacagcatatggaaaggcatccacagaaagctgttctttacatgcaaaaagatagtagacaatacacaggaaaactgaatttagtaaccactctgaaaatttttagcagcaagtcatacctttttttaaaaagttcatacaggtgaggaaccatgttaaacgttgtaaagtcattttactaacataagattcacaaagaggaaacttcatgaaccagatgaatatagaatagacttctttgaaattcatagtttacagaattttaatgagagaaattattgagctaatgaatggcagaattaacaaaattacaaacattttatgtatcggaagcatataccttggagggaccatgctatgagggaaagtgtaaatctagaaatgagaaacccctagggaaaaaatatatataggagtgaacatcttatgaatgtaccaaataaaccacagctggactgttaacctcaccttagaagcttctttctaaaaaaaaaaaaaaaaaaaaaaaaaaaaaaaaaaaaaaa

SEQ ID NO: 12449 - DNA, 4567 bp, Homo sapiens
gacagcctctgggtcctcggtcggtacagtctctgcacctcgcgccccagcaggtaaactaacattatggatttttccaagctacccaaaatactcgatgaagataaagaaagcacatttggttatgtgcatggggtctcaggacctgtggttacagcctgtgacatggcgggtgcagccatgtatgagctggtgagagtgggccacagcgaattggttggagagattattcgattggagggtgacatggctactattcaggtgtatgaagaaacttctggtgtgtctgttggagatcctgtacttcgcactggtaaacccctctctgtagagcttggtcctggcattatgggagccatttttgatggtattcaaagacctttgtcggatatcagcagtcagacccaaagcatctacatccccagaggagtaaacgtgtctgctcttagcagagatatcaaatgggactttacaccttgcaaaaacctacgggttggtagtcatatcactggcggagacatttatggaattgtcagtgagaactcgcttatcaaacacaaaatcatgttacccccacgaaacagaggaactgtaacttacattgctccacctgggaattatgatacctctgatgttgtcttggagcttgaatttgaaggtgtaaaggagaagttcaccatggtgcaagtatggcctgtacgtcaagttcgacctgtcactgagaagctgccagccaatcatcctctgttgactggccagagagtccttgatgccctttttccgtgtgtccagggaggaactactgctatccctggagcctttggctgtggaaagacagtgatatcacagtctctatccaagtattctaacagtgatgtaatcatctatgtaggatgtggtgaaagaggaaatgagatgtctgaagtcctccgggacttcccagagctcacaatggaggttgatggtaaggtagagtcaattatgaagaggacagctttggtagccaatacctccaatatgcctgttgctgctagagaagcctctatttatactggaatcacactgtcagagtacttccgtgacatgggctatcatgtcagtatgatggctgactctacctctagatgggctgaggcccttagagaaatctctggtcgtttagctgaaatgcctgcagatagtggatatccagcctatcttggtgcccgtctggcctcgttttatgaacgagcaggcagggtgaaatgtcttggaaatcctgaaagagaagggagtgtcagcattgtaggagcagtttctccacctggtggtgatttttctgatccagttacatctgccactcttggtatcgttcaggtgttctggggcttagataagaaactagctcaacgtaagcatttcccctctgtcaattggctcatcagctacagcaagtatatgcgtgccttggatgaatactatgacaaacacttcacagagttcgttcctctgaggacgaaagctaaggaaattctgcaggaagaagaagacctggcagaaattgtacagcttgtgggaaaggcttctttggcagaaacagataaaatcactctggaggtagcaaaacttatcaaagatgatttcctacaacaaaatggatatactccttatgacaggttctgcccattctacaagacagtagggatgctgtccaacatgattgcattttatgatatggctcgtagagctgttgaaaccactgcccagagtgacaataaaatcacatggtccattattcgtgagcacatgggagacatcctctataaactttcctccatgaaattcaaggatccactgaaagatggtgaggcaaagatcaaaagcgactatgcacaacttcttgaagacatgcagaatgcattccgtagccttgaagattagaagccttgaagattacaactgtgatttccttttcctcagcaagctcctatgtgtatattttcctgaatttctcatctcaaaccctttgcttctttattgtgcagctttgagactagtgcctatgtgtgttatttgtttccctgtttttttggtaggtcttatataaaacaaacattcctttgttctagtgttgtgaagggcctccctcttcctttatctgaagtggtgaatatagtaaatatacattctggttacactactgtaaacttgtatgtagggtgatgaccctctttgtcctaggtgtaccctttcctcatctctattaaattgtaaacaggactactgcatgtactctctttgcagtgaatttggaatggaaggccaggtttctataacttttgaacaggtactttgtgaaatgactcaatttctattgtggtaagctcattggcagcttagcattttgcaaaggaattgctttgcaggaaatatttaattttcaaaaacataatgattaatgttccaattatgcatcacttcccccagtataaatcaggaatgtttgtgagaaaccattgggaactatactctttttatttttattttttattttttttattattttttttttggggacggagtgtccctcttgttgcccaggctggagtgcaatggcgtgatcttggctcactgcagccttcgcctcccgggttcaagtgattctcctgcctcagcctcccgagtagctgggattacaggcatgctccaccatgcccagctaattttgtatttttagtagaaacggggtttcaccatattggtcaggctggtctcgaactccagacctcaggtgatccgcccacctcggcctcccaaactgctgggattacaggcgtgagccaccgcgcctggccagggactatactctttttaaaatagacatttgtggggctcacacaatatatgaaatagtaccctctaaaaaagagaaaaaaaaaatcaggcggtcaaacttagagcaacattgtcttattaaagcatagtttatttcactagaaaaaatttaatatcaaggactattacatacttcattactaggaagttctttttaaaatgacacttaaaacaatcactgaaaacttgatccacatcacaccctgtttattttccttaaacatcttggaagcctaagcttctgagaatcatgtggcaagtgtgatgggcagtaaaataccagagaagatgtttagtagcaattaaaggctgtttgcacctttaaggaccagctgggctgtagtgattcctggggccagagtggcattatgtttttacaaaataatgacatatgtcacatgtttgcatgtttgtttgcttgttgaatttttgaacagccagttgaccaatcatagaaagtattactttctttcatatggtttttggttcactggcttaagaggtttctcagaatatctatggccacagcagcataccagtttccatcctaataggaatgaaattaattttgtatctactgataacagaatctgggtcacatgaaaaaaaatcattttatccgtcttttaagtatatgtttaaaataataatttatgtgtctgcatattgcagaacagctctgagagcaacagtttcccattaactctttctgaccaatagtgctggcaccgttgcttcctctttgggaagaggaaagggtgtgtgaacatggctaacaatcttcaaatacccaaattgtgatagcataaataaagtatttattttatgcctcagtatattattatttaattttttaggtaatgcctatctcttggtctattaaggaaagaagcaatcagtagagaattcaggatagttttgtttaaattcttgcagattacatgtttttacagtggcctgctattgaggaaaggtattcttctatacaacttgttttaacctttgagaacattgacagaaattatgcaatggtttgttgagatacggacttgatggtgctgtttaatcagtttgcttccaaagtggcctactcaagaggccctaagactggtagaaattaaaaggatttcaaaaactttctattcctttcttaaacctaccagcaaactaggattgtgatagcaatgaatggtatgatgaagaaagtttgaccaaatttgtttttttgttgttgttgttgttttgaatttgaaatcattcttattccctttaagaatgtttatgtatgagtgtgaagatgctagcgaacctatgctcagatattcatcgtaagtctcccttcacctgttacagagtttcagatcggtcactgatagtatgtatttctttagtaagaatgtgttaaaattacaatgatcttttaaaaagatgatgcagttctgtatttattgtgctgtgtctggtcctaagtggagccaattaaacaagtttcatatgtatttttccagtgttgaatctcacacactgtactttgaaaatttccttccatcctgaataacgaatagaagaggccatatatattgcctccttatccttgagatttcactacctttatgttaaaagttgtgtataattgttaaaatctgtgaaagaataaaaagtggatttaaattaaaaaaaaaaaaaaaaaaaa

SEQ ID NO: 12450 - DNA, 5895 bp, Homo sapiens
gttccttattgtggttcctgctgtggttttgatcatgttgttaccctcggacgtagcccggcttgtattgggttacttacagcaagaaaacctcatttctacctgccagacttttattttggaaagttcagatttaaaagaatatgcagaacattgtacagatgaagggtttattccagcctgcttactgtccttatttggaaaaaacttgacaacaattttaaatgagtatgtagctatgaaaacaaaagaaacatcaaataatgtcccagcaataatgtcatctctatggaagaaattggaccatacactttctcagatcaggagcatgcaaagttccccaaggtttgctggcagtcagagagcccgaacgagaactggaattgcagaaatcaaacggcagagaaagcttgcatctcaaacagctccagccagtgcagagttgctcactttaccttacctttcaggacagtttaccactcctccttccacaggtacacaggttactcgaccaagtggccaaatttcagatccatcgaggtcatattttgtagtggtcaaccactcacagtcacaagatactgtaaccactggagaagctttaaatgtcattcctggtgctcaggaaaagaaagcacatgccagtttaatgtctcccggtagacgcaaaagtgaatctcagagaaaaagtaccactttgtctggccctcattcaacaatacggaatttccaagatccaaacgcttttgcagtagaaaaacaaatggttattgaaaatgcacgagaaaaaatactaagcaacaaatctcttcaagaaaagctagcagaaaacataaataaatttttaactagtgataacaatattgcccaagtacctaagcaaacagataacaaccctacggagccagagacttcacttgatgaattcctaggacttccgagtgaaattcacatgtctgaagaagctatacaggacatattggaacagacagaatcagacccagcatttcaggcactctttgatctctttgactatggcaaaacaaagaataataaaaatatatcacaaagtatttccagtcaacctatggaatccaatcccagtatagtcttagcagatgaaactaatctagcagttaaaggttcttttgaaacagaagaatctgatggtcagtctggtcagcccgctttttgtacatcctatcagaatgatgacccattaaatgctatgaagaatagcaacaaccatgatgtgcttagacaagaagaccaggaaaatttttcccaaataagtaccagcatacagaaaaaggcctttaaaacagctgtacccactgaacagaagtgtgacattgacattacctttgagtccgtgcctaatttgaatgactttaaccaaagagggaattctaatgctgaatgtaatccacattgtgctgaattaaacaccaatcagatgtccactgaaactgaaatggctatagggattgaaaagaactctttgtcttcaaatgtaccgagtgaatctcagttacagcctgatcagcctgatataccaataacttcatttgtttcacttggttgtgaagctaacaatgaaaacttaattctctctgggaagagttctcaacttttatcccaagatacttcattaactggaaagccatctaaaaaaagtcaattttgtgaaaattctaatgatacagtaaaacttaaaattaattttcatggttccaagtcatcagattctagtgaaattcacaagagtaaaatagaaattaatgtgttagaaccagttatgtcacagctatcaaattgccaagataattcttgtcttcaaagtgaaatactacctgtgtctgttgaaagttcacatttaaatgtatctggacaaatagaaattcatcttggagattcgctgtcttctactaaacaaccatctaatgattcagcatctgttgagttaaatcatacagaaaatgaagctcaggcatccaagtctgagaattcacaggagccttcatcttctgtaaaagaagagaatactatttttctctctttaggaggaaatgctaactgtgagaaagttgcactgacgcctccagaaggcactcctgtagaaaacagtcactctcttcctccagaatctgtgtgttcttcagtgggagattctcaccctgagtcccaaaatactgatgataaaccttctagcaacaactcagcagagatagatgcatcaaatatcgtctctctcaaagttatcattagtgatgatccatttgtttcctcagatactgaacttaccagtgctgtttctagtattaatggagaaaacctgccaactataatcttgtcttctcctactaaatcacctactaaaaatgcagaactagttaaatgcctatcttcagaagaaactgtaggtgctgttgtatatgccgaagtaggggattcagcctcaatggaacagagtcttttaacattcaaatctgaagactctgcagtaaacaatactcagaatgaagatggcattgctttttcagctaatgttacaccatgtgtttccaaggatggaggatatatacagttgatgccagccacaagcacagcttttggcaattcaaataacattctgatagctacctgtgtgactgatccaacagcgttaggaacatctgtaagtcagtctaatgtagtggtgttgcctggaaattctgcacctatgactgctcaacctctaccacctcagttacagacaccaccaaggtcaaacagtgtatttgctgtcaaccaagctgtgtcaccaaacttttcacaaggatctgccataataattgcctctccagtccagcctgtactccaaggaatggtagggatgatcccagtatctgtggttggacagaatggaaataacttttctactcctcctcgggaggttcttcatatgcctgtgacagcacctgtatgcaatagaagtatccctcaattccccgcccctccaaaatctcagaaggctcagggactaagaaacaagccttgtataggaaaacaagtaaataatttggtggattcgtcaggtcattcagttggatgtcatgcacaaaaaactgaagtttctgacaaaagtattgccacagatcttgggaaaaaatcagaagaaaccacagttcccttcccagaagagagtatagttccagctgctaaaccatgccacagacgtgtactctgtttcgacagcactactgctcctgtggcaaatacgcaggggccaaaccataagatggtgtcccaaaacaaagaaaggaatgcagtctcttttcctaatcttgactcacccaatgtgtcctccaccttaaaacccccttctaataatgctatcaaaagagagaaagagaagcctcctctgcctaagattttatctaaatcggaaagtgccattagccggcataccaccataagagaaactcaatcagaaaagaaagtttcaccaacagaaattgtgcttgaatctttccataaagcaacagctaataaggagaatgaattatgcagcgatgtagaaagacagaaaaatccagaaaattcaaaactatctattgggcagcgaaatgggggtttgcgaagtgagaaatctatagcttcactgcaagaaatgaccaaaaaacaaggcacatcttcaaacaataaaaatgtactttcagtaggtacagctgtgaaggatctaaaacaagaacaaactaaatccgccagttctttgattaccacagaaatgttacaggatatacagaggcacagctcagtaagtaggcttgctgatagtagtgatttacctgtgccccggacacctggctcaggggcaggggaaaaacataaagaagaacctatagatattatcaaggccccctctagtaggcgtttcagtgaagacagtagtacatcaaaagtaatggtccctcctgtcaccccagacttgcctgcctgcagccctgccagtgaaacaggaagtgaaaacagtgtaaatatggctgcccacacattaatgattctctccagggcagccatttctaggactacttcagcaactcctctgaaagataacacacaacagtttagagcatcttcaaggagcaccacaaaaaagcggaaaattgaggaattagatgaacgtgagcgaaactctcgtccttctagtaaaaatcttacaaattcatcaataccaatgaaaaagaagaaaattaagaaaaagaagcttcccagttcatttccagcaggaatggatgtagacaaatttttgttatcattgcattatgatgagtaaacattctggacacataagaacagtaggtgttaaaaactcatatcccttaaactgagtgtagggaatgggatattgacagaatctgaaagcatgacctgcactttcattgtactgaaacttcactttatatctaaatcatgctgtttctgaaacagcttcctagtttgtaaatagacttacttggtatatttttattttgggaaaaacgtttgcagaaatgtaagtaaagccaatctgcaaaactgtatagctttgacaattccatattgtaaatactgtgtaaatcttgttgaaatagaggttaaatcaacctaatgttcttacactgtgttttttgacttcttatgatccctaattctgagacttactcatctggaatagtttctcacttgttttggaggaaaatgatgcttattcttataaattaccttcagtaactattcaataagacatttaaatacacaatcactaagtactacaaaataataaccacctcaactgatagcaaaatatctaattagaaatcaacagtttgatgagtttttttcctagagtgaatactacccctttcttataattgctgtaagtattatatttctggaatttcacactttacctactctgatcactctgttctctttgttttaaagagagaattttgtaaaccatttattgaatgttctgatctttcatttataacttaagattttttacagaactttaagtggttagactattgagccataaaattttggtttgtagtagagatttctcggtatgtacttttcccctaaatgctggggatttaaagaattgcactaattcatagaactctttacattgtagtgaccaatgcacatataatttaaatcttgtgttctatgtgagagtttatgtggaggattatcttctggtgttgtgtccatcataagatgtaaaaagagaaatcatagttttatattttagtttctcctacaatgggtatgttaaataactatatctatacttagatatagtgcattgtctgtgtcccttaaagtgttacaaagagtttctctcaaaaggtccttaaggagagtgagagatgagagaggtgccttctctgtattagactcacacacatcagtccagttgaagaattggtttaaacttttaaatgagaacagaaattataattagtacctgaccaattgtgcctagatattaaagtatgttctctttagtactttccgttcaattaaatatcagtatattagggatttttttctacaggtgtatattttgttgaagagtcactttcctcaaccatttttttgtactgggcctttaaaaaaataaatccatccaactttaacacaacatttctcagtgtagaaatcatgtcttcttaattgctgaaccttactgcaaaaacttgtgatgttaagaaatttgtatggtgtggcagtggtctattcctaaggaactaaatatcatatagttaatgtttatttaactcagcttgagactgtactacagttaggtttgaataaatattttcattaacttcaaaaaaaaaaaaaaaaaaaaaaaaaaaa

SEQ ID NO: 12451 - DNA, 8330 bp, Homo sapiens
ccgctcccacctcggcgtctcgtctctcgcccgctgccccgcgagcccgcggcccccgggctcccgccatccgccgacaccgggagcccgggctccccgcgccctgccctccgcgccgggggccgcccgccgcagacacgggacccgcttcgaggccgctttggcgccaaatcctgaggtaacacgtacacagacctctcggccggaatctccagggatgaccagcccctccccacgcatccagataatctccaccgactctgctgtagcctcacctcagcgcattcagggctctgaacctgcctctggcccattgagtgttttcacatctttgaacaaagagaagattgtcacagaccagcagacaggacagaaaatccagatagtcaccgcagtggacgcctccggatcccccaaacagcagttcatcctgaccagcccagatggagctggaactgggaaggtgatcctggcttccccagagacatccagcgccaagcaactcatattcaccacctcagacaacctcgtccctggcaggatccagattgtcacggattctgcctctgtggagcgtttactggggaagacggacgtccagcggccccaggtggtagagtactgtgtggtctgtggcgacaaagcctccggccgtcactatggggctgtcagttgtgaaggttgcaaaggtttcttcaaaaggagtgtgaggaaaaatttgacctacagctgccggagcaaccaagactgcatcatcaataaacatcaccggaaccgctgtcagttttgccggctgaaaaaatgcttagagatgggcatgaaaatggaatctgtgcagagtgaacggaagcccttcgatgtgcaacgggagaaaccaagcaattgtgctgcttcaactgagaaaatctatatccggaaagacctgagaagtcccctgatagctactcccacgtttgtggcagacaaagatggagcaagacaaacaggtcttcttgatccagggatgcttgtgaacatccagcagcctttgatacgtgaggatggtacagttctcctggccacggattctaaggctgaaacaagccagggagctctgggcacactggcaaatgtagtgacctcccttgccaacctaagtgaatctttgaacaacggtgacacttcagaaatccagccagaggaccagtctgcaagtgagataactcgggcatttgataccttagctaaagcacttaataccacagacagctcctcttctccaagcttggcagatgggatagacaccagtggaggagggagcatccacgtcatcagcagagaccagtcgacacccatcattgaggttgaaggccccctcctttcagacacacacgtcacatttaagctaacaatgcccagtccaatgccagagtacctcaacgtgcactacatctgtgagtctgcatcccgtctgcttttcctctcaatgcactgggctcggtcaatcccagcctttcaggcacttgggcaggactgcaacaccagccttgtgcgggcctgctggaatgagctcttcaccctcggcctggcccagtgtgcccaggtcatgagtctctccaccatcctggctgccattgtcaaccacctgcagaacagcatccaggaagataaactttctggtgaccggataaagcaagtcatggagcacatctggaagctgcaggagttctgtaacagcatggcgaagctggatatagatggctatgagtatgcataccttaaagctatagttctctttagccccgatcatccaggtttgaccagcacaagccagattgaaaaattccaagaaaaggcacagatggagttgcaggactatgttcagaaaacctactcagaagacacctaccgattggcccggatcctcgttcgcctgccggcactcaggctgatgagctccaacataacagaagaacttttttttactggtctcattggcaatgtttcgatagacagcataatcccctacatcctcaagatggagacagcagagtataatggccagatcaccggagccagtctatagcgcaaaccacacacctgccaaggagcaacagaatccttccaggaccgttcacatacaaagaaaagtagtggtattttggtatgtgcaaatatttccatatgttagccatttcctgtctggtttctccttatctgttaatcccagacaatagcaattaaaagactagtaggatcctttcctgacataagaaatgttttaatgccttttgatgaagcagcagattttggaacaatcttttaactcaatttgtatttagaaattctcaaagggcaaaaaacaaaaaaaaaggttttataatgtcagagactagtattaaagaaaactgaaagaacctgagagaatagtatgtgtgtatatatatatataaaaaagtccttggaattatagatactaattaccagggtaataatattagcactttctaagcacttatcaatgtgtaacgttagcaacatcttgcctgtgggcagggcaaatggaaaactgtgtatgtcttttgccgaaatgctaatgatttctgtgaaaactcactagggtacaggagacaatcatttatgtttaagaaaagaaggcatcattcctaattgtgtgcacatgttgtggagttgagctgaattctgtgaatggaaacgtggctcatttgcatcatgcagtaagtgggagtgtggtagcacagtcggtggtgacccagttcagaagcttctagccatagagcagacacttgtcaggttccctgactacttggtcctggtctctgatgggcatctgcagactcctctagaacctggggttctcctttgatgactggttatctgaattggattgcaactagtcagacattaactgccaaatgagatgtacagttcctccagcaagtgaaaacatccccaagtcacatccgccgctcgtggcagatggagccttgtgaccaaaaagtgcaaggtgggcattttgagctcttgacagtacttccaatacaattgggggtgcttgtgtgtttgtccagatggaggagtgtggccttggagtgtgagcgttaccttcccagggctttccactccaaatgcccccttgaaaagggctcgtgtttctgcagctccatcataactgtgaggctggattggggctgggcaggagcctgctgccgcctggcgagagtggttagggcctggtaaagctggatggaaggtttcaggacaatttcttcctgttgaccttaaataccagagattttaaaaatgtgtatagactcagcatctctgttggcaagtctgttaatgttaccagcacactgtgcactttggttcccccaggtgtgtgccagccgaccaccccggagcattttaaatgcaggctgcttgctccttaaaaacaaccctcaatttccagggtgatagtctttctcctcataaattgtagcaaccagagtttacagcaagaacagtatgcgcttaaaaggaagttatgtctaacttcaaacacccgtaaattcccacggatgtgaatatatagcaagcttttcctgtttgagaacagtggcatgtggaagacccggtcaattgctttgtcttttgctttttaaatagtccagattaagaaaatacaccctgttgggttaaatttgcctctcttgatttgttaatcagatgatatccaaaaagatccctggacactcccctgactcacaggtgctctgatctggctcaggctggcgccacatgtgctccacaggggtgcagtctggccagctacagacgcccctgtggtgccacattggacagaatggaagctgctgcaggctcaaggcagaacaggatgcttgatcctgaagggttagcagcactttacgcaagtcagtgttagtagggtaagtgggaacagtgtttccaacttctaaattcttgtttggatttaattatatcattttataattcttgccttggcagcaaattttggagagtagtgggagtggccattataaaatgatggaaaggatttaattttgccagcttaaagtaatttttacttttctaaccctgatgtgttttcagtttcaaaattaagacaaaaaaccagctgagacaatggaattagggcaggtttgtttcatttctgcttgtgaaggcttttagtagcaggcatcctgcagctcagtggtgcctctaacacagattgttgcctgccttccgtcgttttgatccttgagagtgaccatgagggccatgttgcagttccctgggaatacaagcataacagctttcagatcccagttcttggtgttggtgaaaaggtctccaccagcccctcctctcattcccaggtcattcagtggcagccagtaggctgcttagactcaggctggataaggaagtgttgggctgtggtgaaacaaccttgcagaaaacgtgattttgcttggaaaggtgctgattctaacctggtcctgctctttaagtccccttgctggtgatggctgattccagggactgttttgggctttgaacacctcttggttggtttctgagatcctcttggccttactttgaagtggccttttctttaaggatcatgtccacgtaacctgtattcttgctgctttaactcatttcaagcctctgactgcaggtccatttcatctcctgtcaggttggttaagtaaagtcagcccaaagtcaagaattacttaaagagatgcaaaccaaatatttgggctccaactttcacagggcttatagcccttattagcagtttgtgaaactttgggtttcatgaagtgagacctgtcctctggctactgaactccatggagccacgttcatgctccctcttctactggcctggctgctcctccctcaatgaggagaggcagctggctcagagaggtgggacagacacatgctgtcatcagttaagtgagctcttttccagaagtatctcagataatgttgggttaagacagatagatgttgaaaatggtggagatcattacacattagcataaaacaggacaggaagagattttttgaaagaccaaattagttgagcaagtaatacttttcaagttactcctggaaggtgtttttaaggaagtgtgttacctaccatactctcctaatttgacatttctgtgtcctgaggagttacatttattgtctaacccttgccataaggctgtggtttgaggttcttttgctgttctgggctttatatttaatttcaggtgtagtcacttctaagatgtgtaattgccctcaagagggactgatttttagcttgtcattgtcagtattgaatgtggactcttctgaggcagttaggacaccagccatggtgttaacagtggatgcgttaggctccttaatctcaaggcaatatccacgctacacacatacttattagctgtcttacttgtttgggggatagttacggcaaggagcaaaaaattctaaggactctagctgtttctagtgcttttactttcatagtcctttgaggacatttcctgcagagcactcttgctcacagcccgccctctgcagggcttccagcccctggccgcaatcagcagttcatgccacatgtgtacatccatgttctgggacctgatctcattggagtccagaagcttgttgcccactttccagtgtaaatgactttatgtgcaatggggtcataggtaacattttaactcttttcttagtccaggtcataggaagtctcatcatctgacagccacttttctcccagggaaggcggtgcccactgggccctgggaatgcctgagccagcagagcagatgccccacgtgcttcctttatccagcttccattctctcagttatgaggctctttgaaaatgtcttaactttgatgtaaatttttaaagccaacccctcatcaagacagggttggtttgggtcttttgtacacagggtctggaccttctcattgtgtgcctcccaccagcgtgcacttcgtatgtccagccctgggtcccttcagcagcattgtgcgtgtacaggtttctaggctgtaagactgaatgaatgtacatgtgtttatatcctctccatatgtacagtgtatatagtgtgtgtatgtgtacatagatgtatattatgtatacagacatgtatccaaactttcctttaaagagagtttttcataaagttgctaatgtaaactgatatgggtgttccaaggtccctcggcagggaagatttgctggtgattttcttcactccattttcctttgggtgagcctgcctgggaagggccatgaagtcagaatctccactctgcaaaaggaagaattccaggcagaagaggttctgacagggtgacatttccgtatattctctaggttcggacaagagccaggaagctggaagacagtttatcttaatatccaaaactaagtgggaatttttaaccttttcatgcacctattcatggccctacctggaaggaacttggcagttgggttgagccatcagccttcccagctattcagctctgttgagtagcccagagacaggcgtcacggtcagagattcagaacggtctgtgtcagtgaggcctgactcccaaagatggtagcaatttcccaggcttgcgctgtgctcagtcagcaagatgtggggcactgtcctatgactgaataaatagtaattcccatctttctatcgccagttaaaaataaacaacctaccaagtattattctttaaaactaagcatggatgttgatggctaacttctgcggcatataagctacagatctcaagttacttctctaactgtaagcatgtaaatgactttaactcctttctataagttatgattttaaattttcagataagaattgcattttaatatggatatgtgtgcccttaaaagctacagataccaaattttcctcgtccaggtctactcggacgaattttcccccttaatctggccttaaactgagactcggcccttgagagccagggcctggcccagcagtagttgctcatagacctgggaagcaggggcctgctggaaggaatcactagattgctgcaaaaactcacataatccacagtttcctctttttctttttaaaataagttatcaaaatgttttaaaaacactttatgagaccatagtactcagtgccttttgtgagacagtgggtcatttagccttcagcttccctgtttttgatgtagagaaagcttctatttcactggcctcatcccacaagattgtgcgacctttccccgtcatagcctgtcgtgacaatcacgctattgaaagtggctttctagttaaaatgcaattggaaacttgacagtctctaaatgaattaaaagtttcctttggggctatttagcttaacagcagtctacaaataattaaagtgtgagcttaagaaaagtatctttgcggggagaaaaatgtcagatatttttaatgcccagctataaataattttggtgtcttgatatttatacatgcaaaatagaaaaaaaatgttcaacatttattgattgatagactgttaaaatttaatgtttggaataacatttggaagtagtagactttgcattaaaaaatggcttttctttaggaaagtataatcaattattttaatgaccatagcattcatggactcaaatgctgctgccacacacaactcaagtgctggaatatttttctacagtctctctgttctacggattatcttgtaaaccagtgttcaactagttttataactgaaaagctgcacatttttcacagtacaagccgtagtttttacctgtagtttggacttctctgttagaatgtaactgcattaccagcccttttaaaggcatctatctatcaaaggaaaatttgggtgttagattttcttgggaccgtttctgtaacctttgcccttcacaatatagaaaatattggttttgccattacattttaatgccaggtttaaaacctgttgaaagctgcagctttatacagctttcttctccctgtgaaatcactttgtttatgtgatggcatttaaaaaatagcatgttctttttaaactgaattttatatctaatcaatgtcttcagtcttgaagaagaatttgcattgttgtgtttgtatatagagtattgcagtgcatgaattagctttatgcattttattaaatgctgtttcaatgtggcattattgttgtggcttaatactactacctaaatgaggtttatactattaaaagtgaattaaagactaa

SEQ ID NO: 12452 - DNA, 5198 bp, Homo sapiens
ctcacttaaacacgtagttcccgcgaccccaacgtcccagaggcggggccggagtcggcggtggcgctccttggagccggctcccgctcctaccctgcaaacagacctcagctccgcggaagttgcgagacggggtttcaccatgttggtcgggctggtctggaaatcctgacttcaggtgatccacccgcctcggcctcccaaaatgctgggattacaagcgtgagccaccgcccctgacatgagccattgacttttaaagcaggagaataatttggatcagatttatatggaaacactcttctagcagcattatggggacttttccataagtctggatactgaggatttggaattaaagaaatcattcaccagacatcatggagcctatatatccttttgcacggccccagatgaataccaggtttccttcaagcaggatggtacctttccactttcctccatcaaaatgtgcactttggaacccaacgccaactggagatttcatctacttacatctcagttactacagaaatccaaagcttgtggtgactgagaagaccatccgacttgcttatcgtcatgctaacgagaataaaaaaaattcgtcatgctttttacttggttctctgacagcagacgaagatgaagaaggtgtaacattgacagtagatcgctttgatcctggtcgagaagtacctgaatgcctagaaataacccctactgcttctcttcctggggactttttgattccatgcaaagttcatactcaagaactttgttcaagagaaatgatagttcacagtgtagatgacttcagttcagctttaaaggctctacagtgccatatatgtagcaaagattccttggactgtggtaagctgctttccctaagagttcatatcacttccagggagagtttggacagtgtggaatttgacttgcattgggcagcagtaactctagcaaataactttaaatgcacacctgtgaagcccatccccattattccaacagctctggcaagaaacttgagcagtaatctgaatatttctcaagttcaagggacttataaatatggatatcttaccatggatgaaacacgcaaattgttacttttgttggaatctgatcccaaggtttattctctaccattggtgggaatttggctgtctggaattacacatatctatagtcctcaggtatgggcttgctgtttgcgatacatattcaattcttctgttcaagaaagggttttttcagaatctggaaatttcatcatagttctctattctatgacacataaggaacctgagttttatgaatgcttcccttgtgatggcaagatacctgactttcggtttcagttgctaaccagtaaggaaacattacatcttttcaaaaatgttgaacctcctgacaaaaatccaatccgttgtgaactgagcgctgaaagccaaaatgcagaaacagagtttttcagtaaggcttccaagaatttttcaattaagaggtcttcccaaaagttatcttctgggaagatgccaatacatgatcacgactctggtgttgaagatgaagatttttctccaagaccaattcctagtcctcatccagtgagtcagaagatttctaagatccaaccatcagttcctgaactttcacttgtgttggatggcaatttcatagaatcaaaccctctgcctactccattggaaatggtgaataatgaaaatcctcctttgattaaccacttggaacacttgaagccattgcaaccccagctttatgatgagaaacacagtccagaagttgaagctggagagccttccttgagaggaataccaaatcagttaaaccaggataaaccagctcttttgagacactgcaaagtaagacagccacctgcctataagaaagggaacccccataccaggaacagtattaaaccatcttctcataatgggccatctcatgatatatttgaaaagctccaaacagtttctgctggaaatgtacaaaacgaagagtatcctataagaccctccacacttaattctaggcagtcttctcttgccccgcagtcccaaccacacgattttgttttttcaccccataattcaggaagaccaatggaacttcagatacctactcccccactgccatcttactgttccacaaacgtttgcaggtgttgtcagcatcatagtcatattcaatatagtccgctaaattcttggcaaggagcaaacacagttggatccattcaagatgtccagtctgaagcccttcaaaagcattcattatttcacccaagtggatgtccagccctgtactgtaatgcattctgttcttcaagtagtcctatagccttgagacctcagggagatatgggcagttgttctccccacagcaatattgaaccatcgcctgtggcaagaccgccttcacatatggacttatgtaacccacagccttgcacagtgtgcatgcacacacccaagactgagtcagataatggaatgatgggactatctccagatgcatatcggttcctcacagaacaagacagacagctaagactacttcaggcacagattcagcgtttgttggaagcacagtctctgatgccctgttcccctaagacaactgctgttgaagacacagtgcaagctggaagacaaatggagttggtttctgtggaagcacagtcttcccctggcttgcacatgagaaaaggtgtaagcattgctgtgagcacaggtgctagcttgttttggaatgcagcaggtgaggatcaagagcctgactctcaaatgaagcaagatgataccaaaatttccagtgaggacatgaatttttctgtcgatattaataatgaagtcacaagtcttccaggtagtgcatcttcattaaaagcagttgatattcccagttttgaagagagcaacattgctgtggaagaagaatttaaccagccactttctgtatccaactcttctctagttgtgagaaaagaacctgatgtacctgtgttctttccaagtggccagctggcagaaagtgtaagcatgtgtttacagactggaccaacagggggtgccagtaacaattctgaaacatcagaggaaccaaaaattgagcatgtaatgcaacccttgcttcatcaaccatcagataaccagaaaatttaccaggatttattgggtcaagtaaaccacctattaaatagttcctccaaggaaactgagcagccgtctaccaaagcagtaattatcagtcatgaatgcaccagaacccaaaacgtttaccatacaaagaaaaaaacacatcattcaagactggtggacaaagattgtgtccttaatgcaactcttaagcaactaagaagccttggagtaaaaattgattctcccactaaagtgaagaaaaatgcacataacgtggatcacgccagtgtgttggcatgcatcagcccagaagcagtgatctctggattaaactgcatgtcatttgctaatgttggcatgagcggcttaagccccaatggtgtggatttgagcatggaggcaaatgctatagctctgaaatatttaaatgaaaatcagctgtcacaactgtctgtcactcgatcgaaccaaaataattgtgacccattcagccttctccatattaatacagacagaagcacagtggggcttagtttaatttcaccaaacaacatgtcatttgcaaccaaaaaatatatgaagagatatggactcctacaaagcagtgacaatagtgaagatgaagaggaacctcccgacaatgcagatagcaagagtgaatatttattgaatcagaaccttaggtccatacccgaacagcttggtggtcagaaagagccttctaagaatgaccatgaaataattaattgttctaactgtgaatctgtggggaccaacgcagatacgccagtattgagaaatattacaaatgaagttttgcagacaaaagcaaaacagcagttgactgaaaagccagctttcttagtaaagaaccttaaaccaagtcctgcagtgaaccttcgaaccgggaaagcagagttcactcaacatcctgagaaagaaaatgaaggggacattacaatttttcctgaaagtttgcaaccttctgaaacgctaaagcagatgaatagcatgaattcagtaggcaccttcttagatgtaaaacgtctcagacagttaccaaaattattttaaccttttaactccctgcccttttaatacagggacagggtgtctcctgaagatacttagggaaaacaggagcctaccacaaggctcctgatcattctggagtcactgtttcttggtagcagccaattgggaagagtgacttctgtgagatggctggctggtgataggactaagttctcattgttcaaatagagctgttcaacatcactgaaacctttaagaaaagccctgagatcagttattcctacaagtttaagtagtagacagatactatccagctctaagtctcaactgctcttttatactgtacttttttttttgagacggagttttgctcttgtagcccaggctggagtgcaatggcaggatctcagatcactgcaacctctgcctcctgggttcaagcgattttcctgcttcatcttcccaggtagctgggattacaggcatgtgccacaacgcctggctaattttgtatttttagtagagactggtttctccatgttggtcaggctggtctcaaactcccgacctcaggtgatccgcccgcctcggcctcctaaagtgctgggattacaggcgtgagccactgcccagctatactgtatatttaagaaggtccagcatgttgcatctctgcattatcctatatcataaaagaagcataagttatcatggtgttgggtaaattagcgaaatcaaccgcttcctaagtttaagggaaaagttatttttaaaaacaacttaataaaaacttacactcttatacaagagtgtatttccccttaattaggatgcatgttgattaaactcgagatacagctttttgcagtatggtgggttggttttggtgtaacatcttcaacatgtcacactggctatcaaagaataagaaaattattgagtatgagtgtgttttataaactttctgagtttttcagatgtcttaatattttt

SEQ ID NO: 12453 - DNA, 1866 bp, Homo sapiens
cgctgttgccatggcagtgtggtcctggctgccgcggaggcaggtgccggggtctcctttgcctcaatgtgaagagcttagaaagaggaggagaggagaactcccccggccatctctgtgatcccagccgccgcattttacacagcatatttccttcacaaacagaaaatgaatgaaaataaagatactgattcaaagaaaagtgaagaatacgaagatgactttgaaaaggacctggagtggttaattaatgaaaatgaaaaaagtgatgccagcataatagagatggcttgtgagaaggaagagaatattaaccaagacttaaaagagaatgagacagtaatggagcacaccaaacggcattctgatcctgacaaatctttgcaggatgaggtctcaccaagaagaaatgacatcatttctgtaccaggtattcaacctttggatcccatatcagattcagatagtgaaaactctttccaggaatccaaactagaaagccagaaagacttggaggaggaagaggatgaggaagtaaggagatatattatggagaaaattgtacaagctaacaagcttctacagaatcaagaaccggtgaatgataaaagggagcgaaaacttaagttcaaggaccagttagttgatttggaagttcctccactagaagacactactacttttaaaaattattttgaaaacgaaaggaatatgtttgggaaactgtcacaattatgtatttccaatgattttggacaagaagatgtgctcctgtcacttactaatggaagctgtgaagaaaacaaggataggacaatactggtagagagagatggaaaatttgaacttctgaatttacaagacattgccagtcaggggtttttgcctcccattaataatgcaaatagtacagaaaatgaccctcagcagttgttacccagatcttccaactcctctgtcagtggcaccaagaaagaagattctacagcaaagattcatgctgtcactcactcatcaacaggagagccgctggcttatatcgctcagccaccactcaaccgcaagacttgtccaagctctgctgtcaactcagatcgaagtaaagggaatgggaaatctaatcacaggacacagtctgcacatatctcaccagtgacttcaacatactgtctttcccctcgacagaaagaactacaaaaacaactagaagaaaagagagaaaaactgaaaagagaggaagagcgacgaaaaatagaagaagagaaagaaaaaaagagagagaatgacatagtatttaaagcgtggttgcaaaagaaaagagagcaggtcttagaaatgaggagaattcagcgagcaaaggaaattgaagacatgaacagtagagaaaacagagatccacaacaagcttttcgattatggcttaaaaaaaagcacgaagagcagatgaaagaaagacagacagaagaactaagaaagcaagaggaatgtttattcttccttaaaggaacagaaggccgggaaagggcctttaaacaatggttaagaaggaaacggatggaaaaaatggcagagcaacaagctgtcagagagagaactagacagctccgactagaagctaagcgttctaaacagttacagcaccacctatatatgtcagaagccaaaccttttcgttttactgatcattataactgaaagtttctattaaatatttcagtgggcagctgctatcaaaattttggatatgatttcttagggtctgtgtactttggttgtattctaaattatggaaatggtatttatcttttattgacagtgaatttgtttttttaatactagaacaaaataaatttttttctcacagtg

SEQ ID NO: 12454 - DNA, 4401 bp, Homo sapiens
ccttctgcgttcccagcgcgcggcccgaatggcggccgacaagggcccggcggctggacctcggtcgcgagctgccatggcccagtggaggaagaagaaagggctccggaagcgccgaggcgcggcctcccaggcccgcggcagcgactcggaggacggcgagtttgagatccaggcggaagatgacgcccgggcccggaagctgggacctggaagacccctgcccaccttccccacctcggaatgcacctcggatgtggagccggacacccgggagatggtgcgtgcccagaacaagaagaagaagaagtctggaggcttccagtccatgggcctgagctacccggtgttcaaaggcatcatgaagaaggggtacaaggtgccaacacccatccagaggaagaccatcccggtgatcttggatggcaaggacgtggtggccatggcccggacgggcagtggcaagacagcctgcttcctcctcccaatgttcgagcggctcaagacccacagtgcccagaccggggcccgcgccctcatcctctcgccgacccgagagctggccctgcagaccctgaagttcactaaggagctaggcaagttcactggcctcaagactgccctgatcctgggtggagacaggatggaagaccagtttgcagccctgcacgaaaatcccgacataattattgccacgcccggacggttggtgcatgtggctgtggaaatgagcctgaagctgcagagtgtggaatacgtggtgttcgatgaagctgaccggctttttgaaatgggtttcgcagagcagctgcaggagatcatcgcccgcctccccgggggccaccagacggtgctgttctccgccacgctgcccaaactgctggtggaatttgcccgggctggcctcacggagcccgtgctcatccggcttgacgtggataccaagctcaacgagcagctgaagacctccttcttcctcgtgcgggaggacaccaaggctgccgtgctgctccacctgctgcacaacgtggtgcggccccaggaccagaccgtggtgtttgtggccacgaagcaccacgccgagtacctcactgagctgctgacgacccagcgggtgagctgcgcccacatctacagtgccctagacccgacagcccgcaagatcaatctcgccaaattcacgcttggcaagtgctccactctcattgtgactgacctggccgcccgaggcctggacatcccgctgctggacaatgtcatcaactacagcttccccgccaagggcaaactcttcctgcaccgcgtgggccgtgtggctcgggctggccgaagtggcacagcctactccttggtggcccctgatgaaatcccctacctgctggatctgcacctgttcctgggccgctccctcaccctcgcccgacccctcaaggagccctcaggtgtggccggtgtggatggcatgctgggtcgggtgccacagagtgtggtggacgaggaggacagtggtctgcagagcaccctggaggcatcgctggagctacggggcctggcccgcgttgctgataacgcccagcagcagtatgtgcgctcacgcccggcgccctcgcctgagtccatcaagagggccaaggagatggaccttgtggggctgggcctgcaccccctcttcagctcgcgttttgaggaggaggagctgcagcggctgaggctggtggacagcataaagaactaccgctcccgggcgactatctttgagatcaacgcctccagccgagacctgtgcagccaggtgatgcgcgccaagcggcagaaggaccgcaaggccatcgcccgcttccagcagggacagcaggggcggcaggagcagcaggagggcccagtgggcccagccccgagccgcccagcactgcaggagaagcagcctgagaaggaggaggaggaggaggcgggagagagtgtggaggacattttctcagaggtcgtgggccggaagcggcagcggtcaggacccaacaggggagccaagaggcggagggaggaggcccggcagcgggaccaggaattctacatcccctaccggcccaaggactttgacagcgagcggggcctgagcatcagcggggaagggggagcctttgagcagcaggcagctggcgctgtcctggacttgatgggggatgaagcccagaacctgacgaggggccggcagcagctcaagtgggaccgtaagaagaagcggtttgtgggacagtcaggacaggaagacaagaagaagattaagacagagagcggccgctacatcagcagctcctacaagcgagacctctatcagaagtggaaacagaaacagaaaattgatgatcgtgactcggacgaagaaggggcatctgaccggcgaggcccagagcgaagaggtgggaagcgagaccgtggccaaggtgcatcccggccccacgccccaggcacccctgcaggccgagtccgcccggaactcaagaccaagcagcagatcctgaagcagcggcgccgggcccagaagctgcacttcctgcagcgtggtggcctcaagcagctctctgcccgcaaccgccgccgcgtccaggagctgcagcagggcgccttcggccggggtgcccgctccaagaagggcaagatgcggaagaggatgtgaggaccaggacccagccccgtggctccttgattggccttagggtgggcatcagcagacgttcccgtgcaccactgtgtgcctggccctgtgctgggcactgggggcactccctgcaggagccatcatctgtgaaaaggagcactgtatggccacagaagggcagcagctgcgtcagcctaagacagagacatttgaacagggccttgaagggtgtgcaggagttcgccagcaaagccaggcaggccaagacttgagttggcaactcagctgctgctgcttccatgtgttctgggttcagaggtcatggctgcaccggtcagagccctgagtgcctcagggtttggcaatggaatttttaatgtaataaatctttattgagcactgctggtggccaggagtgcggtctacttggggaactggaatggagagacccaggtactaaaatcccagctaacgtggcagaggagttgcgggtctcctgagggtgagttctgctgccttgtccatttagcgatgaggaaagtgaagctcagagcacaaaccaggtgccagaggcgggagttggtcccccttcctcccactggacatggttgcagctgggagtgggctgggggaggggaacaggatgcccagcccagggggcaaggacacagctgctcccctctggctatgaagaggttaacgcggcccctccacacctggaggtcagaacctggcctgtcctctgtcttcttgccacccaccccctgtttgaggttctgagaaggtcaagggcagccccagcagctggattctcaggctgggcccctcacctggcagagtccatagtggagggggccttggtgatctctcatctagcatggaccctgttctgagacctgacaaagagttttttttcatgccccaaccaccctggcagggagggcctggtctgatctcattttagaggcagttgccccacacatagccccttgaccttcccatcacctcctcatcagggcctgcatttatggagtgcttgctatgtgcccctcatggcaggcccacagcactctgaacaggcacagccctcccatcttcccaatgaggaaacggattcaggaagagccactcagtccacaccccattggaaatgtgggccctcctatctcagggtctctcaggggttccctctcccgctgctcacctgtgtcagggctaggaggcaggggctgcaggctcagcctgacccaggccggccagcatggcagagaggtcctgcatgaacagcttcacctgggggggcccagcacgaagtcacatcccagccccagagtcactgtccagcccccacccctcaacacgcgggggaggccgaaaggtagggcggggactggagatcccctcattaaaagaacagtgatgatggtggttcccagaggtggtgactgagatcctaaaccgttctgggttttgaaagcctcaggccaaccttcccaactgctgcgtgagcagacaccttcacagcttcctcgctgctgtcacctgcactatccaattagtattttcatttacatcaatcagctttattttcttgtaactggatcagtcatattcattggtttgtgacctactcttatctccgtgggtggctctccttttgttttaattaacttctttatgaatatgaacttaataaataccatggatccattgtaaaaactaaaaaaaaaaaaaaaaaaaaaaaa

SEQ ID NO: 12455 - DNA, 599 bp, Homo sapiens
aggatgaggaggaggccctgcccctccaaacgtggcctcctatggacacccagactcacagccttcctatcacccacactcagctccatagcaactctcagccccaaagccgcacctgcacccgccattgccaaaccttcagccagagttgcagacagagccatcgtggcagccggagccagagctccagccagagcccggccagccaccgcaacccaactggagcccacagctcatccggccaccagagccagagtcccaacactagtccaccaccaaagcgccacaaaaagactatgaactcccaccactctcccatgcggcccaccatcctgcactgccgctgccccaagaacagaaagaacttggaaggcaagctgaaaaagaaaaaaatggccaagaggatccagcaggtgtacaaaaccaagacgcggagctcaggatggaaatccaactaatgagaccgcactccttggcttgttcctgcgtgtttcacccaaaggagaaaatgctaggatgaagtcaatcttcttgcaggaacatgttactatggtgatttctacgcaacactaattaaagcttgtacctggaagactaaa

SEQ ID NO: 12456 - DNA, 3521 bp, Homo sapiens
aggcctgaatatttggacaagatggcagattcatcatcatcttctttctttcctgattttgggctgctattgtatttggaggagctaaacaaagaggaattaaatacattcaagttattcctaaaggagaccatggaacctgagcatggcctgacaccctggaatgaagtgaagaaggccaggcgggaggacctggccaatttgatgaagaaatattatccaggagagaaagcctggagtgtgtctctcaaaatctttggcaagatgaacctgaaggatctgtgtgagagagcgaaagaagagatcaactggtcggcccagactataggaccagatgatgccaaggctggagagacacaagaagatcaggaggcagtgctgggtgatggaacagaatacagaaatagaataaaggaaaaattttgcatcacttgggacaagaagtctttggctggaaagcctgaagatttccatcatggaattgcagagaaagatagaaaactgttggaacacttgttcgatgtggatgtcaaaaccggtgcacagccacagatcgtggtgcttcagggagctgctggagttgggaaaacaaccttggtgagaaaggcaatgttagattgggcagagggcagtctctaccagcagaggtttaagtatgttttttatctcaatgggagagaaattaaccagctgaaagagagaagctttgctcaattgatatcaaaggactggcccagcacagaaggccccattgaagaaatcatgtaccagccaagtagcctcttgtttattattgacagtttcgatgaactgaactttgcctttgaagaacctgagtttgcactgtgcgaagactggacccaagaacacccagtgtccttcctcatgagtagtttgctgaggaaagtgatgctccctgaggcatccttattggtgacaacaagactcacaacttctaagagactaaagcagttgttgaagaatcaccattatgtagagctactaggaatgtctgaggatgcaagagaggagtatatttaccagttttttgaagataagaggtgggccatgaaagtattcagttcactaaaaagcaatgagatgctgtttagcatgtgccaagtccccctagtgtgctgggccgcttgtacttgtctgaagcagcaaatggagaagggtggtgatgtcacattgacctgccaaacaaccacagctctgtttacctgctatatttctagcttgttcacaccagtagatggaggctctcctagtctacccaaccaagcccagctgagaagactgtgccaagtcgctgccaaaggaatatggactatgacttacgtgttttacagagaaaatctcagaaggcttgggttaactcaatctgatgtctctagttttatggacagcaatattattcagaaggacgcagagtatgaaaactgctatgtgttcacccaccttcatgttcaggagttttttgcagctatgttctatatgttgaaaggcagttgggaagctgggaacccttcctgccagccttttgaagatttgaagtcattacttcaaagcacaagttataaagacccccatttgacacagatgaagtgctttttgtttggccttttgaatgaagatcgagtaaaacaactggagaggacttttaactgtaaaatgtcactgaagataaaatcaaagttacttcagtgtatggaagtattaggaaacagtgactattctccatcacagctgggatttctggagttgtttcactgtctgtatgagactcaagataaagcgtttataagccaggcaatgagatgtttcccaaaggttgccattaatatttgtgagaaaatacatttgcttgtatcttctttctgccttaagcactgccggtgtttgcggaccatcaggctgtctgtaactgtggtatttgagaagaagatattaaaaacaagcctcccaactaacacttgggatggtgatcgcattactcactgttggcaagatctctgttctgtgcttcatacaaatgaacacttgagagaattggacctgtaccatagcaaccttgataaatcagcaatgaatatcctgcatcatgaactaaggcacccaaactgtaaactacaaaagctactgttgaaatttatcactttccctgatggttgtcaggatatctctacttctttgattcataacaagaatctgatgcatcttgacctaaaagggagtgatataggggataatggagtaaagtcattgtgtgaggccttgaaacacccagagtgtaaactacagactctcaggctggaatcttgcaacctaactgtattttgttgtctaaatatatctaatgctctcatcagaagccagagcctgatatttctgaatctgtcaaccaataatctgttggatgatggagtgcagcttttgtgtgaggccttaagacatccaaagtgttatctagagagactgtccttagaaagctgtggtctcacagaggctggctgtgagtatctttctttggctctcatcagcaataaaagactgacacatttgtgcttggcagacaatgtcttgggtgatggtggagtaaagcttatgagtgatgccctgcaacatgcacaatgtactctgaagagccttgtgctgaggcgttgccatttcacttcacttagcagtgaatatctgtcaacttctcttctacacaacaagagcctgacgcatctggatctaggatcaaactggctacaagacaatggagtgaagcttctgtgtgatgtctttcggcatccaagctgtaatcttcaggacttggaattgatgggctgtgttctcactaatgcatgttgtctggatctggcttctgttattttgaataacccaaacctgaggagcctggaccttgggaacaacgatttgcaggatgatggagtgaaaattctgtgtgatgctttgagatatccaaactgtaacattcagaggctcgggttggaatactgtggtttgacatctctctgctgtcaagatctctcctctgctcttatctgcaacaaaagactgataaaaatgaatctgacacagaataccttaggatatgaaggaattgtgaagttatataaagtcttgaagtctcctaagtgtaaactacaagttctagggttgtgcaaagaggcatttgatgaggaagcccagaagctgctggaagctgtgggagttagcaatccacacttaatcattaagccagattgtaactatcataatgaagaagatgtgtcttggtggtggtgtttctgatttgaagaaactgacattcctttaaaaatataaatataaatacatacatacatagatatatacccagacttgggtgcttagcttcagatactctatgcccagagatagtgcacttggcagctgtcagataccattcatctacttctctgtaaaatgtctgttctacttcacacagtggtcgagaggctaaaataaaatgaaaagcataaaactctctg

SEQ ID NO: 12457 - DNA, 2984 bp, Homo sapiens
gaaccgctgaggcgggcgcgggcccgggtggggccaaggttccggccactctgcagaatggagataatcaggagcaattttaagagtaatcttcacaaagtgtaccaggccatagaggaggccgacttcttcgccatcgatggggagttttcaggaatcagtgatggaccttcagtctctgcattaacaaatggttttgacactccagaagagaggtatcagaagcttaaaaagcattccatggactttttgctatttcagtttggcctttgcacttttaagtatgactacacagattcaaagtatataacgaagtcatttaacttctatgttttcccgaaacccttcaatagatcctcaccagatgtcaaatttgtttgtcagagctccagcattgactttctagcaagccagggatttgattttaataaagtttttcgaaatggaattccatatttaaatcaggaagaagaaagacagttaagagagcagtatgatgaaaaacgttcacaggcgaatggtgcaggagctctgtcctatgtatctcctaacacttcaaaatgtcctgtcacgattcctgaggatcaaaagaagtttattgaccaagtggtagagaaaatagaggatttattacaaagtgaagaaaacaagaacttggatttagagccatgtaccgggttccaaagaaaactaatttatcagactttgagctggaagtatccgaaaggcattcatgttgagactttagaaactgaaaagaaggagcgatatatagttatcagcaaagtagatgaagaagaacgcaaaagaagagagcagcagaaacatgccaaagaacaggaggagctgaatgatgctgtgggattttctagagtcattcacgccattgctaattcgggaaaacttgttattggacacaatatgctcttggacgtcatgcacacagttcatcagttctactgccctctgcctgcggacttaagtgagtttaaagagatgacaacatgtgttttccccagactcttggatactaaattgatggccagcacacaaccttttaaggatatcattaacaacacatcccttgcggaattggaaaagcggttaaaagagacacctttcaaccctcctaaagttgaaagtgccgaaggttttccaagttatgacacagcctctgaacaactccacgaggcaggctacgatgcctacatcacagggctgtgcttcatctccatggccaattacctaggttcttttctcagccctccaaaaattcatgtgtctgccagatcaaaactcattgaacctttttttaacaagttatttcttatgagggtcatggatatcccctatctaaacttggaaggaccagacttgcagcctaaacgtgatcatgttctccatgtgacattccccaaagaatggaaaaccagcgacctttaccagcttttcagtgcctttggtaacattcagatatcctggattgatgacacatcagcatttgtttcccttagccagcccgagcaagtaaagattgctgtcaataccagcaaatatgcagaaagctatcggatccaaacctatgctgaatatatggggagaaaacaggaagagaagcagatcaaaagaaagtggactgaagatagctggaaggaggctgacagcaaacggttaaacccccagtgcataccctacaccctgcagaatcactattaccgcaacaatagttttacagctcccagcacagtaggaaagagaaatttgagtcctagtcaagaggaagctggcctggaggacggagtgtcaggggagatttccgacactgagcttgagcagaccgattcctgtgcagagcccctctcagagggaaggaaaaaggccaagaaattaaaaagaatgaagaaggagctttctccagcaggaagcatctcgaagaacagccctgccacactctttgaagttcctgacacatggtaaccaagacctgagggcagcaaaccgctggtgctgtcgctgtgagcaagagccggctggcacatttggaagccgcactgtatttaacttaatcaaatgtggtatgggaggggttggaaaccaagttgtctcctgggggggagaaaacaggttttatttttgtggctgtggttttttcccctttttaatctaactgcctgttgacattgacactcatcacggttgtaggctgtcatgaatgtgtacgtgcttaaccagtgaattccgtgttgctcttgtgaggcctttcctgtcatgacccagtgtgcttaagaacctgcctgatggggagtgtcggctgtgaaatctgcaaaaagagctgacattccagctgctgtgatcatgaatttgggggtgtactgtcctgcctgtgcatcttctcgcactgagattttgaggcagttgcagccctcggttagtctcccagtggaaaaatcggttgtgcctccctgcttcccaccatagctgcctgaaaacatgacgctctcaagcttgtccttccttcaggaagatgtccactcatgcccacccatgagagggcttgccgtatgccctggcctttgggcatatttatgtagagttcctttctcctaagacgtgagtttctcatgggggatgtacgagtaaaaaggttaacttctgttcttatgcgtggcgctgtgttcactttccagagtctctgttcgtttgtttggatggcggtctcggggtacggcagcgtgtgtgcgtacgtgtctgtgtgtgtgtgtgtgtgtgtgtgtgtgtgtgtgtgtgtgaaatcgtgcaaatctacaacatgtcccagcccattctccgttgaaacagatcacagcaacgacaaacgctcatggcgctgctttgctccacccgcttcagatagatcattgttagatatttcacatttttgtatggtggaaataaaaatgaaaaatgtatttccaaaagatgaaaattaaaaacattttcatagg

SEQ ID NO: 12458 - DNA, 7292 bp, Homo sapiens
aacactgatatttgcatttaatggggaacaaaagatgaagaaggaaaaggaatatattcactaaggattctatctgcttactgctacagacctatgtgttaaggaattcttctcctcctccttgcgtagaagttgatcagcactgtggtcagactgcatttatcttgtcattgccagaagaaatcttggacagaatgtaacagtacgtctctctctgattgcgatggaaggtgataaactgatactcctttattaaagttacatcgcactcaccacagaaaaccattctttaaagtgaatagaaaccaagcccttgtgaacacttctattgaacatgactcatggagaagagcttggctctgatgtgcaccaggattctattgttttaacttacctagaaggattactaatgcatcaggcagcagggggatcaggtactgccgttgacaaaaagtctgctgggcataatgaagaggatcagaactttaacatttctggcagtgcatttcccacctgtcaaagtaatggtccagttctcaatacacatacatatcaggggtctggcatgctgcacctcaaaaaagccagactgttgcagtcttctgaggactggaatgcagcaaagcggaagaggctgtctgattctatcatgaatttaaacgtaaagaaggaagctttgctagctggcatggttgacagtgtgcctaaaggcaaacaggatagcacattactggcctctttgcttcagtcattcagctctaggctgcagactgttgctctgtcacaacaaatcaggcagagcctcaaggagcaaggatatgccctcagtcatgattctttaaaagtggagaaggatttaaggtgctatggtgttgcatcaagtcacttaaaaactttgttgaagaaaagtaaagttaaagatcaaaagcctgatacgaatcttcctgatgtgactaaaaacctcatcagagataggtttgcagagtctcctcatcatgttggacaaagtggaacaaaggtcatgagtgaaccgttgtcatgtgctgcaagattacaggctgttgcaagcatggtggaaaaaagggctagtcctgccacctcacctaaacctagtgttgcttgtagccagttagcattacttctgtcaagcgaagcccatttgcagcagtattctcgagaacacgctttaaaaacgcaaaatgcaaatcaagcagcaagtgaaagacttgctgctatggccagattgcaagaaaatggccagaaggatgttggcagttaccagctcccaaaaggaatgtcaagccatcttaatggtcaggcaagaacatcatcaagcaaactgatggctagcaaaagtagtgctacagtgtttcaaaatccaatgggtatcattccttcttcccctaaaaatgcaggttataagaactcactggaaagaaacaatataaaacaagctgctaacaatagtttgcttttacatcttcttaaaagccagactatacctaagccaatgaatggacacagtcacagtgagagaggaagcatttttgaggaaagtagtacacctacaactattgatgaatattcagataacaatcctagttttacagatgacagcagtggtgatgaaagttcttattccaactgtgttcccatagacttgtcttgcaaacaccgaactgaaaaatcagaatctgaccaacctgtttccctggataacttcactcaatccttgctaaacacttgggatccaaaagtcccagatgtagatatcaaagaagatcaagatacctcaaagaattctaagctaaactcacaccagaaagtaacacttcttcaattgctacttggccataagaatgaagaaaatgtagaaaaaaacaccagccctcagggagtacacaatgatgtgagcaagttcaatacacaaaattatgcaaggacttctgtgatagaaagccccagtacaaatcggactactccagtgagcactccacctttacttacatcaagcaaagcagggtctcccatcaatctctctcaacactctctggtcatcaaatggaattccccaccatatgtctgcagtactcagtctgaaaagctaacaaatactgcatctaaccactcaatggaccttacaaaaagcaaagacccaccaggagagaaaccagcccaaaatgaaggtgcacagaactctgcaacgtttagtgccagtaagctgttacaaaatttagcacaatgtggaatgcagtcatccatgtcagtggaagagcagagacccagcaaacagctgttaactggaaacacagataaaccgataggtatgattgatagattaaatagccctttgctctcaaataaaacaaatgcagttgaagaaaataaagcatttagtagtcaaccaacaggtcctgaaccagggctttctggttctgaaatagaaaatctgcttgaaagacgtactgtcctccagttgctcctggggaaccccaacaaagggaagagtgaaaaaaaagagaaaactcccttaagagatgaaagtactcaggaacactcagagagagctttaagtgaacaaatactgatggtgaaaataaaatctgagccttgtgatgacttacaaattcctaacacaaatgtgcacttgagccatgatgctaagagtgccccattcttgggtatggctcctgctgtgcagagaagcgcacctgccttaccagtgtccgaagactttaaatcggagcctgtttcacctcaggatttttctttctccaagaatggtctgctaagtcgattgctaagacaaaatcaagatagttacctggcagatgattcagacaggagtcacagaaataatgaaatggcacttctagaatcaaagaatctttgcatggtccctaagaaaaggaagctttatactgagccattagaaaatccatttaaaaagatgaaaaacaacattgttgatgctgcaaacaatcacagtgccccagaagtactgtatgggtccttgcttaaccaggaagagctgaaatttagcagaaatgatcttgaatttaaatatcctgctggtcatggctcagccagcgaaagtgaacacaggagttgggccagagagagcaaaagctttaatgttctgaaacagctgcttctctcagaaaactgtgtgcgagatttgtccccgcacagaagtaactctgtggctgacagtaaaaagaaaggacacaaaaataatgtgaccaacagcaaacctgaatttagcatttcttctttaaatggactgatgtacagttccactcagcccagcagttgcatggataacaggacattttcatacccaggtgtagtaaaaactcctgtgagtcctactttccctgagcacttgggctgtgcagggtctagaccagaatctgggcttttgaatgggtgttccatgcccagtgagaaaggacccattaagtgggttatcactgatgcggagaagaatgagtatgaaaaagactctccaagattgaccaaaaccaacccaatactatattacatgcttcaaaaaggaggcaattctgttaccagtcgagaaacacaagacaaggacatttggagggaggcttcatctgctgaaagtgtctcacaggtcacagccaaagaagagttacttcctactgcagaaacgaaagcttctttctttaatttaagaagcccttacaatagccatatgggaaataatgcttctcgcccacacagcgcaaatggagaagtttatggacttctgggaagcgtgctaacgataaagaaagaatcagaataaaatgtacctgccatccagttttggatctttttaaaactaatgagtatgaacttgagatctgtataaataagagcatgatttgaaaaaaagcatggtataattgaaacttttttcattttgaaaagtattggttactggtgatgttgaaatatgcatactaatttttgcttaacattagatgtcatgaggaaactactgaactagcaattggttgtttaacacttctgtatgcatcagataacaactgtgagtagcctatgaatgaaattcttttataaatattaggcataaattaaaatgtaaaactccattcatagtggattaatgcattttgctgcctttattagggtactttattttgcttttcagaagtcagcctacataacacatttttaaagtctaaactgttaaacaactctttaaaggataattatccaataaaaaaaaacctagtgctgattcacagcttattatccaattcaaaaataaattagaaaaatatatgcttacatttttcacttttgctaaaaagaaaaaaaaaaggtgtttatttttaactcttggaagaggttttgtggttcccaatgtgtctgtcccaccctgatccttttcaatatatatttctttaaaccttgtgctacttagtaaaaattgattacaattgagggaagtttgatagatcctttaaaaaaaaggcagatttccattttttgtattttaactactttactaaattaatactcctccttttacagaattagaaaagttaacatttatctttaggtggtttcctgaaaagttgaatatttaagaaattgtttttaacagaagcaaaatggcttttctttggacagttttcaccatctcttgtaaaagttaattctcaccattcctgtggtacctgcgagtgttatgaccaggattccttaaacctgaactcagaccacttgcattagaaccatctggagcacttgttttaaaatgcagattcataggcagcatctcagatctacagaacaagaatctctgctaagtggacctggaatcttccatctgcatcttaacatgctctctaggtgtttcttgtgtttgagaaccatgacttatgactttcctcagaacatgagactgtaaaacaaaaacaaaaaactatgtgatgcctctattttccccaatacagtcacacatcagctcaaaatttgcaatattgtagttcatatattaccgttatgtctttggaaatcgggttcagaacactttttatgacaaaaattgggtggaggggataactttcatatctggctcaacatctcaggaaaatctgtgattatttgtgtgttctaatgagtaacatctacttagttagccttagggatggaaaaacagggccacttaccaaactcaggtgattccaggatggtttggaaacttctcctgaatgcatccttaacctttattaaaaccattgtcctaagaacaatgccaacaaagcttacaacatttagtttaaacccaagaagggcactaaactcagattgactaaataaaaagtacaaagggcacatatacgtgacagaattgtacacaatcactccattggatcttttactttaaagtagtgatgaaaagtacatgttgatactgtcttagaagaaattaatatattagtgaagccacatggggtttcagttgcgaaacaggtctgtttttatgttcagtttgtacaatccacaattcattcaccagatattttgttcttaattgtgaaccaggttagcaaatgacctatcaaaaattattctataatcactactagttaggatattgatttaaaattgttctacttgaagtggtttctaagatttttatattaaaaataggtgtgatttcctaatatgatctaaaaccctaaatggttatttttcctcagaatgatttgtaaatagctactggaaatattatacagtaataggagtgggtattatgcaacatcatggagaagtgaaggcataggcttattctgacataaaattccactggccagttgaatatattctattccatgtccatactatgacaatcttattgtcaacactatataaataagcttttaaacaagtcatttttcttgatcgttgtggaaggtttggagccttagaggtatgtcagaaaaaatatgttggtattctcccttgggtagggggaaatgacctttttacaagagagtgaaatttaggtcagggaaaagaccaagggccagcattgctacttttgtgtgtgtgtgtgtgggttttgttttgtttttttggttggctggttgttttcgttgttgttaacaaaggaatgagaatatgtaatacttaaataaacatgaccacgaagaatgctgttctgatttactagagaatgttcccaatttgaatttagggtgattttaaagaacagtgagaaagggcatacatccacagattcactttgtttatgcatatgtagatacaaggatgcacatatacacattttcaaggactattttagatatctagacaatttcttctaataaagtcatttgtgaaagggtactacagcttattgacatcagtaaggtagcattcattacctgtttattctctgctgcatcttacagaagagtaaactggtgagagtatatattttatatatatatatatatatatatatataatatgtatatatatatatattgacttgttacatgaagatgttaaaatcggtttttaaaggtgatgtaaatagtgatttccttaatgaaaaatacatattttgtattgttctaatgcaacagaaaagccttttaatctctttggttcctgtatattccatgtataagtgtaaatataatcagacaggtttaaaagttgtgcatgtatgtatacagttgcaagtctggacaaatgtatagaataaaccttttatttaagttgtgattacctgctgcatgaaaagtgcatgggggaccctgtgcatctgtgcatttggcaaaatgtcttaacaaatcagatcagatgttcatcctaacatgacagtattccatttctggacatgacgtctgtggtttaagctttgtgaaagaatgtgctttgattcgaagggtcttaaagaatttttttaatcgtcaaccacttttaaacataaagaattcacacaactactttcatgaattttttaatcccattgcaaacattattccaagagtatcccagtattagcaatactggaatataggcacattaccattcatagtaagaattctggtgtttacacaaccaaatttgatgcgatctgctcagtaatataatttgccatttttattagaaatttaatttcttcatgtgatgtcatgaaactgtacatactgcagtgtgaatttttttgttttgttttttaatcttttagtgtttacttcctgcagtgaatttgaataaatgagaaaaaatgcattgtc

SEQ ID NO: 12459 - DNA, 5737 bp, Homo sapiens
taggcaggcggctgagccggcggcgggtggcctgcccaacgtgtgctgggtgggagaaggcgaggcggcagcgatgctgtctcttccgtgaggagcgcagaggaggtcgcggcgccggaggccccagaaggctcgaaggcgccgcgggctggggtcggtggcttagggagcccgtccggccatggtggccgcgggtggtggttggcgcggctgcgctgcggcccggggcagtgcggagccgggacagtcgcggcgctgacgcccgcgggccccagctgcagatatgaagcggagccgctgccgcgaccgaccgcagccgccgccgcccgaccgccgggaggatggagttcagcgggcagcggagctgtctcagtctttgccgccgcgccggcgagcgccgcccgggaggcagcggctggaggagcggacgggccccgcggggcccgagggcaaggagcaggatgtagtaactggagttagtcccctgctcttcaggaaactcagtaatcctgacatattttcatccactggaaaagttaaacttcagcgacaactgagtcaggatgattgtaagttatggagaggaaacctggccagctctctatcgggtaagcagctgctccctttgtccagcagtgtacatagcagtgtgggacaggtgacttggcagtcgtcaggagaagcatcaaacctggttcgaatgagaaaccagtcccttggacagtctgcaccttctcttactgctggcctgaaggagttgagccttccaagaagaggcagcttttgtcggacaagtaaccgcaagagcttgattgtgacctctagcacatcacctacactaccacggccacactcaccactccatggccacacaggtaacagtcctttggacagcccccggaatttctctccaaatgcacctgctcacttttcttttgttcctgcccgtaggactgatgggcggcgctggtctttggcctctttgccctcttcaggatatggaactaacactcctagctccactgtctcatcatcatgctcctcacaggaaaagctgcatcagttgcctttccagcctacagctgatgagctgcactttttgacgaagcatttcagcacagagagcgtaccagatgaggaaggacggcagtccccagccatgcggcctcgctcccggagcctcagtcccggacgatccccagtatcctttgacagtgaaataataatgatgaatcacgtttacaaagaaagattcccaaaggccaccgcacaaatggaagagcgactagcagagtttatttcctccaacactccagacagcgtgctgcccttggcagatggagccctgagctttattcatcatcaggtgattgagatggcccgagactgcctggataaatctcggagtggcctcattacatcacaatacttctacgaacttcaagagaatttggagaaacttttacaagatgctcatgagcgctcagagagctcagaagtggcttttgtgatgcagctggtgaaaaagctgatgattatcattgcccgcccagcacgtctcctggaatgcctggagtttgaccctgaagagttctaccaccttttagaagcagctgagggccacgccaaagagggacaagggattaaatgtgacattccccgctacatcgttagccagctgggcctcacccgggatcccctagaagaaatggcccagttgagcagctgtgacagtcctgacactccagagacagatgattctattgagggccatggggcatctctgccatctaaaaagacaccctctgaagaggacttcgagaccattaagctcatcagcaatggcgcctatggggctgtatttctggtgcggcacaagtccacccggcagcgctttgccatgaagaagatcaacaagcagaacctgatcctacggaaccagatccagcaggccttcgtggagcgtgacatactgactttcgctgagaacccctttgtggtcagcatgttctgctcctttgataccaagcgccacttgtgcatggtgatggagtacgttgaagggggagactgtgccactctgctgaagaatattggggccctgcctgtggacatggtgcgtctatactttgcggaaactgtgctggccctggagtacttacacaactatggcatcgtgcaccgtgacctcaagcctgacaacctcctaattacatccatggggcacatcaagctcacggactttggactgtccaaaatgggcctcatgagtctgacaacgaacttgtatgagggtcatattgaaaaggatgcccgggaattcctggacaagcaggtatgcgggaccccagaatacattgcgcctgaggtgatcctgcgccagggctatgggaagccagtggactggtgggccatgggcattatcctgtatgagttcctggtgggctgcgtccctttttttggagatactccggaggagctctttgggcaggtgatcagtgatgagattgtgtggcctgagggtgatgaggcactgcccccagacgcccaggacctcacctccaaactgctccaccagaaccctctggagagacttggcacaggcagtgcctatgaggtgaagcagcacccattctttactggtctggactggacaggacttctccgccagaaggctgaatttattcctcagttggagtcagaggatgatactagctattttgacacccgctcagagcgataccaccacatggactcggaggatgaggaagaagtgagtgaggatggctgccttgagatccgccagttctcttcctgctctccaaggttcaacaaggtgtacagcagcatggagcggctctcactgctcgaggagcgccggacaccacccccgaccaagcgcagcctgagtgaggagaaggaggaccattcagatggcctggcagggctcaaaggccgagaccggagctgggtgattggctcccctgagatattacggaagcggctgtcggtgtctgagtcgtcccacacagagagtgactcaagccctccaatgacagtgcgacgccgctgctcaggcctcctggatgcgcctcggttcccggagggccctgaggaggccagcagcaccctcaggaggcaaccacaggagggtatatgggtcctgacacccccatctggagagggggtatctgggcctgtcactgaacactcaggggagcagcggccaaagctggatgaggaagctgttggccggagcagtggttccagtccagctatggagacccgaggccgtgggacctcacagctggctgagggagccacagccaaggccatcagtgacctggctgtgcgtagggcccgccaccggctgctctctggggactcaacagagaagcgcactgctcgccctgtcaacaaagtgatcaagtccgcctcagccacagccctctcactcctcattccttcggaacaccacacctgctccccgttggccagccccatgtccccacattctcagtcgtccaacccatcatcccgggactcttctccaagcagggacttcttgccagcccttggcagcatgaggcctcccatcatcatccaccgagctggcaagaagtatggcttcaccctgcgggccattcgcgtctacatgggtgactccgatgtctacaccgtgcaccatatggtgtggcacgtggaggatggaggtccggccagtgaggcagggcttcgtcaaggtgacctcatcacccatgtcaatggggaacctgtgcatggcctggtgcacacggaggtggtggagctgatcctgaagagtggaaacaaggtggccatttcaacaactcccctggagaacacatccattaaagtggggccagctcggaagggcagctacaaggccaagatggcccgaaggagcaagaggagccgcggcaaggatgggcaagaaagcagaaaaaggagctccctgttccgcaagatcaccaagcaagcatccctgctccacaccagccgcagcctttcttcccttaaccgctccttgtcatcaggggagagtgggccaggctctcccacacacagccacagcctttccccccgatctcccactcaaggctaccgggtgacccccgatgctgtgcattcagtgggagggaattcatcacagagcagctcccccagctccagcgtgcccagttccccagccggctctgggcacacacggcccagctccctccacggtctggcacccaagctccaacgccagtaccgctctccacggcgcaagtcagcaggcagcatcccactgtcaccactggcccacaccccttctcccccacccccaacagcttcacctcagcggtccccatcgcccctgtctggccatgtagcccaggcctttcccacaaagcttcacttgtcacctcccctgggcaggcaactctcacggcccaagagtgcggagccaccccgttcaccactactcaagagggtgcagtcggctgagaaactggcagcagcacttgccgcctctgagaagaagctagccacttctcgcaagcacagccttgacctgccccactctgaactaaagaaggaactgccgcccagggaagtgagccctctggaggtagttggagccaggagtgtgctgtctggcaagggggccctgccagggaagggggtgctgcagcctgctccctcacgggccctaggcaccctccggcaggaccgagccgaacgacgggagtcgctgcagaagcaagaagccattcgtgaggtggactcctcagaggacgacaccgaggaagggcctgagaacagccagggtgcacaggagctgagcttggcacctcacccagaagtgagccagagtgtggcccctaaaggagcaggagagagtggggaagaggatcctttcccgtccagaggccctaggagcctgggcccaatggtcccaagcctattgacagggatcacactggggcctcccagaatggaaagtcccagtggtccccacaggaggctcgggagcccacaagccattgaggaggctgccagctcctcctcagcaggccccaacctaggtcagtctggagccacagaccccatccctcctgaaggttgctggaaggcccagcacctccacacccaggcactaacagcactttctcccagcacttcgggactcacccccaccagcagttgctctcctcccagctccacctctgggaagctgagcatgtggtcctggaaatcccttattgagggcccagacagggcatccccaagcagaaaggcaaccatggcaggtgggctagccaacctccaggatttggaaacacaactccagcccagcctaagaacctgtctcccagggagcaggggaagacacagccacctagtgcccccagactggcccatccatcttatgaggatcccagccagggctggctatgggagtctgagtgtgcacaagcagtgaaagaggatccagccctgagcatcacccaagtgcctgatgcctcaggtgacagaaggcaggacgttccatgccgaggctgccccctcacccagaagtctgagcccagcctcaggaggggccaagaaccagggggccatcaaaagcatcgggatttggcattggttccagatgagcttttaaagcaaacatagcagttgtttgccatttcttgcactcagacctgtgtaatatatgctcctggaaaccatc

SEQ ID NO: 12460 - DNA, 10434 bp, Homo sapiens
atggcgaaccggcgagtggggcgaggctgctgggaagtgagcccgaccgagcggaggccgcccgcggggctgcggggccccgcggccgaggaggaggcgtcttccccgccggtcctgtctctcagccacttctgcaggtctcctttcctttgcttcggggacgttctcctgggagcctcacggacgctgtctctggccctagacaaccctaacgaggaggtggcagaagtgaagatctcccacttcccggccgcggacctgggcttcagtgtgtcgcagcgctgtttcgtgttgcagcctaaagagaaaattgttatttctgttaactggacaccactcaaagaaggccgagtaagagagattatgacatttcttgtaaatgatgttctgaaacaccaagctatattactaggaaatgcagaagagcagaaaaagaaaaagaggagtctttgggataccattaaaaagaagaaaatttcagcctctacaagtcacaacagaagggtttcaaatattcagaatgttaataaaacatttagtgtttcccaaaaagttgacagagttaggagcccactacaagcttgtgaaaacttggctatgaatgaaggcggtcccccaacagaaaacaattctttaatacttgaagaaaataaaatacccatatcacctattagccctgctttcaatgaatgccatggtgcaacttgcttgccactctctgtacgtcgatctactacctactcatctcttcatgcatcagaaaatagggaactattaaatgtacacagtgccaacgtttcaaaagtttcttttaatgagaaagctgtaactgaaacttcctttaattctgtaaatgttaatggccaaagaggagagaatagtaaacttagtcttacccccaactgttcttcaactttgaacattacacaaagccaaatacattttctaagtccagattcttttgtaaataatagtcatggagctaataatgaactagaattagtaacatgtctttcatcagatatgtttatgaaagataattcacagcctgtgcatttggaatcaacaattgcacatgaaatttatcagaaaattttaagtccagattctttcataaaagataattatggactaaatcaggatctagaatcagagtcagttaatcctattttatcccctaatcaatttttaaaagataacatggcatatatgtgtacatctcagcaaacatgtaaagtaccattatcaaatgaaaattctcaagtcccacagtctcctgaagattggagaaaaagtgaagtttcgccacgtattcctgaatgtcagggttcaaaatctcccaaagctatttttgaagaactagtagaaatgaagtcaaattactacagttttataaaacaaaataatcctaaattttctgcagttcaggatatttctagtcatagccacaataaacaacctaagagacgtccaatactttctgccactgttactaaaaggaaggccacctgtaccagagaaaaccaaactgagattaataaaccaaaagcaaaaagatgtctcaacagtgcagtgggtgaacatgaaaaagtaataaataatcaaaaggaaaaagaagattttcattcttatcttccaattatagatccaatattaagtaaatctaagagttataaaaacgaggtaacaccctcttcgacaacagcttcagttgctcggaaaagaaagagcgatggaagcatggaagatgcaaatgtgagagttgcaattacagaacatacagaagtgcgagaaatcaaaagaatccatttttctccctcagagcctaaaacatcagctgttaagaaaacaaaaaatgtgacaacacccatctcaaaacgtattagcaacagagagaaattaaacctgaagaagaaaactgatttatcaatattcagaactccaatttctaaaacaaacaaaaggacaaaacccattatcgctgtggcacagtccagtttgaccttcataaaaccattaaaaacagatattcccagacacccgatgccatttgctgcaaaaaacatgttttatgatgaacgctggaaggaaaagcaggaacagggcttcacttggtggttaaattttatattaacccctgatgacttcactgtaaaaacaaatatttctgaagtaaatgctgctactcttcttttgggaatagagaatcaacataaaataagtgttcctagagcacctacaaaagaggaaatgtctctcagagcttatactgctcggtgtaggttaaacagactacgtcgtgcagcatgccgtttgtttacttctgaaaaaatggttaaagctattaaaaagcttgaaattgaaattgaagctaggcggttaattgttcgaaaagatagacacctatggaaagatgtgggagaacgtcagaaagtcctgaattggctgttgtcctacaatcctttgtggcttcgaattggtctagagacaacttatggagaactcatatctttggaagataacagtgatgtcacagggttggctatgtttattctgaatcgcctactttggaatcctgatatagcagctgagtatagacaccccactgttcctcacctgtatagagatggtcatgaagaagctttgtccaagtttacattgaaaaagttattgttgttggtctgttttcttgattatgctaaaatttccagactcattgatcatgatccttgtctcttctgtaaagatgccgaattcaaggctagtaaagaaatccttttggctttttcacgagatttcctaagtggtgaaggtgacctttcccgtcaccttggcttattgggattacctgttaaccatgttcagacaccatttgatgaatttgattttgccgttacaaatcttgccgtagacttgcaatgtggagtgcgccttgtgcgaaccatggaacttctcacacagaactgggacctctcaaagaaactcaggattccggcaataagtcgtcttcaaaagatgcacaatgttgacattgttcttcaagttcttaaatcacgaggaattgaattaagtgatgagcatggaaatacaattctatctaaggatattgtggataggcacagagaaaaaactctcaggttgctttggaaaatagcgtttgcttttcaggtggatatttcccttaacttagatcaattaaaggaagaaattgcctttctaaaacacacaaagagtataaagaaaacaatatctctactatcatgccattctgatgatcttattaataagaaaaaaggcaaaagggatagtggttcctttgaacaatatagtgaaaacataaagttattgatggattgggtaaatgctgtttgtgccttctataataaaaaggtggagaattttacagtgtctttctcagacggccgtgtgttatgttacctgatccaccattaccatccttgctatgtgccatttgacgctatatgtcagcgtactactcaaactgtggaatgtacgcaaactggttcagtggtattaaattcatcatctgaatctgatgacagttctctggatatgtcacttaaagcatttgatcatgaaaatacttcagagctatacaaagagctcctagaaaatgaaaagaaaaattttcacttggttaggtctgcagttagagaccttggtggaatacctgctatgattaatcattcagatatgtcaaatacaattccagatgaaaaggtggttattacctatttgtcatttctttgtgcaaggcttttggatcttcgtaaagaaataagagctgctcgactcatacaaacaacatggagaaaatataaactaaaaacagatctcaaacgccatcaggagagagagaaagctgcaagaattattcaattggctgtaatcaattttctagcaaaacaaagattgagaaaaagagttaatgcagcactcgtcattcagaaatattggcgaagagtcttagcacagagaaaattattaatgttaaaaaaggaaaagctggaaaaagttcaaaataaagcagcatcacttattcagggatattggagaagatattccactagacaaagatttctgaaattgaaatattattcaatcatcctgcaatctaggataagaatgataattgctgttacatcttataaacgatatctttgggctacagttacaattcagaggcattggcgtgcttatttaagaagaaaacaagatcaacaaagatatgaaatgctaaaatcatcaactcttataatccaatctatgttcagaaaatggaagcaacgtaaaatgcaatcacaagtaaaagctacagtaatattgcaaagagcttttagagaatggcatttaagaaaacaagctaaagaagaaaattctgctattatcatacaatcatggtatagaatgcataaagaattacggaagtatatttatattagatcttgtgttgttatcattcagaaaagatttcggtgctttcaagcccaaaagttatataaaagaagaaaagagtccatactaaccatccagaagtactacaaagcatatctgaaaggaaagattgagcgcaccaactatttgcagaaacgagctgcagccattcaattacaagctgcttttaggagactgaaagctcataatttatgtagacaaattagagctgcttgtgttattcagtcatactggagaatgagacaagacagagttcgatttttaaaccttaagaagactattatcaaatttcaggcacatgtaagaaaacatcaacaacgacagaaatataagaagatgaagaaagcagctgttataattcagactcatttccgagcttatatttttgccatgaaagttctagcatcttaccagaaaacacgctctgctgtcattgtgctgcagtctgcatatagagggatgcaagccaggaaaatgtatattcacatcctcacatctgttataaagattcaatcatattatcgtgcttatgtttctaaaaaggaatttttgagcctaaaaaatgctacaataaaattgcagtcaactgttaagatgaaacaaacacgtaaacaatatttgcatttaagagcagctgcactatttatccagcaatgttaccgttccaaaaaaatagctgcacaaaagagagaagagtatatgcagatgcgggaatcttgtatcaaactgcaagcatttgttagaggataccttgtccgaaagcagatgaggttacaaagaaaagctgttatttcactacagtcttatttcagaatgagaaaggctcggcagtattatctgaaaatgtataaagcaattattgtcattcagaattactatcatgcatacaaagcacaggtcaatcagaggaagaacttcttgcaagtcaaaaaagcagctacttgcttgcaagcagcttacagaggttataaagtacgccagctaatcaaacaacaatctatagctgctcttaaaattcagtctgcttttagaggctataataaaagggtaaaatatcaatctgtgcttcaatctataataaagattcagagatggtacagggcgtacaagactcttcatgatacaagaacacattttttgaagacaaaggcagctgtgatttccctccagtctgcttatcgtggctggaaggttcggaaacagattagaagggaacatcaagctgccttgaagattcagtctgcttttagaatggccaaggcccagaaacagtttagattgtttaaaacagcagcattagtcatccagcaaaatttcagagcatggactgcaggaaggaagcaatgtatggagtatattgaactccgtcatgcggtactggtgcttcaatctatgtggaagggaaaaacactgagaagacagcttcaaaggcaacataaatgtgctatcatcatacagtcatactatagaatgcatgtgcaacaaaagaagtggaaaatcatgaaaaaagctgctcttctgattcaaaagtattatagggcttacagtattggaagagaacagaatcatttatatttgaaaacaaaagcagctgtagtaactttacagtcagcttatcgtggtatgaaagtgagaaaaagaataaaggattgcaacaaagcagcagtcactatacagtctaaatacagagcttacaaaaccaaaaagaaatatgcaacctatagagcttcagctattataattcagagatggtatcgaggtattaaaattacaaaccatcagcataaggagtatcttaatttgaagaagacagcaattaaaatccaatctgtttatagaggtattagagttagaagacatattcaacacatgcacagggcagccacttttattaaagccatgtttaaaatgcatcagtcaagaataagttaccatacaatgagaaaagcagctattgttattcaagtaagatgtagagcatattatcaaggtaaaatgcagcgtgaaaagtacctgacaattttgaaagctgttaaagtccttcaggcaagttttagaggagtaagagttagacggactcttagaaagatgcagactgcagcaacactcattcagtcaaactacagaagatacagacagcaaacatactttaataagttaaagaaaataacaaaaacagtacagcaaagatactgggcaatgaaagaaagaaacatacaatttcaaaggtataacaaactgaggcattctgtaatatacattcaggctatttttaggggaaagaaagctagaagacatttaaaaatgatgcatatagccgcaactctcattcagaggagatttagaactctaatgatgagaagaagattcctctctctcaagaaaactgctattttgattcagagaaaatatcgggcacatctttgtacaaagcatcacttacagttccttcaggtacaaaatgcagttattaaaatccagtcatcatacagaagatggatgataaggaaaaggatgcgagagatgcacagggctgctactttcatccagtctactttcagaatgcacagattacatatgagatatcgagctttgaaacaggcctccgttgtgatccaacagcaataccaagcaaatagagctgcaaaactgcagaggcagcattatctcagacaaagacactctgctgtgatccttcaggctgcattcaggggtatgaaaactagaagacatttgaagagtatgcattcctctgcaacccttattcagagtaggtttagatcattactggtgaggagaagattcatttccctcaaaaaagctactatttttgttcagaggaaatatcgagccaccatttgtgccaaacataaattgtaccaattcttgcacttaagaaaggcagccattacaatacagtcatcttacagaagactgatggtaaagaagaagttacaagaaatgcaaagggctgcagttctcattcaggctactttcaggatgcacagaacatatattacatttcagacttggaaacatgcttcaattctaattcagcaacattatcgaacatatagagctgcaaaattgcaaagagaaaattatatcagacaatggcattctgctgtggttattcaggctgcatataaaggaatgaaagcaagacaacttttaagggaaaaacacaaagcttctatcgtaatacaaagcacctacagaatgtataggcagtattgtttctaccaaaagcttcagtgggctacaaaaatcatacaagaaaaatatagagcaaataaaaagaaacagaaagtatttcaacacaatgaacttaagaaagagacttgtgttcaggcaggttttcaggacatgaacataaaaaaacagattcaggaacagcaccaggctgccattattattcagaagcattgtaaagcctttaaaataaggaagcattatctccaccttagagcaacagtagtttctattcaaagaagatacagaaaactaactgcagtgcgtacccaagcagttatttgtatacagtcttattacagaggctttaaagtacgaaaggatattcaaaatatgcaccgggctgccacactaattcagtcattctatcgaatgcacagggccaaagttgattatgaaacaaagaaaactgcaattgtggttatacagaattattataggttgtatgttagagtaaaaacagaaagaaaaaactttttagcagttcagaaatctgtacgaactattcaggctgcttttagaggcatgaaagttagacaaaaattgaaaaatgtatcagaggaaaagatggcagccattgttaaccaatctgcactctgctgttacagaagtaaaactcagtatgaagctgttcaaagtgaaggtgttatgattcaagagtggtataaagcttctggccttgcttgttcacaggaagcagagtatcattctcaaagtagggctgcagtaacaattcaaaaagctttttgtagaatggtcacaagaaaactggaaacacagaaatgtgctgccctacggattcagttcttccttcagatggctgtgtatcggagaagatttgttcagcagaaaagagctgctatcactttacagcattattttaggacgtggcaaaccagaaaacagtttttactatatagaaaagcagcagtggttttacaaaatcactacagagcatttctgtctgcaaaacatcaaagacaagtctatttacagatcagaagcagtgttatcattattcaagctagaagtaaaggatttatacagaaacggaagtttcaggaaattaaaaatagcaccataaaaattcaggctatgtggaggagatatagagccaagaaatatttatgtaaagtgaaagctgcctgcaagattcaagcctggtatagatgttggagagcacacaaagaatatctagctatattaaaagctgttaaaattattcaaggttgcttctataccaaactagagagaacacggtttttgaatgtgagagcatcagcaattatcattcagagaaaatggagagctatacttcctgcaaagatagctcatgaacacttcttaatgataaaaagacatcgagctgcttgtttgatccaagcacattatagaggatataaaggaaggcaggtctttcttcggcagaaatctgctgctttgatcatacaaaaatatatacgagccagggaggctggaaagcatgaaaggataaaatatattgaatttaaaaaatctacagttatcctacaagcactggtgcgtggttggctagtacgaaaaagatttttagaacagagagccaaaattcgacttcttcacttcactgcagctgcatattatcacctgaatgctgttagaattcaaagagcctataaactttacctggctgtgaagaatgctaacaagcaggttaattcagtcatctgtattcagagatggtttcgagcaagattacaagaaaagagatttattcagaaatatcatagcatcaaaaagattgagcatgaaggtcaagaatgtctgagccagcgaaatagggctgcatcagtaatacagaaagcagtgcgccattttctcctccgtaaaaagcaggaaaaattcactagtggaatcattaaaattcaggcattatggagaggctattcttggaggaagaaaaatgattgtacaaaaattaaagctatacgactaagtcttcaagttgttaatagggagattcgagaagaaaacaaactctacaaaagaactgcacttgcacttcattaccttttgacatataagcacctttctgccattcttgaggccttaaaacacctagaggtagttactagattgtctccactttgttgtgagaacatggcccagagtggagcaatttctaaaatatttgttttgatccgaagttgtaatcgcagtattccttgtatggaagtcatcagatatgctgtgcaagtcttgcttaatgtatctaagtatgagaaaactacttcagcagtttatgatgtagaaaattgtatagatatactattggagcttttgcagatataccgagaaaagcctggtaataaagttgcagacaaaggcggaagcatttttacaaaaacttgttgtttgttggctattttactgaagacaacaaatagagcctctgatgtacgaagtaggtccaaagttgttgaccgtatttacagtctctacaaacttacagctcataaacataaaatgaatactgaaagaatactttacaagcaaaagaagaattcttctataagcattccttttatcccagaaacacctgtaaggaccagaatagtttcaagacttaagccagattgggttttgagaagagataacatggaagaaatcacaaatcccctgcaagctattcaaatggtgatggatacgcttggcattccttattag

SEQ ID NO: 12461 - DNA, 3524 bp, Homo sapiens
gtcatctgtggaggagaaaagtcacatccagctccttcatgttgctgccgatgtgggattttcctggcttcgtcagccaagcaattggctgcctttgccggaggctttgagaaccaaggcttgaaggccggcaggagcatccagggggaagcttggcttcagggaggacctagcagacgttgggccggagcactagcctcacggagaaggatctgaaagaagccaaggcgcggagccagcagattgcagcccagctgaccacccctcccagctccaattcccgtggcgtccagctcttcaacaggcgccggcagagggtgaacgagttcaccttggagagccacggccagaggggacagaagcccagccaggagtccctcagagtgctcccttcaagcctcccaggccatgcaccggggctcagcctgagttccacctcgctgccggagccaggccctccacggcaccccagtccccagagccccgacagaggggtccctggccacagcatggaggggtactcagaggaggctagcttgctgcggcacctggagaaggtggccagtgaggaggaagaggtaccactggtggtttatctaaaggagaatgcagcactgctgacagccaatgggctgcacctgtcccaaaaccgagaggcccagcagtcctcaccggccccacctccagctgaggtccacagcccagctgcagatgtcaaccaaaaccttgcctcgcccagtgccacgctcaccacaccaacttctaacagcagccacaatccgccagccaccgatgtcaatcagaacccaccggcaactgttgtcccacagagcctgccactttctagcatccaacagaattcctcagaggcccaactcccatctaatggcacagggcctgcttccaaacccagcaccctgtgtgctgatgggcaaccccaggcaccggctgaggaggtgagatgcagcacactcctaattgacaaggtatcaactccagctaccaccaccagcaccttctccagagaagctacgctcatccccagctccaggcccccagcctcagatttcatgtccagctccctgctcattgacatccagcccaacaccctagtggtgtcagcagatcaagagatgtctgggcgagcagctgccaccacgcccaccaaggtctacagtgaggtccacttcacactggccaagcccccatcagtggtcaacaggacggccaggccttttgggatccaggcgccagggggcaccagccagatggagaggagccccatgctagagagacgacattttggggagaaggccccggctccccagccccccagtttgccagacaggagcccccggccacagagacacataatgtcccgcagccccatggtggaaaggaggatgatggggcagcgaagcccggcctcagagagacgccccttggggaacttcactgcaccccccacctacactgagaccttgtccacagcccctctggcttcctgggtgaggtctcctccctcatattctgtcctgtatcccagctccgaccccaagtcttctcatctgaagggccaggcggttcctgccagcaagacgggcattctggaggagtcgatggcccgccggggcagccgcaaatccatgtttactttcgtggagaagcccaaggtgaccccgaatccagacttgctggatctggtacagacagcggatgagaagcggcggcagagggaccagggggaggtaggcgtggaggaggagcccttcgcactgggggccgaggcctccaacttccagcaggagccagcacctcgtgacagggccagccccgcggcggcggaggaggtggtaccagagtgggcctcctgcctcaagtcaccccgcatccaggccaagccgaagcccaaacccaaccagaacctctccgaggcctctgggaagggagctgagctctacgcccgccgccagtcacggatggagaaatatgtcatcgagtcttcaagccacacgccagagctggcccgctgcccatcacctaccatgtccctgccttcctcctggaaataccccactaacgcccccggggccttccgagtggcatcccgaagcccagcccggaccccgcctgcctccctctaccatggctacctgcctgagaacggggtcctgcgcccagagcccaccaagcagccgccataccagctgcgcccctcgctctttgtcctctcacctatcaaggagcctgccaaggtctcaccaagagctgcctcgcccgccaagcccagctccttggacctggtgcccaacctgcccaagggggctctccctccatctcctgccctgcctcggccctcgcgctcctcaccgggcctctacacctcccccggccaggacagcctgcagcccactgccgtgagccctccttacggcggtgacatctcccccgtgtctccctccagggcgtggtctccccgagccaagcaggcccccaggccctccttctctacccggaacgccgggatcgaggctcaggaccgccgggagagcctgcccacctccccaccctggacgccgggcgcgtcccggccccccagcagcctagacggctgggtgagcccgggcccgtgggagccaggtcgcgggagcagcatgagcagccccccgccgctgccgccgccaccgcccatgtctccctcgtggagcgagcgctcggtgtccccgctgcgacctgagaccgaggcgcggccccccagccgccagctgcaggcgcttctggcgcgaaacatcatcaatgcggcccggcgcaagagcgcctccccgcggtcggcgggcgccgagaacccgcggcccttctccccgccgagggcgccaccgcccccgcccccgcccccgcccccgcccccgcgcatgcgctcgccacagcccgcccgccccggctcggctgctgtgccgggggcagccttcgcgcccatcccgcggagcccgttgcccgccggtccttcgtcctgcaccagtccccggagcccgctgcccgcgcctcccaggcccttcctctaccgccgctcgcccacggactccgacgtgtccctcgactccgaggactccggggctaagtctccaggcatcctgggctacaatatctgtccccgcgggtggaatggcagccttcggctcaagcgtggcagcctccccgccgaggcctcctgcaccacctagagccccacccccgaccccaccccgggagggcagagccagaagaaggctcattagacctgggggacccaaagggtctggcctctttgggcagccccagagatgaggggtcagcagaggagagctctggggttggggatgggttagggacgcaagcttgagttctagcccttgctctcattcagctgttgtgtgaccctgggtaagacccttccttgtttgaccctcagctttcccatctgtttaatggtggctttggccaaggcaatccacaaacgtcaaaattccccttcccatcagtacaca

SEQ ID NO: 12462 - DNA, 3439 bp, Homo sapiens
ccacgcgtccggccaaggagacctggtggcagggttgatctcatatttcttgtgcctcaaaatcccttctctgaagtctgccttccctggagaagcaagatggcagaatcggattctactgactttgacctgctgtggtatctagagaatctcagtgacaaggaatttcagagttttaagaagtatctggcacgcaagattcttgatttcaaactgccacagtttccactgatacagatgacaaaagaagaactggctaacgtgttgccaatctcttatgagggacagtatatatggaatatgctcttcagcatattttcaatgatgcgtaaggaagatctttgtaggaagatcattggcagacgaaaccgcaatcaggaggcatgcaaagctgtcatgaggagaaaattcatgctgcaatgggaaagtcacacttttggaaaatttcattataaattttttcgtgacgtttcgtcagatgtgttctacatacttcaattagcctatgattctaccagctattattcagcaaacaatctcaatgtgttcctgatgggagagagagcatctggaaaaactattgttataaatctggctgtgttgaggtggatcaagggtgagatgtggcagaacatgatctcgtacgtcgttcacctcacttctcacgaaataaaccagatgaccaacagcagcttggctgagctaatcgccaaggactggcctgacggccaggctcccattgcagacatcctgtctgatcccaagaaactccttttcatcctcgaggacttggacaacataagattcgagttaaatgtcaatgaaagtgctttgtgtagtaacagcacccagaaagttcccattccagttctcctggtcagtttgctgaagagaaaaatggctccaggctgctggttcctcatctcctcaaggcccacacgtgggaataatgtaaaaacgttcttgaaagaggtagattgctgcacgaccttgcagctgtcgaatgggaagagggagatatattttaactctttctttaaagaccgccagagggcgtcggcagccctccagcttgtacatgaggatgaaatactcgtgggtctgtgccgagtcgccatcttatgctggatcacgtgtactgtcctgaagcggcagatggacaaggggcgtgacttccagctctgctgccaaacacccactgatctacatgcccactttcttgctgatgcgttgacatcagaggctggacttactgccaatcagtatcacctaggtctcctaaaacgtctgtgtttgctggctgcaggaggactgtttctgagcaccctgaatttcagtggtgaagacctcagatgtgttgggtttactgaggctgatgtctctgtgttgcaggccgcgaatattcttttgccgagcaacactcataaagaccgttacaagttcatacacttgaacgtccaggagttttgtacagccattgcatttctgatggcagtacccaactatctgatcccctcaggcagcagagagtataaagagaagagagaacaatactctgactttaatcaagtgtttactttcatttttggtcttctaaatgcaaacaggagaaagattcttgagacatcctttggataccagctaccgatggtagacagcttcaagtggtactcggtgggatacatgaaacatttggaccgtgacccggaaaagttgacgcaccatatgcctttgttttactgtctctatgagaatcgggaagaagaatttgtgaagacgattgtggatgctctcatggaggttacagtttaccttcaatcagacaaggatatgatggtctcattatactgtctggattactgctgtcacctgaggacacttaagttgagcgttcagcgcatctttcaaaacaaagagccacttataaggccaactgctagtcaaatgaagagccttgtctactggagagagatctgctctcttttttatacaatggagagcctccgggagctgcatatctttgacaatgaccttaatggtatttcagaaaggattctgtctaaagccctggagcattctagctgtaaacttcgcacactcaagttgtcctatgtctcgactgcttctggttttgaagacttactcaaggctttggctcgtaatcggagcctgacatacctgagtatcaactgtacgtccatttccctaaatatgttttcacttctgcatgacatcctgcacgagcccacatgccaaataagtcatctgagcttgatgaaatgtgatttgcgagccagcgaatgcgaagaaatcgcctctctcctcatcagtggcgggagtctgagaaaactgaccttatccagcaatccgctgaggagcgacgggatgaacatactgtgtgatgccttgcttcatcccaactgcactcttatatcactggtgttagtcttctgctgtctcactgaaaattgctgcagcgcccttggaagagtgcttctgttcagcccaactctaagacaactagacctgtgtgtgaatcgcttaaaaaattacggagtgttgcatgtgacgtttcccttgctgtttccaacctgtcagttagaggagcttcatctgtctggctgtttctttagcagcgatatctgtcaatatattgccatagttattgctactaatgaaaaactgaggagcctggagattgggagcaacaaaatagaagatgcaggaatgcagctgctatgtggtggtttgagacatcccaactgcatgttggtgaatattgggctagaagagtgcatgttaaccagtgcctgctgtcgatctcttgcctctgttcttaccaccaacaaaacactagaaagactcaacttgcttcaaaatcacttgggcaatgatggagttgcaaaacttcttgagagcttgatcagcccagattgtgtacttaaggtagttgggcttccattaactggcctgaacacacaaacccagcagttgctgatgactgtaaaggaaagaaaacccagtttgatctttctgtctgaaacttggtctttaaaggaaggcagagaaattggtgtgacacctgcttctcagccaggttcaataatacctaattctaatttggattacatgtttttcaaatttcccagaatgtctgcagccatgagaacgtcaaatacagcatctaggcaacccctttgatcatgttgtacgtaaacagtatttattataaattactaccgtgactgggatgcaagagaattaggactataattttcctatttgatgtgtgtgtgtgtgtgtgtgtgtgtgtgtgtgtgtgtgtgtgtgtgtgaccttgatccagtcaaccacttcaaattcctacactgtctcaagagtattaaaaggattatatgaagtaataaaggataaaatgcattggaaaaaaaaaaaaaaa

SEQ ID NO: 12463 - DNA, 5900 bp, Homo sapiens
agtcgaccgtggaccgcgctgcgagcctcggagacgccgtagaaggagacctgcttccgggactggaccaggcgcctgcgactcttctcagacgccgacgtgcacgagtgactactattaattctatttaaaatgggtgtaaagaagaagaaagaaatgcaagttgctgcgctgaccatttgccatcaggaccttgaaactttgaaatcttttgctgatgtggaagggaaaaatctagcttctttgctgttacattgtgtgcaactcacggatggagtgtcacaaatccattatattaaacagattgtgcctctgctggagaaagcagataaaaatggcatgtgtgatcccactattcaaagttgtttggatatcttagcaggcatttatctttctttgagtctaaagaatcccttgaagaaagtattggcaagctcactaaatagcctgcctgatttttttctacctgaggctatgcaccgttttacttctcgtcttcaggaagaattgaatactactgacttatactcttacaggaaagttactgacaatatttcttcctgtatggagaactttaacttgggtagagcaagtgttaataatctgcttaaaaatgtgcttcattttctgcagaagagtttaattgaaatcctggaagaaaatagaaaatgtgctggaaatcatattattcaaacacagttgatgaatgacttactggtaggcattagagtttcaatgatgttagtacagaaagtacaagatttccagggaaatctttggaagacttccgattctcccatatggcaaaatatgtgtggattgctgagtatttttaccaaggttttaagcgatgatgatctgttacagactgtacagagcacatctggattagctattattctttttattaagactatgtttcacccgtctgaaaagattcctcatttgtgtgctgcttcgttcagtggactgcaccagtgtccccgagtggtttatgagcagctgcaggagcctctgttgtggtgacatctctcagtcagctgtcttattcctctgtcaggggacacttgccatgttggactggcagaacggaagcatgggtcggagtggggaggccctgctcttggatactgcacatgttttgttcaccttgagttcacagattaaagagccaacgctggaaatgtttctgtctagaatcttagcatcctggactaattcagccatacaagtccttgaatcaagttccccgagcctaacggacagcctgaatgggaattcaagtatagttgggagacttttggaatatgtctatacccattgggaacatccattggatgctctgagacaccaaaccaaaatcatgttcaaaaaccttctccaaatgcaccggctcactgtggaaggtgcagatttcgtccctgatcctttctttgtggaattgactgagagtcttttacgattggaatggcatattaaaggaaagtacacgtgccttggttgtttggtagagtgcataggagttgaacatattttggctatagataaaactattccatctcaaatcttagaggtgatgggagaccagtcattggtaccttatgcaagtgacctcttggaaaccatgtttagaaatcataagagtcatttgaaatcccagactgctgagagttcttggattgaccagtggcatgagacttgggtttctcctctcctttttatattgtgtgaaggaaacttggatcaaaaatcttacgtgattgattattacttgccaaaattattaagttacagccctgaaagcttacagtacatggtaaagattcttcagacttctattgatgctaaaactggacaagagcaatctttcccatccttagggtcttgtaatagcaggggggctctgggagctttgatggcatgtctgcgaatagctagagctcatggacatcttcagtctgcaactgatacctgggagaacctcgtgtctgatgcaagaataaagcaaggcttaattcatcagcattgccaagtaaggatagatacattaggcttgctttgtgaaagtaatcggagcacagaaattgtttccatggaagaaatgcagtggattcagttctttattacatacaatcttaacagccagtctccaggagtgcggcaacagatctgttctcttcttaaaaagttgttttgtaggatacaggaaagttctcaggtactttataaattggagcagagtaaatccaaacgtgaaccagagaatgagttaaccaaacagcacccttctgtttctttacagcagtataagaatttcatgtcatccatttgtaacagtctttttgaagcattgtttcctggatcttcctactcgactagattttcagctttaaccattttaggttcaatagctgaagtttttcatgtcccagaaggcagaatttatacagtatatcagctgagtcatgatattgatgttggtcgtttccaaacactaatggaatgttttaccagcacttttgaagacgtgaaaattttagcatttgatcttctgatgaagttatcaaaaacagctgtacattttcaggattcggggaaactgcaaggcttatttcaggcagcattggagctcagcacaagcaccaaaccatacgactgtgtgacagcttcctacctgctgaacttcttaatctggcaggatgctctaccgtcatccttgtctgcctacttaactcagcaagttgcatgtgataatggagataggcctgctgctgtggtggaaaggaacacattaatggttatcaaatgcttgatggaaaatcttgaggaagaagtatctcaggctgaaaattctctgcttcaggcagcagcagcatttccaatgtatgggcgagtccactgtataacaggagctttgcagaagttatctctaaacagcctgcagttggtgagcgagtggagacctgtggtagagaagctccttttgatgtcctacaggctttccactgtggtgtctccagtcattcagagctcatcccctgaaggcctcatcccaatggacactgattcagagtcagcaagccgcttacagatgattctgaatgagattcagcctcgagatactaatgattattttaaccaagccaaaatattgaaagaacatgatagctttgatatgaaggacttgaatgctagtgtggtgaatattgatacttctacagaaatcaaaggtaaagaagtaaaaacatgtgatgtaactgcgcagatggtgctggtatgttgttggagaagtatgaaggaagttgctttacttttaggcatgttgtgccagcttctgcccatgcagcctgtgccagaatcttctgatggattattgacggtggagcaggtaaaagaaataggagattactttaaacaacaccttttgcagtccaggcacagaggagcatttgaattggcttatactggttttgtgaaactcactgaagtactaaacaggtgcccaaatgtgagtctgcaaaagctgccagaacagtggctatggagtgttttagaggaaattaaatgcagtgatccttcatctaaactctgtgctacaaggcgcagtgctggaattcctttctacatacaggcactgttggcatctgaaccaaagaaaggcagaatggatttgttgaaaataacaatgaaagagttaatctctttggctgggcctacagatgacatacagagtacagtcccccaggttcatgctttaaatatccttagagcattgttcagagatacgcgcctgggagaaaatattattccttatgttgctgatggagctaaggctgcaattctgggttttacatcaccggtctgggcatgatatgggagaaccaaatcgtcatccaagcatgtttctcttacttttggtgttggagagactctacgcttccccgatggatggtacttcttctgctctcagcatgggaccttttgttcccttcattatgaggtgtggtcactcacctgtctaccactcccgtgaaatggcagctcgtgccttggtcccatttgttatgatagatcacattcctaataccattcgaactctgttgtccacactccccagctgcactgaccagtgtttccggcaaaaccacattcatgggacacttctccaggtttttcatttgttgcaagcctactcagactccaaacacggaacgaattcagacttccagcacgagctgactgacatcactgtttgtaccaaagccaaactctggctggccaagaggcaaaatccatgtttggtgaccagagctgtatatattgatattctcttcctattgacttgctgcctcaacagatctgcaaaggacaaccagccagttctggagagtcttggcttctgggaggaagtcagagggattatctcaggatcagagctgataacgggattcccttgggccttcaaggtgccaggcctgccccagtacctccagagcctcaccagactagccattgctgcagtgtgggccgcggcagccaagagtggagagcgggagacgaatgtccccatctctttctctcagctgttagaatctgccttccctgaagtgcgctcactaacactggaagccctcttggaaaagttcttagcagcagcctctggacttggagagaagggcgtgccacccttgctgtgcaacatgggagagaagttcttattgttggccatgaaggaaaatcacccagaatgcttctgcaagatactgaaaattctccactgcatggaccctggtgagtggcttccccagacggagcactgtgtccatctgaccccaaaggagttcttgatctggacgatggatattgcttccaatgaaagatctgaaattcagagtgtagctctgagacttgcttccaaagtcatttcccaccacatgcagacatgtgtggagaacagggaattgatagctgctgagctgaagcagtgggttcagctggtcatcttgtcatgtgaagaccatcttcctacagagtctaggctggccgtcgttgaagtcctcaccagtactacaccacttttcctcaccaacccccatcctattcttgagttgcaggatacacttgctctctggaagtgtgtccttacccttctgcagagtgaggagcaagctgttagagatgcagccacggaaaccgtgacaactgccatgtcacaagaaaatacctgccagtcaacagagtttgccttctgccaggtggatgcctccatcgctctggccctggccctggccgtcctgtgtgatctgctccagcagtgggaccagttggcccctggactgcccatcctgctgggatggctgttgggagagagtgatgacctcgtggcctgtgtggagagcatgcatcaggtggaagaagactacctgtttgaaaaagcagaagtcaacttttgggccgagaccctgatctttgtgaaatacctctgcaagcacctcttctgtctcctctcaaagtccggctggcgtcccccaagccctgagatgctctgtcaccttcaaaggatggtgtcagagcagtgccacctcctgtctcagttcttcagagagcttccaccagctgctgagtttgtgaagacagtggagttcacaagactacgcattcaagaggaaaggactttggcttgcttgaggctgctggcctttttggaaggaaaggaaggggaagacaccctagttctcagtgtttgggactcttatgcagaatcgaggcagttaactcttccaagaacagaagcggcatgttgaagaaaatctgggggattgggatgggggtatgtgtggatttttcctccactaaatctgcaggaaacatgttgaacataaattcaaaaattttatccc

SEQ ID NO: 12464 - DNA, 6090 bp, Homo sapiens
agtcgaccgtggaccgcgctgcgagcctcggagacgccgtagaaggagacctgcttccgggactggaccaggcgcctgcgactcttctcagacgccgacgtgcacgagtgactactattaattctatttaaaatgggtgtaaagaagaagaaagaaatgcaagttgctgcgctgaccatttgccatcaggaccttgaaactttgaaatcttttgctgatgtggaagggaaaaatctagcttctttgctgttacattgtgtgcaactcacggatggagtgtcacaaatccattatattaaacagattgtgcctctgctggagaaagcagataaaaatggcatgtgtgatcccactattcaaagttgtttggatatcttagcaggcatttatctttctttgagtctaaagaatcccttgaagaaagtattggcaagctcactaaatagcctgcctgatttttttctacctgaggctatgcaccgttttacttctcgtcttcaggaagaattgaatactactgacttatactcttacaggaaagttactgacaatatttcttcctgtatggagaactttaacttgggtagagcaagtgttaataatctgcttaaaaatgtgcttcattttctgcagaagagtttaattgaaatcctggaagaaaatagaaaatgtgctggaaatcatattattcaaacacagttgatgaatgacttactggtaggcattagagtttcaatgatgttagtacagaaagtacaagatttccagggaaatctttggaagacttccgattctcccatatggcaaaatatgtgtggattgctgagtatttttaccaaggttttaagcgatgatgatctgttacagactgtacagagcacatctggattagctattattctttttattaagactatgtttcacccgtctgaaaagattcctcatttgattagcagtgtgctgcttcgttcagtggactgcaccagtgtccccgagtggtttatgagcagctgcaggagcctctgttgtggtgacatctctcagtcagctgtcttattcctctgtcaggggacacttgccatgttggactggcagaacggaagcatgggtcggagtggggaggccctgctcttggatactgcacatgttttgttcaccttgagttcacagattaaagagccaacgctggaaatgtttctgtctagaatcttagcatcctggactaattcagccatacaagtccttgaatcaagttccccgagcctaacggacagcctgaatgggaattcaagtatagttgggagacttttggaatatgtctatacccattgggaacatccattggatgctctgagacaccaaaccaaaatcatgttcaaaaaccttctccaaatgcaccggctcactgtggaaggtgcagatttcgtccctgatcctttctttgtggaattgactgagagtcttttacgattggaatggcatattaaaggaaagtacacgtgccttggttgtttggtagagtgcataggagttgaacatattttggctatagataaaactattccatctcaaatcttagaggtgatgggagaccagtcattggtaccttatgcaagtgacctcttggaaaccatgtttagaaatcataagagtcatttgaaatcccagactgctgagagttcttggattgaccagtggcatgagacttgggtttctcctctcctttttatattgtgtgaaggaaacttggatcaaaaatcttacgtgattgattattacttgccaaaattattaagttacagccctgaaagcttacagtacatggtaaagattcttcagacttctattgatgctaaaactggacaagagcaatctttcccatccttagggtcttgtaatagcaggggggctctgggagctttgatggcatgtctgcgaatagctagagctcatggacatcttcagtctgcaactgatacctgggagaacctcgtgtctgatgcaagaataaagcaaggcttaattcatcagcattgccaagtaaggatagatacattaggcttgctttgtgaaagtaatcggagcacagaaattgtttccatggaagaaatgcagtggattcagttctttattacatacaatcttaacagccagtctccaggagtgcggcaacagatctgttctcttcttaaaaagttgttttgtaggatacaggaaagttctcaggtactttataaattggagcagagtaaatccaaacgtgaaccagagaatgagttaaccaaacagcacccttctgtttctttacagcagtataagaatttcatgtcatccatttgtaacagtctttttgaagcattgtttcctggatcttcctactcgactagattttcagctttaaccattttaggttcaatagctgaagtttttcatgtcccagaaggcagaatttatacagtatatcagctgagtcatgatattgatgttggtcgtttccaaacactaatggaatgttttaccagcacttttgaagacgtgaaaattttagcatttgatcttctgatgaagttatcaaaaacagctgtacattttcaggattcggggaaactgcaaggcttatttcaggcagcattggagctcagcacaagcaccaaaccatacgactgtgtgacagcttcctacctgctgaacttcttaatctggcaggatgctctaccgtcatccttgtctgcctacttaactcagcaagttgcatgtgataatggagataggcctgctgctgtggtggaaaggaacacattaatggttatcaaatgcttgatggaaaatcttgaggaagaagtatctcaggctgaaaattctctgcttcaggcagcagcagcatttccaatgtatgggcgagtccactgtataacaggagctttgcagaagttatctctaaacagcctgcagttggtgagcgagtggagacctgtggtagagaagctccttttgatgtcctacaggctttccactgtggtgtctccagtcattcagagctcatcccctgaaggcctcatcccaatggacactgattcagagtcagcaagccgcttacagatgattctgaatgagattcagcctcgagatactaatgattattttaaccaagccaaaatattgaaagaacatgatagctttgatatgaaggacttgaatgctagtgtggtgaatattgatacttctacagaaatcaaaggtaaagaagtaaaaacatgtgatgtaactgcgcagatggtgctggtatgttgttggagaagtatgaaggaagttgctttacttttaggcatgttgtgccagcttctgcccatgcagcctgtgccagaatcttctgatggattattgacggtggagcaggtaaaagaaataggagattactttaaacaacaccttttgcagtccaggcacagaggagcatttgaattggcttatactggttttgtgaaactcactgaagtactaaacaggtgcccaaatgtgagtctgcaaaagctgccagaacagtggctatggagtgttttagaggaaattaaatgcagtgatccttcatctaaactctgtgctacaaggcgcagtgctggaattcctttctacatacaggcactgttggcatctgaaccaaagaaaggcagaatggatttgttgaaaataacaatgaaagagttaatctctttggctgggcctacagatgacatacagagtacagtcccccaggttcatgctttaaatatccttagagcattgttcagagatacgcgcctgggagaaaatattattccttatgttgctgatggagctaaggctgcaattctgggttttacatcaccggtctgggcagtgcgaaattcatccacacttctctttagtgccttgatcacaagaatttttggagttaaaagggcaaaggatgaacattccaaaacaaatagaatgacagggagagagtttttctctcgtttcccagaactctatccttttcttctcaaacagttggaaactgtagccaatacagtagacagtgatatgggagaaccaaatcgtcatccaagcatgtttctcttacttttggtgttggagagactctacgcttccccgatggatggtacttcttctgctctcagcatgggaccttttgttcccttcattatgaggtgtggtcactcacctgtctaccactcccgtgaaatggcagctcgtgccttggtcccatttgttatgatagatcacattcctaataccattcgaactctgttgtccacactccccagctgcactgaccagtgtttccggcaaaaccacattcatgggacacttctccaggtttttcatttgttgcaagcctactcagactccaaacacggaacgaattcagacttccagcacgagctgactgacatcactgtttgtaccaaagccaaactctggctggccaagaggcaaaatccatgtttggtgaccagagctgtatatattgatattctcttcctattgacttgctgcctcaacagatctgcaaaggacaaccagccagttctggagagtcttggcttctgggaggaagtcagagggattatctcaggatcagagctgataacgggattcccttgggccttcaaggtgccaggcctgccccagtacctccagagcctcaccagactagccattgctgcagtgtgggccgcggcagccaagagtggagagcgggagacgaatgtccccatctctttctctcagctgttagaatctgccttccctgaagtgcgctcactaacactggaagccctcttggaaaagttcttagcagcagcctctggacttggagagaagggcgtgccacccttgctgtgcaacatgggagagaagttcttattgttggccatgaaggaaaatcacccagaatgcttctgcaagatactgaaaattctccactgcatggaccctggtgagtggcttccccagacggagcactgtgtccatctgaccccaaaggagttcttgatctggacgatggatattgcttccaatgaaagatctgaaattcagagtgtagctctgagacttgcttccaaagtcatttcccaccacatgcagacatgtgtggagaacagggaattgatagctgctgagctgaagcagtgggttcagctggtcatcttgtcatgtgaagaccatcttcctacagagtctaggctggccgtcgttgaagtcctcaccagtactacaccacttttcctcaccaacccccatcctattcttgagttgcaggatacacttgctctctggaagtgtgtccttacccttctgcagagtgaggagcaagctgttagagatgcagccacggaaaccgtgacaactgccatgtcacaagaaaatacctgccagtcaacagagtttgccttctgccaggtggatgcctccatcgctctggccctggccctggccgtcctgtgtgatctgctccagcagtgggaccagttggcccctggactgcccatcctgctgggatggctgttgggagagagtgatgacctcgtggcctgtgtggagagcatgcatcaggtggaagaagactacctgtttgaaaaagcagaagtcaacttttgggccgagaccctgatctttgtgaaatacctctgcaagcacctcttctgtctcctctcaaagtccggctggcgtcccccaagccctgagatgctctgtcaccttcaaaggatggtgtcagagcagtgccacctcctgtctcagttcttcagagagcttccaccagctgctgagtttgtgaagacagtggagttcacaagactacgcattcaagaggaaaggactttggcttgcttgaggctgctggcctttttggaaggaaaggaaggggaagacaccctagttctcagtgtttgggactcttatgcagaatcgaggcagttaactcttccaagaacagaagcggcatgttgaagaaaatctgggggattgggatgggggtatgtgtggatttttcctccactaaatctgcaggaaacatgttgaacataaattcaaaaattttatccc

SEQ ID NO: 12465 - DNA, 2135 bp, Homo sapiens
cggacgcgtgggcagcaggagtcggggggccgccgaagatggggaacactacctcgtgctgcgtgtcgtccagtcccaagctccggaggaatgcccactcccggctggagtcctaccggccagacacggacctgagccgcgaggacacgggctgcaacctgcagcacatcagcgaccgggagaacatagacgatttgaacatggaattcaatccttcagatcatcctcgggccagcacaatattcctcagtaaatctcagacagacgtgagagaaaaacgcaagagtctcttcattaaccatcatcctccaggacaaatagcaaggaaatacagttcctgctccaccattttcctagatgatagcacagtcagtcaaccaaacctcaagtatacaattaaatgtgtcgctcttgcaatatattatcacatcaaaaacagggacccagatggaaggatgctcttagatatttttgatgaaaatcttcaccctctttcgaaatccgaagtgccaccagattatgacaaacacaacccagagcagaagcagatttaccggttcgttcggacactgttcagtgctgctcagctgacggctgaatgtgccatcgtcaccctggtgtaccttgaaagacttttaacatacgcagagatagatatctgtccggccaactggaagcggattgttttaggggcgatcctgctggcctccaaggtgtgggatgaccaggctgtatggaatgtggattactgccagatcctgaaagacatcacggtggaggacatgaacgagctagagcgacagtttcttgaattgctgcagttcaacatcaatgttccttccagtgtctatgccaagtattattttgatcttcgttctctggcagaagcgaacaacctgagctttcccttggagcccctgagcagggagagggctcacaagcttgaggccatctctcgcctctgcgaggacaagtacaaggacctaagaagatccgcgaggaagcgctcagccagtgcagacaacctgactctgccccggtggtccccagccatcatctcttaactacggaggcccgccggaggccacaccatcccttagtttctcctttagtttgagaaaagacagacttggggtgggtttgtttttgttttttctttccttttcttttttacgcatagctccgtcaagctgcctggatgagcgcccatgcagcaaggcttggaggaagcgtcagtgccctggagatcccagctcgctctccccactgtcagcaacagcacttccttcgtggaggaagtggactcgaatcctggaggaggaaataaagggaaagggaagtcgtggagaggcagggaaaatggttaagcagcccggccctctggagtccccatgggggcggtagctgaagttggcgagcgcagcggtggatgcagagctggctgcacccagggctgggccagtgtgtcctgtaagacttcttgcattccttctgctgcttttttgggatgggggtatttttgttcatttgtttttgccctgttttgattttggtcccacagagcaggggatgtagtttgtacccaccatggcgcagacttccaaataaatagtactggtcatttctctccgcactatttctgcgcgctgtcttctgagctttcttcctcaccagtgggctgtgcttgttccatttctgtacacccttattttataccgtttttcttcaacaatggcgaaattgactgtagtgctgaaccaaaagtatccctttccctccttattcctcaccccaagaacattctagatcacatgggtgcttgtgccttccgattttcttgcatttgtttttttcctgacctgaagttgttgttacaaaatcagtcagactttgtgggctgaaggacacggtgcagcagagggtgtccctgtgagagttctgcagagtgctgggcatgtgcctggaactaccgagtaggagccatttctttgtacccctgcctaatccattcctctccttccaagtccattgttgcaagcaatattcttctcaatttttatatgtttactttaaatcaaagttagtctatttgtataaaatttttaaaaaatctaaaagaaaaaaaaaaaaaaaaa

SEQ ID NO: 12466 - DNA, 1754 bp, Homo sapiens
aggagagatgtgagcctcgtaccaggaagatcatactgaggccaccaggttgagagccgcctggctggggggcttgtccggggacagcaggggcagaggcatggaggttcacagccaggaaatcgtgcagtgaacctgtcccctccggtcacaacatcaagagctgaactgggactagaagtcatcgccccagagctttttgctaccagaactgccgggtgaaaatctttggaagagaagtttgagaacctgttaaacaagctctctaggtaattctgtgcacgttcagtctgagaactgctgcatctgaagagatttgaacatggaattcaatccttcagatcatcctcgggccagcacaatattcctcagtaaatctcagacggacgtgagagaaaaacgcaagagtctcttcattaaccatcatcctccaggacaaatagcaaggaaatacagttcctgctccaccattttcctagatgatagcacagtcagtcaaccaaacctcaagtatacaattaaatgtgtcgctcttgcaatatattatcacatcaaaaacagggacccagatggaaggatgctcttagatatttttgatgaaaatcttcaccctctttcgaaatccgaagtgccaccagattatgacaaacacaacccagagcagaagcagatttaccggttcgttcggacactgttcagtgctgctcagctgacggctgaatgtgccgtcgtcaccctggtgtaccttgaaagacttttaacatacgcagagatagatatctgtccggccaactggaagcggattgttttaggggcgatcctgctggcctccaaggtgtgggatgaccaggctgtatggaatgtggattactgccagatcctgaaagacatcacggtggaggacatgagcgagctagagcgacagtttcttgaattgctgcagttcaacatcaatgttccttccagtgtctatgccaagtattattttgatcttcgttctctggcagaagcgaacaacctgagctttcccttggagcccctgagcagggagagggctcacaagcttgaggccatctctcgcctctgcgaggacaagtacaaggacctaagaagatccgcgaggaagcgctcagccagtgcagacaacctgactctgccccggtggtccccagccatcatctcttaactacggaggcccgccggaggccacaccatcccttagtttctcctttagtttgagaaaagacagacttggggtgggtttgtttttgttttttctttccttttctttttttacgcatagctccgtcaagctgcctggatgagcgcccatgcagcaaggcttggaggaagcgtcagtgccctggagatcccagctcgctctccccactgtcagcaacagcacttccttcgtggaggaagtggactcgaatcctggaggaggaaataaagggaaagggaagtcgtggagaggcagggaaaatggttaagcagcccggccctctggagtccccatgggggcggtagctgaagttggcgagcgcagcggtggatgcagagctggctgcacccagggctgggccagtgtgtcctgtaagacttcttgcattccttctgctgcttttttgggatgggggtatttttgttcatttgtttttgccctgttttgattttggtcccacagagcaggggatgtagtttgtacccaccatggcgcagacttccaaataaatagtactggtcatttctctctg

SEQ ID NO: 12467 - DNA, 4816 bp, Homo sapiens
atcatagcaaccaaacaatgaattgagacctggaggtcttgggttgtaatttaaattcacataaaccaggccttttgtgcctattgcctaattcatggcataattattattagccgccttaggataaaaggaatacagactttatcccatacatgaaattatcagactttcactcattttaatagctagaatcttattttctttccttaagatgtatattttcttttaatgaccaggctctatgtgctgctgtagtgaaaccggatgttctagaaacaatggctttgctgttcagtggagcagatgtcatgtgtgccaccggagaccccgtgcatagcaccccctatctgctagccaagaaagctgggcaaagtctgcaaatggaatttctctaccataacaaattctcagatttccctcaacatgatattcattccgagggtgtattaagtcaagagtcttcccagtccacattcctctgtgactttttatatcaagctccttctgctgcttctaaactctcttcagagaaaaaactgcttgaagagacaaataaaaaatggtgtgttttggaaggaggcttcttgagttactatgaaaatgataagtctaccacacctaatggcaccattaatatcaatgaagttatctgcctggctatacacaaagaggacttctatttaaatactgggcccatctttatctttgagatctacttaccctccgaacgtgtgtttttatttggagctgaaacatctcaagctcaaagaaaatggacagaggcaatagccaagcattttgttcccttatttgctgaaaacttaacagaagctgactatgatttgattggtcaactcttctacaaagactgccatgccctggatcagtggagaaaaggctggtttgctatggacaaatccagcttgcatttttgccttcaaatgcaagaagttcagggagatagaatgcacttaagaagactgcaagagctaacaatcagcacaatggttcaaaatggggaaaaactggatgttttactcttggtagaaaaagggagaacattatacatccatgggcataccaagttggatttcacagtctggcatactgcaattgaaaaagcagcaggtacagatggtaatgctttacaagatcagcagctcagcaaaaatgacgttcccattatagtgaacagctgtatagcatttgttacacagtatggtttaggatgcaaatatatctatcaaaagaatggtgatcctttgcatataagtgaactcctggagagtttcaaaaaggatgcaagaagctttaaattgagggctggaaaacatcagcttgaagatgtgacggctgtgttgaaaagttttctctctgacattgatgatgcactgcttactaaggagctctacccatattggatctctgctttagatacgcaagatgacaaggaaagaattaaaaaatatggagcatttatacgttctcttccaggggtcaaccgagcaacactagcagctatcattgaacacctgtatagggttcagaaatgctcagaaatcaatcacatgaatgcccataatttggccttggtcttttcatcctgtttgtttcaaacgaagggacaaactagtgaagaagtgaatgtaattgaggacctaattaataattatgtagaaatatttgaggttaaagaagatcaagtcaaacaaatggacatagaaaatagctttattaccaagtggaaagacacccaagtttcccaggctggagatttgttaattgaagtatatgtagaaaggaaggaacccgactgtagtattataattcggatatctcctgtgatggaagcagaagaattaactaatgatatattagcgataaaaaatattattcctacaaaaggtgatatttgggccacatttgaagtcattgaaaatgaagagctagagcgtcctcttcactacaaggaaaatgtactggagcaggtgcttcggtggagttcattagctgaacctggctctgcttacctggtggtgaagagattcttaaccgctgacacaattaaacactgcagtgaccggagtacactgggaagcatcaaagaaggaatcttgaaaatcaaagaagaaccatccaaaatactatctggaaataagtttcaagaccggtattttgttttacgagatgggtttctctttctttacaaggatgtgaagagtagtaaacatgacaagatgttttctctcagttccatgaagttttatcgtggagtgaaaaagaaaatgaagcctccaacaagctggggattgaccgcatattctgagaaacatcactggcacctgtgttgtgatagttcacgaactcagacggagtggatgaccagtatctttattgcccagcatgaatatgatatatggccaccagctggaaaggaacgaaaacgttcaataaccaaaaatcccaaaattggaggtttgcctctgattcctatacagcatgaggggaatgcaaccttggcccggaaaaatattgagagtgcaagagcagaacttgaaaggctgcggctcagtgaaaagtgtgataaagagtccgtggactctagcttaaaggagagagcttccatggtggcccactgcctggagcacaaggacgataaacttcgaaatcgaccccgaaaacatcggagtttcaactgcctggaggacacagagcctgaagccccacttgggcaaccaaaaggccataaaggcctaaagacattgaggaagactgaggacaggaatagcaaagctactttggactctgatcataagttaccatcaagggtaattgaagaacttaatgtggttctacaacggtcaagaacccttccaaaagaattacaggatgagcagattttgaagtaggaaataaaatgaattgctccccagattatttttttaatattgtatgcaatctttatgtgtaactccaaaactgaactataagataattcataagaatttgcctattgataggcaaatttgtctatgcttaggcatttaaggagcatttaaaaatatgtatatatgtgactgaatgtaagattaactttattttggtctgaacaaaccttgtaaagttccattgtattaacgtgtgtaagaagacattgggttacttaggtggtcagtccttttaaagtagttgtctgttaagtggtataatttatgagcagaaatctcaaactgtactgtattgtataaaatgctgtgtttaaatgaagcctaagaaactatctgtaacatattttgcactttgagaaaccttgtatattaaattaccatatgtttttaggtttacagaagttctaccttagggaaaagaaagggaagtaaattgaaaaaggggggagaatttattgtagtggctgcctaaaaaccactggagtttttaaaagaagcaaggagttaaatgtcctgcaaaacaaggaagtgagctaagattcattctagttcactaatgaccagaacttgtcaatgagaaaccacttgttaagaaaaagtccagtgtttatttctcaagagtaatattcggccaacagatgtaaataatagcactagccactcttattaatatttatagtgttagaaaaccagccacattacagattcactacgtttgagctcattgttggtggctgctaagaggaaacttacactgcattggagaggttgtgtacacaggacctggcctggatgctgattgcactgtcattgtatgcaagcattttgtcttttttcagaatttctgactatacttttggtacgaacaaaattcatcaccacagggtcctgttgttttgtttgatttttagatttttttaaattattattaaggttgtaatgtttttctccgagttgtcagaaataactggaagaatacaatatatggccattatggagccaggggctagttggtggtttactatacatttgggggctacctggtcacatttaatctaggtttttttttctttttttaagtaaaggtgtggtctcttccctgtacttatgaataaggacaaagccctatttttgtttccacataaagatcagctactgaattggtgaatttcctgacagacaatgctatctaaccatagttcatgttaggggaagcatttttccatcagtttctttaaaattggattgtctggtgagttttgatattaaacattatgtagctaagttttttttttttagcatttcttttttatttttcaatctatattcacaggcccatacttcagtcagtccaatcatagtacagtgatgtggtggtagatgctatgaatttcttcattgtaaaatacggatcatttgtattttggggtgataaaatagttcaccatgggtatgagatatttattctttaaatcaaagtaaattagaatttttaaaaagcacaaaactgcaggacagtttatgaaataggtggcactattagggaatcttcctttaaagcaagaaatcatgttatttagaaagaaaaactaatcttaaacatactatttctaataaatatttatatttttatgaaataaagaggtatgtggaaattaatatttggtgatgttggacagtggaaaagtatctagagtttttacctgccttatctgaattcttcttgaaacttgagcttaaactctaatagctgtttccctttctattctgaacaactgtctccatttttcaagtgtgagagataagggctaatgatgacatctcatttattttgagtaaacattaaaattgttttacaagtctacttg

SEQ ID NO: 12468 - DNA, 7360 bp, Homo sapiens
gcggccgccgccaggcagcagaggcgactgcggacagccggcggggaccgggaaagaggaggcctggcgcctccggcagaggggcgaggaccgagcgcccaaggctgggagagacgccggcgctgagcttcccagcgccgcctcacctcgcttttcgaactccgcgacccgagcgcaaggcttaagcaggtaaagcagtcactgtgaagaaaataacattttaagaaacttttctgtcacaattgatagaggaaaagccagtagagaagtacatcttcttgtgtgtgtgtctcatcgtgccactttttgtaactcagcttagtaatgaagccaccattatgtcctcagtcagtgaagtaaatgtggatataaaagatttcctaatgagcattaatttggagcagtatctcttacatttccatgagtctggttttactactgtgaaggactgtgcagcaataaatgacagcctgctgcagaaaattggaatatcacctacaggtcaccgtaggaggatacttaaacagttacagataatcttgtcaaaaatgcaagatattccaatatatgcaaatgttcataaaactaagaagaatgatgacccttcaaaggattaccatgttccatcttctgatcagaatatctgcatagaactttccaattctggtagtgttcagacatctagcccaccgcagttggagactgttagaaaaaatcttgaagacagtgatgcaagtgtggaaagaagccagtatcctcaatcagatgataagctgtctcctcctaaacgcgacttccccactgcagaggaaccacacctgaatttgggttctttgaatgattctttatttggtagtgacaatattaaaatagaatcattgattacaaagaagactgtggatcacacagttgaagaacaacaaacagaaaaagttaaattgatcacagaaaatctcagtaagctccctaatgcagactctgaatgcctttcttttgttggctgttcaacatcaggaacaaattctggaaatggaacaaatggtttattagaaggatcaccaccatccccattctttaagtttcaaggagaaatgattgtaaatgacttgtatgttccatcatcaccaatcctagcacctgtgagaagtcgtagcaagttggtttcaagaccatctcgatcttttctgctaagacatcgacctgtaccagagattccagggtcaacaaaaggagtttctgggagctatttccgtgaaagaagaaatgttgctacctcaactgaaaaatctgtggcatggcaaaattcaaatgaggagaattcatcttccatctttccttatggagagacctttctcttccagagactagaaaattccaagaagcgatctataaagaatgaatttttgacccagggagaagcactcaaaggggaagcagctactgcaacaaactcttttatcatcaaatcaagcatatacgataacagaaaggagaaaataagcgaggacaaggtggaagatatttggatacctcgagaggacaaaaacaattttttgatagacactgcttctgaatcagaatactcaacagtagaagaatgctttcagagtttaagaagaaaaaattcaaaggcatctaaatctaggactcaaaaagccttgattttggactccgttaataggcacagttatccgttaagctcaacaagtggaaatgctgattcatcagccgtttcttcacaggcaatatctccctatgcctgcttttatggagcatctgcaaagaaggttaaatcaggatggctggataaactctctcctcaaggaaaacgcatgtttcaaaagagatgggtgaaatttgatggccttagcatttcttactacaataatgagaaggagatgtattcgaaaggaataattcccctttctgctatatcaacagtacgagttcaaggagacaacaaatttgaagttgttacaacacaaagaacttttgtttttagagtagaaaaagaagaggagagaaatgactggatcagcatactattaaatgcactgaaatcacaatcccttacctcgcagtctcaagctgttgttacacctgagaaatgtggatatcttgaattgagaggctataaggcaaaaatttttactgtgttaagtggaaacagtgtgtggctttgcaaaaacgaacaggattttaagagtggacttggtattaccataattcctatgaatgtagcaaatgtaaagcaagtggaccgaactgtgaaacaatcttttgaaataatcactccctacaggagtttcagctttacagccgagactgaaaaggagaaacaagactggattgaagctgtgcagcaatcaatagcagaaactctctctgattatgaagtagctgagaagatttggttcaatgaatccaacaggagctgtgcagattgtaaagccccagatcctgactgggcatccatcaatctctgtgttgtcatctgtaagaagtgtgcaggacagcatagatctttaggaccaaaagattccaaggttagaagtctaaaaatggatgctagcatttggagcaatgaactcatcgagctttttattgtcattggaaacaaaagagcaaatgacttttgggctggtaatcttcaaaaggatgaagaattacatatggactcaccagtagaaaagagaaaaaactttattactcagaaatataaagaaggaaaattcagaaaaactcttttggcatctctcaccaaagaagaattaaataaggctctatgtgctgctgtagtgaaaccggatgttctagaaacaatggctttgctgttcagtggagcagatgtcatgtgtgccaccggagaccccgtgcatagcaccccctatctgctagccaagaaagctgggcaaagtctgcaaatggaatttctctaccataacaaattctcagatttccctcaacatgatattcattccgagggtgtattaagtcaagagtcttcccagtccacattcctctgtgactttttatatcaagctccttctgctgcttctaaactctcttcagagaaaaaactgcttgaagagacaaataaaaaatggtgtgttttggaaggaggcttcttgagttactatgaaaatgataagtctaccacacctaatggcaccattaatatcaatgaagttatctgcctggctatacacaaagaggacttctatttaaatactgggcccatctttatctttgagatctacttaccctccgaacgtgtgtttttatttggagctgaaacatctcaagctcaaagaaaatggacagaggcaatagccaagcattttgttcccttatttgctgaaaacttaacagaagctgactatgatttgattggtcaactcttctacaaagactgccatgccctggatcagtggagaaaaggctggtttgctatggacaaatccagcttgcatttttgccttcaaatgcaagaagttcagggagatagaatgcacttaagaagactgcaagagctaacaatcagcacaatggttcaaaatggggaaaaactggatgttttactcttggtagaaaaagggagaacattatacatccatgggcataccaagttggatttcacagtctggcatactgcaattgaaaaagcagcaggtacagatggtaatgctttacaagatcagcagctcagcaaaaatgacgttcccattatagtgaacagctgtatagcatttgttacacagtatggtttaggatgcaaatatatctatcaaaagaatggtgatcctttgcatataagtgaactcctggagagtttcaaaaaggatgcaagaagctttaaattgagggctggaaaacatcagcttgaagatgtgacggctgtgttgaaaagttttctctctgacattgatgatgcactgcttactaaggagctctacccatattggatctctgctttagatacgcaagatgacaaggaaagaattaaaaaatatggagcatttatacgttctcttccaggggtcaaccgagcaacactagcagctatcattgaacacctgtatagggttcagaaatgctcagaaatcaatcacatgaatgcccataatttggccttggtcttttcatcctgtttgtttcaaacgaagggacaaactagtgaagaagtgaatgtaattgaggacctaattaataattatgtagaaatatttgaggttaaagaagatcaagtcaaacaaatggacatagaaaatagctttattaccaagtggaaagacacccaagtttcccaggctggagatttgttaattgaagtatatgtagaaaggaaggaacccgactgtagtattataattcggatatctcctgtgatggaagcagaagaattaactaatgatatattagcgataaaaaatattattcctacaaaaggtgatatttgggccacatttgaagtcattgaaaatgaagagctagagcgtcctcttcactacaaggaaaatgtactggagcaggtgcttcggtggagttcattagctgaacctggctctgcttacctggtggtgaagagattcttaaccgctgacacaattaaacactgcagtgaccggagtacactgggaagcatcaaagaaggaatcttgaaaatcaaagaagaaccatccaaaatactatctggaaataagtttcaagaccggtattttgttttacgagatgggtttctctttctttacaaggatgtgaagagtagtaaacatgacaagatgttttctctcagttccatgaagttttatcgtggagtgaaaaagaaaatgaagcctccaacaagctggggattgaccgcatattctgagaaacatcactggcacctgtgttgtgatagttcacgaactcagacggagtggatgaccagtatctttattgcccagcatgaatatgatatatggccaccagctggaaaggaacgaaaacgttcaataaccaaaaatcccaaaattggaggtttgcctctgattcctatacagcatgaggggaatgcaaccttggcccggaaaaatattgagagtgcaagagcagaacttgaaaggctgcggctcagtgaaaagtgtgataaagagtccgtggactctagcttaaaggagagagcttccatggtggcccactgcctggagcacaaggacgataaacttcgaaatcgaccccgaaaacatcggagtttcaactgcctggaggacacagagcctgaagccccacttgggcaaccaaaaggccataaaggcctaaagacattgaggaagactgaggacaggaatagcaaagctactttggactctgatcataagttaccatcaagggtaattgaagaacttaatgtggttctacaacggtcaagaacccttccaaaagaattacaggatgagcagattttgaagtaggaaataaaatgaattgctccccagattatttttttaatattgtatgcaatctttatgtgtaactccaaaactgaactataagataattcataagaatttgcctattgataggcaaatttgtctatgcttaggcatttaaggagcatttaaaaatatgtatatatgtgactgaatgtaagattaactttattttggtctgaacaaaccttgtaaagttccattgtattaacgtgtgtaagaagacattgggttacttaggtggtcagtccttttaaagtagttgtctgttaagtggtataatttatgagcagaaatctcaaactgtactgtattgtataaaatgctgtgtttaaatgaagcctaagaaactatctgtaacatattttgcactttgagaaaccttgtatattaaattaccatatgtttttaggtttacagaagttctaccttagggaaaagaaagggaagtaaattgaaaaaggggggagaatttattgtagtggctgcctaaaaaccactggagtttttaaaagaagcaaggagttaaatgtcctgcaaaacaaggaagtgagctaagattcattctagttcactaatgaccagaacttgtcaatgagaaaccacttgttaagaaaaagtccagtgtttatttctcaagagtaatattcggccaacagatgtaaataatagcactagccactcttattaatatttatagtgttagaaaaccagccacattacagattcactacgtttgagctcattgttggtggctgctaagaggaaacttacactgcattggagaggttgtgtacacaggacctggcctggatgctgattgcactgtcattgtatgcaagcattttgtcttttttcagaatttctgactatacttttggtacgaacaaaattcatcaccacagggtcctgttgttttgtttgatttttagatttttttaaattattattaaggttgtaatgtttttctccgagttgtcagaaataactggaagaatacaatatatggccattatggagccaggggctagttggtggtttactatacatttgggggctacctggtcacatttaatctaggtttttttttctttttttaagtaaaggtgtggtctcttccctgtacttatgaataaggacaaagccctatttttgtttccacataaagatcagctactgaattggtgaatttcctgacagacaatgctatctaaccatagttcatgttaggggaagcatttttccatcagtttctttaaaattggattgtctggtgagttttgatattaaacattatgtagctaagttttttttttttagcatttcttttttatttttcaatctatattcacaggcccatacttcagtcagtccaatcatagtacagtgatgtggtggtagatgctatgaatttcttcattgtaaaatacggatcatttgtattttggggtgataaaatagttcaccatgggtatgagatatttattctttaaatcaaagtaaattagaatttttaaaaagcacaaaactgcaggacagtttatgaaataggtggcactattagggaatcttcctttaaagcaagaaatcatgttatttagaaagaaaaactaatcttaaacatactatttctaataaatatttatatttttatgaaataaagaggtatgtggaaattaatatttggtgatgttggacagtggaaaagtatctagagtttttacctgccttatctgaattcttcttgaaacttgagcttaaactctaatagctgtttccctttctattctgaacaactgtctccatttttcaagtgtgagagataagggctaatgatgacatctcatttattttgagtaaacattaaaattgttttacaagtctacttg

SEQ ID NO: 12469 - DNA, 4259 bp, Homo sapiens
actggacaaccgcagtctgcaagaggctgagctgaggagtcgctgggccgggaggggcggacgtgagaaggacggattgacgaactgatggattgacgcgcgggcggtaggagggaggaccgacgccaaacccagaccgccgccgtcgtgctcctgccgcagcccggagccggcagcttcggggccctggccgccggcctcccagccgcgttctcctccgccgctcctccgggcttgccctggagccctcaggctatcaatatgacggctgaagaaacagtgaatgtaaaagaggttgaaatcattaagctaattttggacttcctgaattcaaagaagcttcacattagtatgctggccctggagaaggaaagtggagtcataaatggcctgttttcagatgatatgcttttcctgaggcagctaatacttgatggtcaatgggatgaagttcttcagttcattcagcctctagaatgtatggaaaaatttgacaaaaaaaggtttcgttatattatcctgaagcagaagtttttagaagctttatgtgttaacaacgcgatgtcagcagaagatgagccccagcatctggaatttaccatgcaagaagctgtgcaatgtttacatgctctagaagaatactgtccttctaaagatgactatagtaagctctgtttgcttttgactttgcctcgtctgaccaatcatgccgagtttaaggactggaatcccagcaccgcacgagttcactgttttgaagaggcttgtgtcatggttgcagaattcatccctgctgataggaagctaagtgaagctggttttaaggctagtaacaatcgtttatttcagcttgtaatgaaaggcctgctttatgaatgctgtgtagaattttgtcagagtaaagcaactggagaagaaattacagaaagcgaagtgcttcttggcatcgacctcttatgtggtaatggttgtgatgatttggatctgagtttactgtcatggcttcagaatcttccatcttctgtcttctcttgtgcttttgaacagaaaatgcttaatattcatgttgacaaacttctgaaacctacaaaagctgcatatgctgatcttttgactcctcttatcagcaaactctctccctatccatcatccccaatgagaaggcctcaatcagctgatgcctatatgacccgctctctgaatcctgctttagatggcctcacctgtggactaaccagtcatgataagagaatttcagaccttggaaacaaaacttctccaatgtcacactcctttgctaacttccattatccaggggtacaaaacctcagtagaagtctcatgcttgagaatacagaatgtcacagtatttacgaagaatcccctgagcgaagtgatacacctgttgatgcacagaggcctatcggcagtgaaatcttgggccagagttcagtttcagaaaaagagcctgcaaatggagcacagaatccaggaccagctaaacaagaaaaaaatgagcttcgagattcaacagaacaatttcaagaatattataggcaaagattacgctatcaacagcatttagaacagaaggagcaacagcggcagatataccaacagatgttgcttgaaggaggcgtgaatcaggaggatggtcctgatcagcagcagaatcttactgaacagttccttaataggtccattcaaaagcttggtgaattaaatattggaatggatggccttggtaatgaggtatcagcactcaaccagcaatgtaatgggagcaaaggcaatggatctaatggttcttctgtgactagttttactacaccaccccaagactctagtcagagattaacacatgatgcttcaaatattcatacaagcactcctcgtaatcctggatcaacaaatcacataccttttctggaggaatcaccttgtggaagccaaatctcttcagaacattcggtcattaagccacctcttggagattctccagggagtctttcaaggtcgaaaggggaagaggatgacaaatcaaaaaagcagtttgtttgtattaatatcctagaagacacacaagctgttagagcagtggcttttcatccagctggaggtttatatgctgttggttcaaattcaaaaactctgagagtatgtgcctatccagatgtaattgatccaagtgcacatgagactcctaagcagccggtggtacgttttaaaaggaataaacatcataaaggatccatttactgtgtggcctggagtccttgtgggcagttattagcaacaggatcaaatgacaaatacgtcaaagtgctgcccttcaatgcagagacttgtaacgcaacaggaccagatctggaatttagtatgcatgatggaacaattagagacttggcatttatggaaggcccagaaagcggaggagctattttaataagtgctggagcaggggattgtaacatttatacaaccgattgtcaaagaggacagggcctccatgctttgagtggacatactgggcatattttagcactttatacctggagtggctggatgattgcatctggttcccaagataagactgttggattttgggatcttcgagtaccaagttgtgctcgtgttgttggcacaacatttcatggaactggcagtgcagtggcatctgtagctgtagatcccagtggtcgtctcttagccacaggtcaagaagattctagctgcatgttgtatgacataagaggaggaagaatggtacaaagttatcatcctcattccagtgatgttcgctctgttcgattctcccctggagctcactacttgctaacaggctcttatgatatgaaaataaaggtgacagacctacaaggggacctcaccaagcagcttcctatcatggtggtgggggagcacaaggacaaagtgattcagtgcagatggcacacccaggatctttccttcctgtcatcctctgcagatagaactgtcaccctctggacttacaatgggtagagcacaccgcatgtcagtctatgcagcaaaagcacagagacttaagactactgagttgtgaaaattacaaatctgaagaacatagtgtccaggaaagtggtttagcacgaagaggccccttattaccatgtatcccactgataggaggtgttgggtggtgttattccgcagtgctttcagtcttccatgtgagctcgtgctgctgtgacctgctatatgtagtctcgttgccaaagtctgcagaagagctcttcagttgttggtgtgcactccaagtcaggatggacaatgtgtttacggtttagtattcaatgcattccttggtctttgcctaaataacagttttatatgcacattgaaatggaattatacttcaactatattattaaatgtaatgcaaccaagttcctcccagattaaacttcccaggtgttcagaattacttttgctcttctcacgatcccatattgtattatcacttgtcttctagaggtcagaattccataatatatgtcactcaaaagttacatggttgctttcacttaaggatcattatggagtttaaagatgaatgaaaaactgcttcttagtttactacatggtataggcccttttttcttaaacccagggatatgattattttgtcatataattttgtttcaggctaaaaggtaaatgtgtttgcttcagaaacttgttaacttcagttttttgaatgcaacaggatacctcccttccaaactgaactgtagaagcagagcagcagcagttatgtgacgcaacacttgatggtacagtaaatttactggcatttttctccttaaaaattaaaatccttgacatagaccatagcatggcttgaaatgctatgtctgcatgataatttaaaatggaagatttaaactttgcactccaaaagcttatttggatttttttcttgcactgttttgtgtaatgcagaataatgattttatttctacagctttgtagattctaacatttatgtatctttattttcatattgtacagtaattttactttaaattatttaaataggctattttatttatttcaaatgcagttgtattagttctcattattgaactgtctgtgcactgtatgtagcaagcatttttcatctgttgtatacaagtggaaagggtattagaagtgtaactgtgctattatttcaataaagacctcttgacatttaaaaaagaaaaaaaaaaaaaaaa

SEQ ID NO: 12470 - DNA, 4128 bp, Homo sapiens
acttccggtgtgtgagcctgcggttgctacataaccgcgtagtttgagccatttctgcgtctggcgggtccttctgaacttgtcaccttcgcttggggtcgcaacgacccgatgatcgatgatccaagcaagggaaaagaagccttggcggagagcggaggcacaattccaccttcctttgtgctccattactcaagactctgaagactccaaaaagtaggaggaaaaatgaccacattcaaggaggcagtgaccttcaaggatgtggctgtgttcttcactgaggaggaactggggctactggaccctgcccagaggaagctgtaccaagacgtgatgcttgagaacttcacgaacctgctgtcagtggggcatcaaccattccaccctttccacttcctaagggaagaaaagttttggatgatggagacagcaacccaaagagaaggaaattcaggcggcaagactattgcggaagcaggaccacatgaagactgcccttgccagcaaatctgggaacaaactgcaagtgacttaacccagtctcaagactccatcataaataattctcacttctttgaacaaggtgatgtcccctcccaggttgaggcaggactatctataattcatacaggacagaaaccttcacagaatgggaagtgtaaacagtccttcagtgatgttgccatctttgatcctcctcagcagttccactcaggagagaagtctcatacatgcaatgagtgtggaaaaagcttctgttacatctcagctcttcgtattcaccagagagttcacttgagagagaaactctctaagtgtgacatgcgtggtaaggaattcagtcagagctcatgtctgcaaactcgtgagagagtccacactggagagaaaccattcaaatgtgagcaatgtgggaaaggcttcagatgtagagcgatacttcaagttcactgcaaattacacacaggagagaaaccttatatttgtgagaaatgtgggagggccttcattcacgatttccagcttcagaaacatcagataattcatactggggagaagccgttcaaatgtgaaatatgtggtaagagcttctgccttaggtcaagtcttaataggcattgcatggtccacacagcagagaaactgtacaaatctgaggagtgtggaaaaggcttcactgatagcctagatttgcataagcatcagataattcacacaggacagaaaccgtacaattgtaaagaatgtgggaagagcttcagatggtcctcatatcttttgatccatcagcgaatccacagtggagaaaaaccatacagatgtgaggagtgtgggaagggctacattagtaagtcaggtcttaacttgcaccagagggtccatactggagagagaccttataattgtaaggaatgtgggaagagctttagccgggcttcaagtattttgaatcataagaaactccactgccggaaaaaacccttcaaatgtgaggattgtggaaagaggcttgtacaccggtctttctgtaaagaccaacaaggagaccacaatggagaaaactcatccaaatgtgaggactgtgggaagcgctacaagaggcgcttgaatctggatataattttatcattatttttaaatgatatgtaagttgtacatatatatgggatatggtatgaaattttaatatgtgtatataatacgtaatgatcaaattgatgtaattagtgtattaccttaaacaattaacatttctttgttttgggaaaattcaaaatccattgttctagcgatttgaaaagaaacaataaattattgttgattatagtcacctttggtgctttagaacactagaatgtatttctcctatctagcagtacttatgtatcttgttacccaatctttggctatctcacctaacccctacacttccctgcttctagaaccactgttttactcactaattctatgaaatcaacttttttagcttccatatgtgtgtgaggacagttagtatttatcttaccttgcttagcttatattgtttaacatgtcctccaaagctcatctatgttgccacaaatgacacaattttgttttctttttatgcccaaagagtattctattgtgtatatatgccaccttttcttcatttatctattgatggacacataggtgggttccatatcttaactattgtgaagaatagtgctccaatgaacatggtagtgtagatatctgatccacatactgatttcctttgctttggatatactcaatagtgggattgctagatcactcgaatcttatgcctcagaggcttgacacaagagcaaaactatggaagtgtggctagggtgatatggcttcataccacctcaggcctcaagtcctcaactgcaccagagtgtccacgttggacagaatccttagtaatgaggtgtgtgataaagtctctgctcagttgtctataatctcatttgagagttcacaaaggggcaaaacattaaaaagaggcatatggtaagcacttcagtgtgtgtttatatcataatttatcacagtccatactgataatatatttcatccaggcttgtaggacagaaaacatttgtttaagttaaattcagtgtttcaccatagctcagcattctcccatcatcctaggaccatcgtagtagagaactcttgtaaattgtgcagtagggttgcaaacagaacttacgcttgtcattcaggagacaggccttagaataagagtttgttcacacatttacaaaaccctaatgatgaacatgtcaaaagtggtgaccactagaatgtcaactacaggtaccttgttttctgcatcctcaggaccttaacactgattagcacttacatgtttagtatgtgttaaatgactcaaaaggagaaaatatgatattttaaaattgcatctaggagagaaaatctacaaaaaataattcagggacacgagttaaaatgcagaatacactcagttctgcaatccaaagcattattttgggtaatcttaccctgttgcacttggctgctggcttcccctcatcctctgttctgaagtttactactagtggctttgtctaatgctccattggttgcatacaatataaattcaacaatcatttgtaactcttctcacactacaggctgaaaatggtttgttaacttgtcaataacagtccactgcatatatcacaattacatttttttcaacagtgttaaggcaaaatttatagtaatactttttacgtggcagatgtagttacgttggaaaaaacttccttagttctgaattctcatgattgcttctgtatttccatgcaggccttgatataatggccttctaattgtggtagcatttattttatcaaacaactcaggtagaagctatgccaatttgacaatttttggaaacctaacctaatattctcttcctatctctatgaaataccaagagaaacctatcggagtttggtaatttcatgaaatgtatccatgattggggtaggagtgacatttacatgctcttctttattgttggcagtaaaaataagtcttttgtaagcagtgtatatcagaatgtataaggtacaagtgttttacctggaaatgatgggataggaaattatgattatgatgttaaaactgtgaaaagtagaaaaccacatggatgatatcaccccattttaaaatggaataagtattcaacaagaatttgtgtgaaatgcatttattcctataacataagaccaataaaatgagggaaccagacatacagtaaaaggagaaaaacataatgtgagctttgtgaaatctgactgtaaccttcataacataatcaaatatctttgtgtgtttctgggactttttaatgtgtatatacgtaatttgtgaacaactattctttcctctggcaatgaatatttgctggtatttttccattttataattttatgcattttttctcagtgaacatcagttttatcaaagcagtaaatttagtgcaataaatttgcaaacttattaacgttaatcacttacctaccaggactcagaatctcagaataaaattgctctatattaccaaaaaaaaaaaaaaaa

SEQ ID NO: 12471 - DNA, 582 bp, Homo sapiens
atgtttgacaatgggaacttccgtcggaagcgaaagcgccgctctgaggccagcaatggctccacagtggctgctgggacatcaaagtccgaagaagggctctcctcaggattggggtctggagtgggtgggaagccagaagaagagagcccctccactctgctgaggccttcccactccccagagcctccggagggcaccaagagtactgcctcatctcctggaggacccatgctcacctccaccccttgtctcaacactttcttcagcagcctcagctccttgagtgtcagcagcagtgtgagtacccagcgggctctccctggcagccgccacctagggatccagggggcccagctgccctccagcggcgtgttctccccgacctccatctcagaggcctcagcagacaccttgcaactgagcaatagcaccagcaatagcaccggccagagatcttcctattacagccctttccctgccagcaccagcggggggcaaagcagccccttcagcagccctttccacaactttagcatggtgaacagcctcatctacccccgagagggctccgaggtgtag

SEQ ID NO: 12472 - DNA, 3198 bp, Homo sapiens
atttgaggtgttctgaccagaagaagacagagcggatgatcattcattcaccacgttgacaacctcgcctgtgattgacagctggagtggcagaaagccatgagatttggtagttgggtctgaggggcgctcttttttttccttttctttctttctttctttttttttttttaaactgatttttgggggagagaagatctgcttttttttgcccccgctgctgtcttggaaacggagcgcttttatgctcagtgactcgggcgctttgcttcaggtcccgtagaccgaagatctgggaccagtagctcacgttgctggagacgttaagggatttttcgtcgtgcttttttttttttttttttttttttccgggggagtttgaatatttgtttcttttcacactggccttaaagaggatatattagaagttgaagtaggaagggagccagagaggccgatggcgcaaaggtacgacgatctaccccattacgggggcatggatggagtaggcatcccctccacgatgtatggggacccgcatgcagccaggtccatgcagccggtccaccacctgaaccacgggcctcctctgcactcgcatcagtacccgcacacagctcataccaacgccatggcccccagcatgggctcctctgtcaatgacgctttaaagagagataaagatgccatttatggacaccccctcttccctctcttagcactgatttttgagaaatgtgaattagctacttgtaccccccgcgagccgggggtggcgggcggggacgtctgctcgtcagagtcattcaatgaagatatagccgtgttcgccaaacagattcgcgcagaaaaacctctattttcttctaatccagaactggataacttgatgattcaagccatacaagtattaaggtttcatctattggaattagagaaggtacacgaattatgtgacaatttctgccaccggtatattagctgtttgaaagggaaaatgcctatcgatttggtgatagacgatagagaaggaggatcaaaatcagacagtgaagatataacaagatcagcaaatctaactgaccagccctcttggaacagagatcatgatgacacggcatctactcgttcaggaggaaccccaggcccttccagcggtggccacacgtcacacagtggggacaacagcagtgagcaaggtgatggcttggacaacagtgtagcttcccccagcacaggtgacgatgatgaccctgataaggacaaaaagcgtcacaaaaagcgtggcatctttcccaaagtagccacaaatatcatgagggcgtggctgttccagcatctaacacacccttacccttctgaagaacagaaaaagcagttggcacaagacacgggactcaccatccttcaagtgaacaattggtttattaatgcccggagaagaatagtgcagcccatgatagaccagtccaaccgagcagtaagtcaaggaacaccttataatcctgatggacagcccatgggaggtttcgtaatggacggtcagcaacatatgggaattagagcaccaggacctatgagtggaatgggcatgaatatgggcatggaggggcagtggcactacatgtaaccttcatctagttaaccaatcgcaaagcaagggggaaggctgcaaagtatgccaggggagtatgtagcccggggtggtccaatgggtgtgagtatgggacagccaagttatacccaaccccagatgcccccccatcctgctcagctgcgtcatgggccccccatgcatacgtacattcctggacaccctcaccacccaacagtgatgatgcatggaggaccgccccaccctggaatgccaatgtcagcatcaagccccacagttcttaatacaggagacccaacaatgagtggacaagtcatggacattcatgctcagtagcttaagggaatatgcattgtctgcaatggtgactgatttcaaatcatgttttttctgcaatgactgtggagttccattcttggcatctactctggaccaaggagcatccctaattcttcatagggacctttaaaaagcaggaaataccaactgaagtcaatttgggggacatgctaaataactatataagacattaagagaacaaagagtgaaatattgtaaatgctattatactgttatccatattacgttgtttcttatagattttttaaaaaaaatgtgaaatttttccacactatgtgtgttgtttccatagctcttcacttcctccagaagcctccttacattaaaaagccttacagttatcctgcaagggacaggaaggtctgatttgcaggatttttagagcattaaaataactatcaggcagaagaatctttcttctcgcctaggatttcagccatgcgcgcgctctctctctttctctctcttttcctctctctccctctttctagcctggggcttgaatttgcatgtctaattcatttactcaccatatttgaattggcctgaacagatgtaaatcgggaaggatgggaaaaactgcagtcatcaacaatgattaatcagctgttgcaggcagtgtcttaaggagactggtaggaggaggcatggaaaccaaaaggccgtgtgtttagaagcctaattgtcacatcaagcatcattgtccccatgcaacaaccaccaccttatacatcacttcctgttttaagcagctctaaaacatagactgaagatttatttttaatatgttgactttatttctgagcaaagcatcggtcatgtgtgtattttttcatagtcccaccttggagcatttatgtagacattgtaaataaattttgtgcaaaaaggactggaaaaatgaactgtattattgcaatttttttttgtaaaagtagcagtttggtatgagttggcatgcatacaagatttactaagtgggataagctaattatactttttgttgtggataaacaaatgcttgttgatagcctttttctatcaagaaaccaaggagctaattattaataacaatcattgcacactgagtcttagcgtttctgatggaaacagtttggattgtataataacgccaagcccagttgtagtcgtttgagtgcagtaatgaaatctgaatctaaaataaaaacaagattatttttgtcaaaaaaaaaaaaaaaaaa

SEQ ID NO: 12473 - DNA, 3369 bp, Homo sapiens
gaaaggcggggtctcggccggcgctgacgcagccatggcggaggcggctttggaagccgtgcggagcgagttacgagaattcccggccgctgcaagggagctctgcgtgcctcttgctgtgccctacctggacaaacccccaactccgctccacttctaccgggactgggtctgccccaacaggccgtgcattatccgcaacgctctgcagcactggccggccctccagaagtggtccctcccctatttcagagccacagtgggctccacagaggtgagtgtggccgtgaccccagatggttacgcggatgccgtgagaggggatcgcttcatgatgccagctgagcgccgcctgcccctgagcttcgtgctggatgtgctggagggccgggcccagcaccctggagtcctctatgtgcagaagcagtgctccaacctgcccagcgagctgccccagctgctgcctgatctggaatcccatgtgccctgggcctccgaagccctgggaaagatgcccgatgctgtgaacttctggctgggggaggcggctgcagtgacttctttgcacaaggaccactatgagaacctctactgcgtggtctcaggagagaagcatttcctgttccatccgcccagcgaccggcccttcatcccctatgagctgtacacgccggcaacctaccagctaactgaagagggcacctttaaggtggtggatgaagaggccatggagaaggcagaggtgtccaggacctgcctgctcacggttcgtgtcctgcaggcccatcgcctaccctctaaggacctagtgaccccctctgactgctacgtgactctctggctgcccacggcctgcagccacaggctccagacacgcacggtcaagaacagcagtagccctgtctggaaccagagctttcacttcaggatccacaggcagctcaagaatgtcatggaactgaaagtctttgaccaggacctggtgaccggagatgaccctgtgttgtcagtactgtttgatgcggggactctgcgggctggggagttccggcgcgagagcttctcactgagccctcagggtgaggggcgcctggaagttgaatttcgcctgcagagtctggctgaccgtggcgagtggctcgtcagcaatggcgttctggtggcccgggagctctcctgcttgcacgttcaactggaggagacaggagaccagaagtcctcagagcacagagttcagcttgtggttcctgggtcctgtgagggtccgcaggaggcctctgtgggcactggcaccttccgcttccactgcccagcctgctgggagcaggagctgagtattcgcctgcaggatgcccccgaggagcaactaaaggcgccactgagtgccctgccctctggtcaagtggtgaggcttgtcttccccacgtcccaggagcccctgatgagagtggagctgaaaaaagaagcaggactgagggagctggccgtgcgactgggcttcgggccctgtgcagaggagcaggccttcctgagcaggaggaagcaggtggtggccgcggccttgaggcaggccctgcagctggacggagacctgcaggaggatgagatcccagtggtagctattatggccactggtggtgggatccgggcaatgacttccctgtatgggcagctggctggcctgaaggagctgggcctcttggattgcgtctcctacatcaccggggcctcgggctccacctgggccttggccaacctttatgaggacccagagtggtctcagaaggacctggcagggcccactgagttgctgaagacccaggtgaccaagaacaagctgggtgtgctggcccccagccagctgcagcggtaccggcaggagctggccgagcgtgcccgcttgggctacccaagctgcttcaccaacctgtgggccctcatcaacgaggcgctgctgcatgatgagccccatgatcacaagctctcagatcaacgggaggccctgagtcatggccagaaccctctgcccatctactgtgccctcaacaccaaagggcagagcctgaccacttttgaatttggggagtggtgcgagttctctccctacgaggtcggcttccccaagtacggggccttcatcccctctgagctctttggctccgagttctttatggggcagctgatgaagaggcttcctgagtcccgcatctgcttcttagaaggtatctggagcaacctgtatgcagccaacctccaggacagcttatactgggcctcagagcccagccagttctgggaccgctgggtcaggaaccaggccaacctggacaaggagcaggtcccccttctgaagatagaagaaccaccctcaacagccggcaggatagctgagtttttcaccgatcttctgacgtggcgtccactggcccaggccacacataatttcctgcgtggcctccatttccacaaagactactttcagcatcctcacttctccacatggaaagctaccactctggatgggctccccaaccagctgacaccctcggagccccacctgtgcctgctggatgttggctacctcatcaataccagctgcctgcccctcctgcagcccactcgggacgtggacctcatcctgtcattggactacaacctccacggagccttccagcagttgcagctcctgggccggttctgccaggagcaggggatcccgttcccacccatctcgcccagccccgaagagcagctccagcctcgggagtgccacaccttctccgaccccacctgccccggagcccctgcggtgctgcactttcctctggtcagcgactccttccgggagtactcggcccctggggtccggcggacacccgaggaggcggcagctggggaggtgaacctgtcttcatcggactctccctaccactacacgaaggtgacctacagccaggaggacgtggacaagctgctgcacctgacacattacaatgtctgcaacaaccaggagcagctgctggaggctctgcgccaggcagtgcagcggaggcggcagcgcaggccccactgatggccggggcccctgccacccctaactctcattcattccctggctgctgagttgcaggtgggaactgtcatcacgcagtgcttcagagcctcgggctcaggtggcacggtcccagggtccaggctgagggctgggagctcccttgcgcctcagcagtttgcagtggggtaaggaggccaagcccatttgtgtaatcacccaaaaccccccggcctgtgcctgttttcccttctgcgctaccttgagtagttggagcacttgatacatcacagactcatacaaaaaaaaaaaaaaaa

SEQ ID NO: 12474 - DNA, 10330 bp, Homo sapiens
ctcggcccaacaaaatggcggcggcagcggtgtcgctttgtttccgcggctcctgcggcggtggcagtggtagcggcctttgagctgtggggaggttccagcagcagctacagtgacgactaagactccagtgcatttctatcgtaaccgggcgcgggggagcgcagatcggcgcccagcaatcacagaagccgacaaggcgttcaagcgaaaacatgaccgctgagcccatgagtgaaagcaagttgaatacattggtgcagaagcttcatgacttccttgcacactcatcagaagaatctgaagaaacaagttctcctccacgacttgcaatgaatcaaaacacagataaaatcagtggttctggaagtaactctgatatgatggaaaacagcaaggaagagggaactagctcttcagaaaaatccaagtcttcaggatcgtcacgatcaaagaggaaaccttcaattgtaacaaagtatgtagaatcagatgatgaaaaacctttggatgatgaaactgtaaatgaagatgcgtctaatgaaaattcagaaaatgatattactatgcagagcttgccaaaaggtacagtgattgtacagccagagccagtgctgaatgaagacaaagatgattttaaagggcctgaatttagaagcagaagtaaaatgaaaactgaaaatctcaaaaaacgcggagaagatgggcttcatgggattgtgagctgcactgcttgtggacaacaggtcaatcattttcaaaaagattccatttatagacacccttcattgcaagttcttatttgtaagaattgctttaagtattacatgagtgatgatattagccgtgactcagatggaatggatgaacaatgtaggtggtgtgcggaaggtggaaacttgatttgttgtgacttttgccataatgctttctgcaagaaatgcattctacgcaaccttggtcgaaaggagttgtccacaataatggatgaaaacaaccaatggtattgctacatttgtcacccagagcctttgttggacttggtcactgcatgtaacagcgtatttgagaatttagaacagttgttgcagcaaaataagaagaagataaaagttgacagtgaaaagagtaataaagtatatgaacatacatccagattttctccaaagaagactagttcaaattgtaatggagaagaaaagaaattagatgattcctgttctggctctgtaacctactcttattccgcactaattgtgcccaaagagatgattaagaaggcaaaaaaactgattgagaccacagccaacatgaactccagttatgttaaatttttaaagcaggcaacagataattcagaaatcagttctgctacaaaattacgtcagcttaaggcttttaagtctgtgttggctgatattaagaaggctcatcttgcattggaagaagacttaaattccgagtttcgagcgatggatgctgtaaacaaagagaaaaataccaaagagcataaagtcatagatgctaagtttgaaacaaaagcacgaaaaggagaaaaaccttgtgctttggaaaagaaggatatttcaaagtcagaagctaaactttcaagaaaacaggtagatagtgagcacatgcatcagaatgttccaacagaggaacaaagaacaaataaaagtaccggtggtgaacataagaaatctgatagaaaagaagaacctcaatatgaacctgccaacacttctgaagatttagacatggatattgtgtctgttccttcctcagttccagaagacatttttgagaatcttgagactgctatggaagttcagagttcagttgatcatcaaggggatggcagcagtggaactgaacaagaagtggagagttcatctgtaaaattaaatatttcttcaaaagacaacagaggaggtattaaatcaaaaactacagctaaagtaacaaaagaattatatgttaaactcactcctgtttccctttctaattccccaattaaaggtgctgattgtcaggaagttccacaagataaagatggctataaaagttgtggtctgaaccccaagttagagaaatgtggacttggacaggaaaacagtgataatgagcatttggttgaaaatgaagtttcattacttttagaggaatctgatcttcgaagatccccacgtgtaaagactacacccttgaggcgaccgacagaaactaaccctgtaacatctaattcagatgaagaatgtaatgaaacagttaaggagaaacaaaaactatcagttccagtgagaaaaaaggataagcgtaattcttctgacagtgctatagataatcctaagcctaataaattgccaaaatctaagcaatcagagactgtggatcaaaattcagattctgatgaaatgctagcaatcctcaaagaggtgagcaggatgagtcacagttcttcttcagatactgatattaatgaaattcatacaaaccataagactttgtatgatttaaagactcaggcggggaaagatgataaaggaaaaaggaaacgaaaaagttctacatctggctcagattttgatactaaaaagggcaaatcagctaagagctctataatttctaaaaagaaacgacaaacccagtctgagtcttctaattatgactcagaattagaaaaagagataaagagcatgagtaaaattggtgctgccagaaccaccaaaaaaagaattccaaatacaaaagattttgactcttctgaagatgagaaacacagcaaaaaaggaatggataatcaagggcacaaaaatttgaagacctcacaagaaggatcatctgatgatgctgaaagaaaacaagagagagagactttctcttcagcagaaggcacagttgataaagacacgaccatcatggaattaagagatcgacttcctaagaagcagcaagcaagtgcttccactgatggtgtcgataagctttctgggaaagagcagagttttacttctttggaagttagaaaagttgctgaaactaaagaaaagagcaagcatctcaaaaccaaaacatgtaaaaaagtacaggatggcttatctgatattgcagagaaattcctaaagaaagaccagagcgatgaaacttctgaagatgataaaaagcagagcaaaaagggaactgaagaaaaaaagaaaccttcagactttaagaaaaaagtaattaaaatggaacaacagtatgaatcttcatctgatggcactgaaaagttacctgagcgagaagaaatttgtcattttcctaagggcataaaacaaattaagaatggaacaactgatggagaaaagaaaagtaaaaaaataagagataaaacttctaaaaagaaggatgaattatctgattatgctgagaagtcaacagggaaaggagatagttgtgactcttcagaggataaaaagagtaagaatggagcatatggtagagagaagaaaaggtgcaagttgcttggaaagagttcaaggaagagacaagattgttcatcatctgatactgagaaatattccatgaaagaagatggttgtaactcttctgataagagactgaaaagaatagaattgagggaaagaagaaatttaagttcaaagagaaatactaaggaaatacaaagtggctcatcatcatctgatgctgaggaaagttctgaagataataaaaagaagaagcaaagaacttcatctaaaaagaaggcagtcattgtcaaggagaaaaagagaaactccctaagaacaagcactaaaaggaagcaagctgacattacatcctcatcttcttctgatatagaagatgatgatcagaattctataggtgagggaagcagcgatgaacagaaaattaagcctgtgactgaaaatttagtgctgtcttcacatactggattttgccaatcttcaggagatgaagccttatctaaatcagtgcctgtcacagtggatgatgatgatgacgacaatgatcctgagaatagaattgccaagaagatgcttttagaagaaattaaagccaatctttcctctgatgaggatggatcttcagatgatgagccagaagaagggaaaaaaagaactggaaaacaaaatgaagaaaacccaggagatgaggaagcaaaaaatcaagtcaattctgaatcagattcagattctgaagaatctaagaagccaagatacagacataggcttttgcggcacaaattgactgtgagtgacggagaatctggagaagaaaaaaagacaaagcctaaagagcataaagaagtcaaaggcagaaacagaagaaaggtgagcagtgaagattcagaagattctgattttcaggaatcaggagttagtgaagaagttagtgaatccgaagatgaacagcggcccagaacaaggtctgcaaagaaagcagagttggaagaaaatcagcggagctataaacagaaaaagaaaaggcgacgtattaaggttcaagaagattcatccagtgaaaacaagagtaattctgaggaagaagaggaggaaaaagaagaggaggaggaagaggaggaggaggaggaagaggaggaggaagatgaaaatgatgattccaagtctcctggaaaaggcagaaagaaaattcggaagattcttaaagatgataaactgagaacagaaacacaaaatgctcttaaggaagaggaagagagacgaaaacgtattgctgagagggagcgtgagcgagaaaaattgagagaggtgatagaaattgaagatgcttcacccaccaagtgtccaataacaaccaagttggttttagatgaagatgaagaaaccaaagaacctttagtgcaggttcatagaaatatggttatcaaattgaaaccccatcaagtagatggtgttcagtttatgtgggattgctgctgtgagtctgtgaaaaaaacaaagaaatctccaggttcaggatgcattcttgcccactgtatgggccttggtaagactttacaggtggtaagttttcttcatacagttcttttgtgtgacaaactggatttcagcacggcgttagtggtttgtcctcttaatactgctttgaattggatgaatgaatttgagaagtggcaagagggattaaaagatgatgagaagcttgaggtttctgaattagcaactgtgaaacgtcctcaggagagaagctacatgctgcagaggtggcaagaagatggtggtgttatgatcataggctatgagatgtatagaaatcttgctcaaggaaggaatgtgaagagtcggaaacttaaagaaatatttaacaaagctttggttgatccaggccctgattttgttgtttgtgatgaaggccatattctaaaaaatgaagcatctgctgtttctaaagctatgaattctatacgatcaaggaggaggattattttaacaggaacaccacttcaaaataacctaattgagtatcattgtatggttaattttatcaaggaaaatttacttggatccattaaggagttcaggaatagatttataaatccaattcaaaatggtcagtgtgcagattctaccatggtagatgtcagagtgatgaaaaaacgtgctcacattctctatgagatgttagctggatgtgttcagaggaaagattatacagcattaacaaaattcttgcctccaaaacacgaatatgtgttagctgtgagaatgacttctattcagtgcaagctctatcagtactacttagatcacttaacaggtgtgggcaataatagtgaaggtggaagaggaaaggcaggtgcaaagcttttccaagattttcagatgttaagtagaatatggactcatccttggtgtttgcagctagactacattagcaaagaaaataagggttattttgatgaagacagtatggatgaatttatagcctcagattctgatgaaacctccatgagtttaagctccgatgattatacaaaaaagaagaaaaaagggaaaaaggggaaaaaagatagtagctcaagtggaagtggcagtgacaatgatgttgaagtgattaaggtctggaattcaagatctcggggaggtggtgaaggaaatgtggatgaaacaggaaacaatccttctgtttctttaaaactggaagaaagtaaagctacttcttcttctaatccaagcagcccagctccagactggtacaaagattttgttacagatgctgatgctgaggttttagagcattctgggaaaatggtacttctctttgaaattcttcgaatggcagaggaaattggggataaagtccttgttttcagccagtccctcatatctctggacttgattgaagattttcttgaattagctagtagggagaagacagaagataaagataaaccccttatttataaaggtgaggggaagtggcttcgaaacattgactattaccgtttagatggttccactactgcacagtcaaggaagaagtgggctgaagaatttaatgatgaaactaatgtgagaggacgattatttatcatttctactaaagcaggatctctaggaattaatctggtagctgctaatcgagtaattatattcgacgcttcttggaatccatcttatgacatccagagtatattcagagtttatcgctttggacaaactaagcctgtttatgtatataggttcttagctcagggaaccatggaagataagatttatgatcggcaagtaactaagcagtcactgtcttttcgagttgttgatcagcagcaggtggagcgtcattttactatgaatgagcttactgaactttatacttttgagccagacttattagatgaccctaattcagaaaagaagaagaagagggatactcccatgctgccaaaggataccatacttgcagagctccttcagatacataaagaacacattgtaggataccatgaacatgattctcttttggaccacaaagaagaagaagagttgactgaagaagaaagaaaagcagcttgggctgagtatgaagcagagaagaagggactgaccatgcgtttcaacataccaactgggaccaatttaccccctgtcagtttcaactctcaaactccttatattcctttcaatttgggagccctgtcagcaatgagtaatcaacagctggaggacctcattaatcaaggaagagaaaaagttgtagaagcaacaaacagtgtgacagcagtgaggattcaacctcttgaggatataatttcagctgtatggaaggagaacatgaatctctcagaggcccaagtacaggcgttagcattaagtagacaagccagccaggagcttgatgttaaacgaagagaagcaatctacaatgatgtattgacaaaacaacagatgttaatcagctgtgttcagcgaatacttatgaacagaaggctccagcagcagtacaatcagcagcaacagcaacaaatgacttatcaacaagcaacactgggtcacctcatgatgccaaagcccccaaatttgatcatgaatccttctaactaccagcagattgatatgagaggaatgtatcagccagtggctggtggtatgcagccaccaccattacagcgtgcaccacccccaatgagaagcaaaaatccaggaccttcccaagggaaatcaatgtgattttgcactaaaagcttaatggattgttaaaatcatagaaagatcttttatttctttaggaatcaatgacttaacagaactcaactgtataaatagtttggtccccttaaatgccaatcttccatattagttttacttttttttttttttaaatagggcataccatttcttcctgacatttgtcagtgatgttgcctagaatcttcttacacacgctgagtacagaagatatttcaaattgttttcagtgaaaacaagtccttccataatagtaacaactccacagatttcctctctaaatttttatgcctgcttttagcaaccataaaattgtcataaaattaataaatttaggaaagaataaagatttatatattcattctttacatataaaaacacacagctgagttcttagagttgattcctcaagttatgaaatacttttgtacttaatccatttcttgattaaagtgattgaaatggttttaatgttcttttgactgaagtctgaaactgggctcctgctttattgtctctgtgactgaaagttagaaactgagggttatctttgacacagaattgtgtgcaatattcttaaatactactgctctaaaagttggagaagtcttgcagttatcttagcattgtataaacagccttaagtatagcctaagaagagaattcctttttcttctttagtccttctgccattttttattttcagttatatgtgctgaaataattactggtaaaatttcagggttgtggattatcttccacacatgaattttctctctcctggcacgaatataaagcacatctcttaactgcatggtgccagtgctaatgcttcatcctgttgctggcagtgggatgtggacttagaaaatcaagttctagcattttagtaggttaacactgaagttgtggttgttaggttcacaccctgttttataaacaacatcaaaatggcagaaccattgctgactttaggttcacatgaggaatgtacttttaacaattcccagtactatcagtattgtgaaataattcctctgaaagataagaatcactggcttctatgcgcttcttttctctcatcatcatgttcttttaccccagtttccttacatttttttaaattgtttcagagtttgttttttttttagtttagattgtgaggcaattattaaatcaaaattaattcatccaatacccctttactagaagttttactagaaaatgtattacattttattttttcttaatccagttctgcaaaaatgacctataaatttattcatgtacaattttggttacttgaattgttaaagaaaacattgtttttgactatgggagtcaactcaacatggcagaaccatttttgagatgatgatacaacaggtagtgaaacagcttaagaattccaaaaaaaaaaaaaaaaaaaaaaaaaaagaaaactgggtttgggctttgctttaggtatcactggattagaatgagtttaacattagctaaaactgctttgagttgtttggatgattaagagattgccatttttatcttggaagaactagtggtaaaacatccaagagcactaggattgtgatacagaatttgtgaggtttggtggatccacgcccctctcccccactttcccatgatgaaatatcactaataaatcctgtatatttagatattatgctagccatgtaatcagatttatttaattgggtggggcaggtgtgtatttactttagaaaaaatgaaaaagacaagatttatgagaaatatttgaaggcagtacactctggccaactgttaccagttggtatttctacaagttcagaatattttaaacctgatttactagacctgggaattttcaacatggtctaattatttactcaaagacatagatgtgaaatttaggcaaccttctaaatcttttcaccatggatgaaactataacttaaagataatacttagaagggttaattggaaatcagagtttgaaataaaacttggaccactttgtatacactcttctcacttgacattttagctatataatatgtactttgagtataacatcaagctttaacaaatatttaaagacaaaaaaatcacgtcagtaaaatactaaaaggctcatttttatatttgttttagatgttttaaatagttgcaatggattaaaaatgatgatttaaaatgttgcttgtaatacagttttgcctgctaaattctccacattttgtaacctgttttatttctttgggtgtaaagcgtttttgcttagtattgtgatattgtatatgttttgtcccagttgtatagtaatgtttcagtccatcatccagctttggctgctgaaatcatacagctgtgaagacttgcctttgtttctgttagactgcttttcagttctgtattgagtatcttaagtactgtagaaaagatgtcacttcttcctttaaggctgttttgtaatatatataaggactggaattgtgtttttaaagaaaagcattcaagtatgacaatatactatctgtgttttcaccattcaaagtgctgtttagtagttgaaacttaaactatttaatgtcatttaataaagtgaccaaaatgtg

SEQ ID NO: 12475 - DNA, 6266 bp, Homo sapiens
cgttgtttggcgtgtttttttttttgttttttgtcactgcctgcctgggtcctgcccgaggtctccatcctcggtttccctgtccttgccccgggccctgggagtgctctggaaggctgcgcagtattggaggggacagaatgaccttccggccttgagtccctggggagcagatggaccctactggaagtcagttggattcagatttctctcagcaagatactccttgcctgataattgaagattctcagcctgaaagccaggttctagaggatgattctggttctcacttcagtatgctatctcgacaccttcctaatctccagacgcacaaagaaaatcctgtgttggatgttgtgtccaatcctgaacaaacagctggagaagaacgaggagacggtaatagtgggttcaatgaacatttgaaagaaaacaaggttgcagaccctgtggattcttctaacttggacacatgtggttccatcagtcaggtcattgagcagttacctcagccaaacaggacaagcagtgttctgggaatgtcagtggaatctgctcctgctgtggaggaagagaagggagaagagttggaacagaaggagaaagagaaggaagaagatacttcaggcaatactacacattcccttggtgctgaagatactgcctcatcacagttgggttttggggttctggaactctcccagagccaggatgttgaggaaaatactgtgccatatgaagtggacaaagagcagctacaatcagtaaccaccaactctggttataccaggctgtctgatgtggatgctaatactgcaattaagcatgaagaacagtccaacgaagatatccccatagcagaacagtccagcaaggacatccctgtgacagcacagcccagtaaggatgtacatgttgtaaaagagcaaaatccaccacctgcaaggtcagaggacatgccttttagccccaaagcatctgttgctgctatggaagcaaaagaacagttgtctgcacaagaacttatggaaagtggactgcagattcagaagtcaccagagcctgaggttttgtcaactcaggaagacttgtttgaccagagcaataaaacagtatcttctgatggttgctctactccttcaagggaggaaggtgggtgttctttggcttccactcctgccaccactctgcatctcctgcagctctctggtcagaggtcccttgttcaggacagtctttccacgaattcttcagatcttgttgctccttctcctgatgctttccgatctactccttttatcgttcctagcagtcccacagagcaagaagggagacaagataagccaatggacacgtcagtgttatctgaagaaggaggagagccttttcagaagaaacttcaaagtggtgaaccagtggagttagaaaacccccctctcctgcctgagtccactgtatcaccacaagcctcaacaccaatatctcagagcacaccagtcttccctcctgggtcacttcctatcccatcccagcctcagttttctcatgacatttttattccttccccaagtctggaagaacaatcaaatgatgggaagaaagatggagatatgcatagttcatctttgacagttgagtgttctaaaacttcagagattgaaccaaagaattcccctgaggatcttgggctatctttgacaggggattcttgcaagttgatgctttctacaagtgaatatagtcagtccccaaagatggagagcttgagttctcacagaattgatgaagatggagaaaacacacagattgaggatacggaacccatgtctccagttctcaattctaaatttgttcctgctgaaaatgatagtatcctgatgaatccagcacaggatggtgaagtacaactgagtcagaatgatgacaaaacaaagggagatgatacagacaccagggatgacattagtattttagccactggttgcaagggcagagaagaaacggtagcagaagatgtttgtattgatctcacttgtgattcggggagtcaggcagttccgtcaccagctactcgatctgaggcactttctagtgtgttagatcaggaggaagctatggaaattaaagaacaccatccagaggaggggtcttcagggtctgaggtggaagaaatccctgagacaccttgtgaaagtcaaggagaggaactcaaagaagaaaatatggagagtgttccgttgcacctttctctgactgaaactcagtcccaagggttgtgtcttcaaaaggaaatgccaaaaaaagaatgctcagaagctatggaagttgaaaccagtgtgattagtattgattcccctcaaaagttggcaatacttgaccaagaattggaacataaggaacaggaagcttgggaagaagctacttcagaggactccagtgttgtcattgtagatgtgaaagagccatctcccagagttgatgtttcttgtgaacctttggagggagtggagaagtgctcagattcccagtcatgggaggatattgctccagaaatagaaccatgtgctgagaatagattagacaccaaggaagaaaagagtgtagaatatgaaggagatctgaaatcagggactgcagaaacagaacctgtagagcaagattcttcacagccttccttacctttagtgagagcagatgatcctttaagacttgaccaggagttgcagcagccccaaactcaggagaaaacaagtaattcattaacagaagactcaaaaatggctaatgcaaagcagctaagctcagatgcagaggcccagaagctggggaagccctctgcccatgcctcacaaagcttctgtgaaagttctagtgaaaccccatttcatttcactttgcctaaagaaggtgatatcatcccaccattgactggtgcaaccccacctcttattgggcacctaaaattggagcccaagagacacagtactcctattggtattagcaactatccagaaagcaccatagcaaccagtgatgtcatgtctgaaagcatggtggagacccatgatcccatacttgggagtggaaaaggggattctggggctgccccagacgtggatgataaattatgtctaagaatgaaactggttagtcctgagactgaggcgagtgaagagtctttgcagttcaacctggaaaagcctgcaactggtgaaagaaaaaatggatctactgctgttgctgagtctgttgccagtccccagaagaccatgtctgtgttgagctgtatctgtgaagccaggcaagagaatgaggctcgaagtgaggatccccccaccacacccatcagggggaacttgctccactttccaagttctcaaggagaagaggagaaagaaaaattggagggtgaccatacaatcaggcagagtcaacagcctatgaagcccattagtcctgtcaaggaccctgtttctcctgcttcccagaagatggtcatacaagggccatccagtcctcaaggagaggcaatggtgacagatgtgctagaagaccagaaagaaggacggagtactaataaggaaaatcctagtaaggccttgattgaaaggcccagccaaaataacataggaatccaaaccatggagtgttccttgagggtcccagaaactgtttcagcagcaacccagactataaagaatgtgtgtgagcaggggaccagtacagtggaccagaactttggaaagcaagatgccacagttcagactgagagggggagtggtgagaaaccagtcagtgctcctggggatgatacagagtcgctccatagccagggagaagaagagtttgatatgcctcagcctccacatggccatgtcttacatcgtcacatgagaacaatccgggaagtacgcacacttgtcactcgtgtcattacagatgtgtattatgtggatggaacagaagtagaaagaaaagtaactgaggagactgaagagccaattgtagagtgtcaggagtgtgaaactgaagtttccccttcacagactgggggctcctcaggtgacctgggggatatcagctccttctcctccaaggcatccagcttacaccgcacatcaagtgggacaagtctctcagctatgcacagcagtggaagctcagggaaaggagccggaccactcagagggaaaaccagcgggacagaacccgcagattttgccttacccagctcccgaggaggcccaggaaaactgagtcctagaaaaggggtcagtcagacagggacgccagtgtgtgaggaggatggtgatgcaggccttggcatcagacagggagggaaggctccagtcacgcctcgtgggcgtgggcgaaggggccgcccaccttctcggaccactggaaccagagaaacagctgtgcctggccccttgggcatagaggacatttcacctaacttgtcaccagatgataaatccttcagccgtgtcgtgccccgagtgccagactccaccagacgaacagatgtgggtgctggtgctttgcgtcgtagtgactctccagaaattcctttccaggctgctgctggcccttctgatggcttagatgcctcctctccaggaaatagctttgtagggctccgtgttgtagccaagtggtcatccaatggctacttttactctgggaaaatcacacgagatgtcggagctgggaagtataaattgctctttgatgatgggtacgaatgtgatgtgttgggcaaagacattctgttatgtgaccccatcccgctggacactgaagtgacggccctctcggaggatgagtatttcagtgcaggagtggtgaaaggacataggaaggagtctggggaactgtactacagcattgaaaaagaaggccaaagaaagtggtataagcgaatggctgtcatcctgtccttggagcaaggaaacagactgagagagcagtatgggcttggcccctatgaagcagtaacacctcttacaaaggcagcagatatcagcttagacaatttggtggaagggaagcggaaacggcgcagtaacgtcagctccccagccacccctactgcctccagtagcagcagcacaacccctacccgaaagatcacagaaagtcctcgtgcctccatgggagttctctcaggcaaaagaaaacttatcacttctgaagaggaacggtcccctgccaagcgaggtcgcaagtctgccacagtaaaacctggtgcagtaggggcaggagagtttgtgagcccctgtgagagtggagacaacaccggtgaaccctctgccctggaagagcagagagggcctttgcctctcaacaagaccttgtttctgggctacgcatttctccttaccatggccacaaccagtgacaagttggccagccgctccaaactgccagatggtcctacaggaagcagtgaagaagaggaggaatttttggaaattcctcctttcaacaagcagtatacagaatcccagcttcgagcaggagctggctatatccttgaagatttcaatgaagcccagtgtaacacagcttaccagtgtcttctaattgcggatcagcattgtcgaacccggaagtacttcctgtgccttgccagtgggattccttgtgtgtctcatgtctgggtccatgatagttgccatgccaaccagctccagaactaccgtaattatctgttgccagctgggtacagccttgaggagcaaagaattctggactggcaaccccgtgaaaatcctttccagaatctgaaggtactcttggtatcagaccaacagcagaacttcctggagctctggtctgagatcctcatgactggtggtgcagcctctgtgaagcagcaccattcaagtgcccataacaaagatattgctttaggggtatttgatgtggtggtgacggacccctcatgcccagcctcggtgctgaagtgtgctgaagcattgcagctgcctgtggtgtcacaagagtgggtgatccagtgcctcattgttggggagagaattggattcaagcagcatccaaaatataaacacgattatgtttctcactaaagatacttggtcttactggttttattccctgctatcgtggagattgtgttttaaccaggttttaaatgtgtcttgtgtgtaactggattccttgcatggatcttgtatatagttttatttgctgaacttttatgataaaataaatgttgaatctctttggttgtagtaactggg

SEQ ID NO: 12476 - DNA, 3922 bp, Homo sapiens
agatgaagaccagggagaggaaagggtggacctgaggcccccatggagaagggacgggcaggatgtatgtcaccacgccgactgccagcagctgcaccgccgggggcccctcaacctctgcgaggcctgtgacagcaagttccacagcaccatgcattatgatgggcatgtccgcttcgaccttcccccacaaggctctgtgctggcccggaacgtgtccacccggtcatgcccgccgcgcaccagccccgcagtggacttggaggaggaggaggaggagagctctgtggatggcaaaggggaccggaagagcacaggcctgaaactctccaagaagaaagcaaggaggagacacacggatgacccaagcaaggaatgcttcactctgaaatttgacctgaatgtggacattgagacagagatcgtcccagccatgaagaagaagtcactgggggaggtgctgctgcctgtatttgaaaggaagggcattgcgctgggcaaagtggacatctacctggaccagtccaacacacccctgtccctcaccttcgaggcctacaggttcgggggacactaccttcgtgtcaaagccccagccaagcctggagatgagggcaaggtggagcagggcatgaaggactccaagtccctgagtttgccgattctgcggccagctgggaccgggccccccgccctggagcgtgtggacgcccagagccgccgggagagcctggacatcttggcccctggccgccgccgcaagaacatgtcggagttcctgggggaggcgagcatccccgggcaggagccccccacgccctccagctgctctctgcccagcggcagcagtggcagcaccaacactggcgacagctggaagaaccgggcggccagtcgcttcagcggctttttcagctccggccccagcaccagcgcctttggccgggaggtagacaagatggagcagctggagggcaagctgcacacctacagcctcttcgggctgcccaggctgccccgggggctgcgcttcgaccatgactcctgggaggaggagtacgatgaagacgaggatgaggacaatgcctgcctgaggctggaggacagctggcgggagctcattgatgggcatgagaagctgacccggcggcagtgccaccagcaggaggcggtgtgggagctgctgcacacggaggcctcctacatcaggaaactgcgggtgatcatcaacctgttcctgtgctgcctcctgaacctgcaagagtcagggctgctgtgtgaggtggaggcggagcgcctgttcagcaacatcccggagatcgcgcagctgcaccgcaggctgtgggctagcgtgatggcgccggtgctggagaaggcgcggcgcacgcgagcgctgctacagcccggggacttcctcaaaggcttcaagatgttcggctcgctcttcaagccctacatccgctactgcatggaggaggagggctgcatggagtacatgcgcggcctgctgcgcgacaacgacctcttccgggcctacatcacgtgggcggagaagcacccacagtgccagaggctgaagctgagcgacatgctggccaaaccccaccagcggctcaccaagtacccgctgctgctcaagtcggtgctgaggaagaccgaggagccgcgcgccaaggaggccgtcgtcgccatgatcggctccgtggagcgcttcatccaccacgtgaacgcgtgcatgcggcagcggcaggagcggcagcggctggcggccgtggtgagccgcatcgacgcctacgaggtggtggaaagcagcagcgacgaagtggacaagctcctgaaggaatttctgcacctggacttgacagcgcccatccctggcgcctccccggaggagacgcggcagctgctgctggaggggagcctgaggatgaaggaggggaaggacagcaagatggatgtgtactgcttcctcttcacggatctgctgttggtgaccaaagcagtgaagaaggcagagaggaccagggtcatcaggccacccctgctcgtggacaagattgtgtgccgggagctacgggaccctgggtccttcctccttatctacctgaatgagtttcacagtgctgtaggggcctacacgttccaggccagtggccaggccttgtgccgtggctgggtggacaccatttacaatgcccagaaccagctgcaacagctgcgtgcacaggagcccccaggcagtcagcagcccctgcagagcctggaagaggaggaggatgagcaggaggaggaagaggaggaggaggaggaggaggaggaaggcgaggacagtggcacttcagctgccagctcccctaccatcatgcggaaaagcagcggcagccccgactctcagcactgtgcctcagatggctccacggagaccctggccatggttgtggtagagcctggggacacgctgtcctcccccgagttcgacagcggtcctttcagctcccagtctgatgagacctctctcagcaccactgcctcatctgccacgcccaccagtgagctgctgcccctgggtccggtggacggccgctcctgctccatggactctgcctacggcaccctctccccaacctccttacaagactttgtggccccaggcccaatggcagagctagtgcctcgggccccagagtccccacgagttccttcccctccaccctcgccccgtctccgccgccgcacccctgtccagctgttgagctgcccgccccacctgctcaagtctaagtccgaggccagcctcctccagctgctggcaggggctggcacccatgggacaccctctgcccccagccgcagcctgtcagagctctgcctggctgttccagccccaggtattaggactcagggctcccctcaggaagctgggcccagctgggattgccgaggggcccctagccctggcagcggtcctgggctagtcggctgcctggccggggaacctgcaggctcccacaggaagaggtgtggagacctgccctcgggggcctctcccagggtccagcctgagcccccaccaggggtctctgcccagcacaggaagctgaccctggcccagctctaccgaatcaggaccaccctgctgcttaactccacgctcactgcctcggaggtctgagcagagggaggcccccaagagtgccattgaccaagagacagcagacagcctgcctcctggggcgtgccggcacctgcttcagctactgcctcctgtatgcatgagccggatgctgggcaggatccctgcctacgcccgggcccgatttgcgctttgccggactggatggagtggaggaggcccaggccacagtaccaccccacctgcccaggcagcccctcgtcacctactccccgaagttaccagctcagctcgagtcttcagggctgggctcctaggctgcccatcctacttctaccctcactggcctccagtgggattcactcctgccctgcccccaccttcccagtcccacaggccacccctggcttgggctgggttctgtgaagttacgtatttattgagcttttggttcttttataaagacttgtctagactccactgggaagagtcctttgctttggggcccagtgactcggggcacttgagttcagggcggcctccttgtgttcctgtgctcctccacttgccacggatgggccacggatggagcttgccatgggaagcactgggaagtaatggggtgtggggtgccaccagaccaacacccccagacttccccaccttcagccaccatcagagcctctccccaggtgccccccggggattcagggctgaatctgcccagttcccacactcaggccagccctcttgggaaggtgggtcctccatgggggtcccttcaggaac

SEQ ID NO: 12477 - DNA, 4498 bp, Homo sapiens
aaactaaggccttcctggtagccaaggagcccagcagaggggctgctgctggctgctgggattgcagaggccggggtctctgtggtgttgctttcctggaaaggagggacggcacctccagggcagccagcagtgtgggagcccattccagggcgcaaatgggcactcaggaatggaaaatccaagaaggaaccaaccaccaacaaggaaatgcagtgtgagcggcagctgcgaagtctgtgccttcaaatatacagcgcccaggggacctgtgttggacggggagcaaattggcagggctgagagcgccttggttttctgtgcagacaggtccagctgcagaaattaagactggggctgagtcggggagaagccttccatgttgagatggcaactgggcaaagcaggacggagacctgtgtgtctgattagagaggcctgtggcattggcatgtggctggaagtccaggcagggtgccaccaccgcagaggtcaagcatgaattcagtcctgacaaaacatgggtctccacctcgaagctggctcagcctttgttcaggaaccgacgaccagagccccgctgaaaagaagggactgcgctgtcagaaccccgcctgcatggacaaggggcgggcggccaaggtatgtcaccacgccgactgccagcagctgcaccgccgggggcccctcaacctctgcgaggcctgtgacagcaagttccacagcaccatgcattatgatgggcatgtccgcttcgaccttcccccacaaggctctgtgctggcccggaacgtgtccacccggtcatgcccgccgcgcaccagccccgcagtggacttggaggaggaggaggaggagagctctgtggatggcaaaggggaccggaagagcacaggcctgaaactctccaagaagaaagcaaggaggagacacacggatgacccaagcaaggaatgcttcactctgaaatttgacctgaatgtggacattgagacagagatcgtcccagccatgaagaagaagtcactgggggaggtgctgctgcctgtatttgaaaggaagggcattgcgctgggcaaagtggacatctacctggaccagtccaacacacccctgtccctcaccttcgaggcctacaggttcgggggacactaccttcgtgtcaaagccccagccaagcctggagatgagggcaaggtggagcagggcatgaaggactccaagtccctgagtttgccgattctgcggccagctgggaccgggccccccgccctggagcgtgtggacgcccagagccgccgggagagcctggacatcttggcccctggccgccgccgcaagaacatgtcggagttcctgggggaggcgagcatccccgggcaggagccccccacgccctccagctgctctctgcccagcggcagcagtggcagcaccaacactggcgacagctggaagaaccgggcggccagtcgcttcagcggctttttcagctccggccccagcaccagcgcctttggccgggaggtagacaagatggagcagctggagggcaagctgcacacctacagcctcttcgggctgcccaggctgccccgggggctgcgcttcgaccatgactcctgggaggaggagtacgatgaagacgaggatgaggacaatgcctgcctgaggctggaggacagctggcgggagctcattgatgggcatgagaagctgacccggcggcagtgccaccagcaggaggcggtgtgggagctgctgcacacggaggcctcctacatcaggaaactgcgggtgatcatcaacctgttcctgtgctgcctcctgaacctgcaagagtcagggctgctgtgtgaggtggaggcggagcgcctgttcagcaacatcccggagatcgcgcagctgcaccgcaggctgtgggctagcgtgatggcgccggtgctggagaaggcgcggcgcacgcgagcgctgctacagcccggggacttcctcaaaggcttcaagatgttcggctcgctcttcaagccctacatccgctactgcatggaggaggagggctgcatggagtacatgcgcggcctgctgcgcgacaacgacctcttccgggcctacatcacgtgggcggagaagcacccacagtgccagaggctgaagctgagcgacatgctggccaaaccccaccagcggctcaccaagtacccgctgctgctcaagtcggtgctgaggaagaccgaggagccgcgcgccaaggaggccgtcgtcgccaatcggctccgtggagcgcttcatccaccacgtgaacgcgtgcatgcggcagcggcaggagcggcagcggctggcggccgtggtgagccgcatcgacgcctacgaggtggtggaaagcagcagcgacgaagtggacaagctcctgaaggaatttctgcacctggacttgacagcgcccatccctggcgcctccccggaggagacgcggcagctgctgctggaggggagcctgaggatgaaggaggggaaggacagcaagatggatgtgtactgcttcctcttcacggatctgctgttggtgaccaaagcagtgaagaaggcagagaggaccagggtcatcaggccacccctgctcgtggacaagattgtgtgccgggagctacgggaccctgggtccttcctccttatctacctgaatgagtttcacagtgctgtaggggcctacacgttccaggccagtggccaggccttgtgccgtggctgggtggacaccatttacaatgcccagaaccagctgcaacagctgcgtgcacaggagcccccaggcagtcagcagcccctgcagagcctggaagaggaggaggatgagcaggaggaggaagaggaggaggaggaggaggaggaggaaggcgaggacagtggcacttcagctgccagctcccctaccatcatgcggaaaagcagcggcagccccgactctcagcactgtgcctcagatggctccacggagaccctggccatggttgtggtagagcctggggacacgctgtcctcccccgagttcgacagcggtcctttcagctcccagtctgatgagacctctctcagcaccactgcctcatctgccacgcccaccagtgagctgctgcccctgggtccggtggacggccgctcctgctccatggactctgcctacggcaccctctccccaacctccttacaagactttgtggccccaggcccaatggcagagctagtgcctcgggccccagagtccccacgagttccttcccctccaccctcgccccgtctccgccgccgcacccctgtccagctgttgagctgcccgccccacctgctcaagtctaagtccgaggccagcctcctccagctgctggcaggggctggcacccatgggacaccctctgcccccagccgcagcctgtcagagctctgcctggctgttccagccccaggtattaggactcagggctcccctcaggaagctgggcccagctgggattgccgaggggcccctagccctggcagcggtcctgggctagtcggctgcctggccggggaacctgcaggctcccacaggaagaggtgtggagacctgccctcgggggcctctcccagggtccagcctgagcccccaccaggggtctctgcccagcacaggaagctgaccctggcccagctctaccgaatcaggaccaccctgctgcttaactccacgctcactgcctcggaggtctgagcagagggaggcccccaagagtgccattgaccaagagacagcagacagcctgcctcctggggcgtgccggcacctgcttcagctactgcctcctgtatgcatgagccggatgctgggcaggatccctgcctacgcccgggcccgatttgcgctttgccggactggatggagtggaggaggcccaggccacagtaccaccccacctgcccaggcagcccctcgtcacctactccccgaagttaccagctcagctcgagtcttcagggctgggctcctaggctgcccatcctacttctaccctcactggcctccagtgggattcactcctgccctgcccccaccttcccagtcccacaggccacccctggcttgggctgggttctgtgaagttacgtatttattgagcttttggttcttttataaagacttgtctagactccactgggaagagtcctttgctttggggcccagtgactcggggcacttgagttcagggcggcctccttgtgttcctgtgctcctccacttgccacggatgggccacggatggagcttgccatgggaagcactgggaagtaatggggtgtggggtgccaccagaccaacacccccagacttccccaccttcagccaccatcagagcctctccccaggtgccccccggggattcagggctgaatctgcccagttcccacactcaggccagccctcttgggaaggtgggtcctccatgggggtcccttcaggaac

SEQ ID NO: 12478 - DNA, 3216 bp, Homo sapiens
gggcgcgcggctgcagcggcggagccggagtcggagccgggagcgctagcggcagccggatcgcagcctgcggggcccgccgcagccatgggcaaccgcggcatggaagatctcatcccgctggtcaaccggctgcaagacgccttctctgccatcggccagaacgcggacctcgacctgccgcagatcgctgtggtgggcggccagagcgccggcaagagctcggtgctcgagaatttcgtaggcagggacttcttgcctcgaggatctggcattgtcacccgacgtcccctggtcttgcagctggtcaatgcaaccacagaatatgccgagttcctgcactgcaagggaaagaaattcaccgacttcgaggaggtgcgccttgagatcgaggccgagaccgacagggtcaccggcaccaacaagggcatctcgccggtgcctatcaacctccgcgtctactcgccgcacgtgctgaacctgaccctggtggacctgcccggaatgaccaaggtcccggtgggggaccaacctcccgacatcgagttccagatccgagacatgcttatgcagtttgtcaccaaggagaactgcctcatcctggccgtgtcccccgccaactctgacctggccaattctgacgccctcaaggtcgccaaggaggtggacccccagggccagcgcaccatcggggtcatcaccaagctggacctgatggacgagggcacagatgcccgtgatgtgctggagaacaagctgctccccctgcgcagaggctacattggagtggtgaaccggagccagaaggacattgatggcaagaaggacattaccgccgccttggctgctgaacgaaagttcttcctctcccatccatcttatcgccacttggctgaccgtatgggcacgccctacctgcagaaggtcctcaatcagcaactgacgaaccacatccgggacacactgccggggctgcggaacaagctgcagagccagctactgtccattgagaaggaggtggaggaatacaagaacttccgccctgatgacccagctcgcaagaccaaggccctgctgcagatggtccagcagttcgccgtagactttgagaagcgcattgagggctcaggagatcagatcgacacctacgaactgtcagggggagcccgcattaaccgaatcttccacgagcgcttccctttcgagctggtcaagatggagtttgatgagaaggaactccgaagggagatcagctatgctatcaagaatatccatggcattagaacggggctgtttaccccagacatggcctttgagaccattgtgaaaaagcaggtgaagaagatccgagaaccgtgtctcaagtgtgtggacatggttatctcggagctaatcagcaccgttagacagtgcaccaagaagctccagcagtacccgcggctacgggaggagatggagcgcatcgtgaccacccacatccgggagcgcgagggccgcactaaggagcaggtcatgcttctcatcgatatcgagctggcttacatgaacaccaaccatgaggacttcataggctttgccaatgctcagcagaggagcaaccagatgaacaagaagaagacttcagggaaccaggatgagattctggtcatccgcaagggctggctgactatcaataatattggcatcatgaaagggggctccaaggagtactggtttgtgctgactgctgagaatctgtcctggtacaaggatgatgaggagaaagagaagaaatacatgctgtctgtggacaacctcaagctgcgggacgtggagaagggctttatgtcgagcaagcatatctttgccctctttaacacggagcagaggaatgtctacaaggattatcggcagctggagctagcctgtgagacacaggaggaggtggacagctggaaggcctccttcctgagggctggcgtgtaccctgagcgtgttggggacaaagagaaagccagcgagaccgaggagaatggctccgacagcttcatgcattccatggacccacagctggaacggcaagtggagaccatccggaatcttgtggactcatacatggccattgtcaacaagaccgtgagggacctcatgcccaagaccatcatgcacctcatgattaacaataccaaggagttcatcttctcggagctgctggccaacctgtactcgtgtggggaccagaacacgctgatggaggagtcggcggagcaggcacagcggcgcgacgagatgctgcgcatgtaccacgcactgaaggaggcgctcagcatcatcggcgacatcaacacgaccaccgtcagcacgcccatgcccccgcccgtggacgactcctggctgcaggtgcagagcgtaccggccggacgcaggtcgcccacgtccagccccacgccgcagcgccgagcccccgccgtgcccccagcccggcccgggtcgcggggccctgctcctgggcctccgcctgctgggtccgccctggggggggcgccccccgtgccctccaggccgggggcttcccctgaccctttcggccctccccctcaggtgccctcgcgccccaaccgcgccccgcccggggtccccagccgatcgggtcaggcaagtccatcccgtcctgagagccccaggccccccttcgacctctaaacagatccctcctcttctcggagacctccctttccaagcctgcctggacggctgttctgtgacttgacagtggctcccccagccccaaagccagcccccttcatctgtgacttaatctgttgtagtggtgagctgatacattcaggtgtgaccgttggtgaaaacttgtgccccttctgtggtatgcccttgccctgttctataaatatctataaatactcatatatatacacacctacacatggccaaccgcctcgcctctagcgctgggaatcagtcactgtgctatccttgtggagtcttgtggcccaactaccagagaacgctgtcccccgacatcccactccaaagtgtgccacctccagtgagcctccttgtcatgcccggcctgtggacagccagcccccgccatccctcccaccccctaccaagcatgggggtgctgtgcaggcagccgtgtggcctgacagtttctaccagtcctgctgtccctcggctgagaataaaacccatttctggatgatggggaatgtc

SEQ ID NO: 12479 - DNA, 2193 bp, Homo sapiens
atgtctaagaactcagagttcatcaatctgtcatttttattagatcatgagaaggaaatgatcctgggcgtcctaaagagagatgaatatttgaaaaaagtggaggacaagagaataaggaagctgaaaaatgaactcttagaagcaaaacgtagaagtgggaaaactcaacaagaggccagcagagtttgtgttcactgtcacagaaacctgggcctaatctttgaccggggagacccttgtcaggcttgctcactgagggtatgcagggagtgtcgagttgcaggccccaatggcagctggaagtgcactgtctgtgacaaaatcgcgcagctaaggattataactggtgagtggttttttgaagaaaaggcaaaacgtttcaagcaagtcaatgttctcggcactgatgttgtccgacagtccattttaagaagaagtccaggagctgaagaagtacagagccaagagcaaacccgccaggatgcagaaaagtcagacacttcacctgttgctgggaagaaggccagccatgatgggcccaagagaaagggatttcttcttagcaagttcagatcggcaaccagaggagaaatcataactcccaaaactgacactgggcggagctatagcttggacttagacggtcaacattttcggagtttaaaatcacctcctggttcagacaggggaagcactggctcatcagatctcaatgaccaggaacctggtcctaggaccccgaagagcagtcggagcaatggtgtgaccccaggcactcagagttcaccagccccaagcacacgaactgtgacctcagtcatcagtagagagtatggttttgaaaattccatggatttggctgctattgaaggtacctctcaggagctcacaaagagtcaccgcagaaacacttctggcacaccttccatagcagtgtctggaacctctctctcctcagatcagagtcgatctgagttagatttgagtgagtcatttacagaagactcagaggatactgtaagcataagaagcaagtctgtccctggggctttagacaaggactccttggaagagactgaagaaagcattgatgccttagtgtcctcgcagttatctacaaacactcaccgtctggcaagtggcctatcaactaccagccttaacagcatgatgagcgtttacagtgaaacgggagactatggcaacgtgaaagtcagtggtgaaatccttctccatatcagctactgctacaaaactggtgggctgtacatttttgtcaagaattgcagaaatctggccataggagatgaaaagaaacagaggacagatgcttatgtcaagtcatatcttcttcctgacaagtcccggaacaacaagcgtaagaccaaaatcagaacaggcaccaatccagaattcaatgaaacactaaagtacactatcagccatacccagctggaaacaagaactctgcagctctcagtctggcactatgatcgatttggacgtaatagcttcctcggggaagtagagattccttttgactcatggaactttgaaaatccaactgatgagtggtttgtgcttcaacccaaggtggagtttgctcctgatattggccttcaatacaaaggagagctgacagttgttttacgttacattcccccagaagagaacctgatgcttccaccagaacaactccaaggaaataagacttttaaaaagggaaagaagaaggagtcacctgtaatctctggaggaatactagaagtgttcatcaaagaggcaaagaatttgacagcagtgaagtcaggaggcacttctgatagctttgtgaagggctacctgctccctgatgatagcaaagccaccaagcacaaaactctggtaataaaaaagagtgttaaccctcagtggaatcatacattcatgttcagtggcatccatccccaggatataaagaatgtttgcctagaacttactatctgggacaaggaggccttttccagcaacatctttctgggaggagttcgtttgaattctggaagtggtgtgagccatgggaagaacgtggattggatggactctcagggggaagagcagcgcctttggcagaagatggccaacaaccctggaactccctttgagggtgtactcatgcttcgttccagcatgggaaaatgtaggctctaa

SEQ ID NO: 12480 - DNA, 7434 bp, Homo sapiens
gctggatcctgcagtaaccacaacagcatcctctccctgcgccagggacctgccagccggagagatgactgattagatcagattagatccggagccccgctctgcagaagggggccccaggggcgggggaggaggaccccagctggcctgagctggggggaggggtgccttggggctcgcagagttagagctttccagcgcggggatcacacctcagaagccgccacaatgaaagacggaacacatttctacacccagtgactggccaggtcccagaggaaaacaaaaaatttgacttgaaaatatcgaccttggacatgtccaataaaacaggtgggaaacgcccggctaccaccaacagtgacatacccaaccacaacatggtgtccgaggtccctccagagcggcccagcgtccgggcaactcgcacagcccgcaaagccgtcgcctttggcaagcgctcacactccatgaagcggaaccccaatgcacctgtcaccaaggcgggctggctcttcaaacaggccagctccggggttaagcagtggaacaagcgctggttcgtcctggtggatcgctgcctcttctactataaagatgagaaggaagagagtatcctgggcagcatccccctcctgagcttccgggtagccgcagtgcagccctcagacaacatcagccggaaacacacgtttaaggctgagcatgccggggtccgcacctacttcttcagtgccgagagccccgaggagcaagaggcctggatccaggccatgggggaggctgctcgagtacagatccctccagcccagaagtcagtgccccaagctgtgcggcacagccatgagaagccagactcggagaacgtcccacccagcaagcaccaccagcagccaccccacaacagcctccctaagcctgagccagaggccaagactcgaggggagggtgatggccgaggctgtgagaaggcagagagaaggcctgagaggccagaagtcaagaaagagcctccggtgaaagccaatggcctcccagctggaccggagccagcctcagagccgggcagcccttaccccgagggcccaagagtgccagggggtggggaacagcctgcccagcccaatggctggcagtaccactccccaagccggccagggagcacagctttcccgtctcaggatggagagactgggggacaccggcggagtttcccaccacgcaccaaccctgacaaaattgcccagcgcaagagctccatgaaccagcttcagcagtgggtgaatctgcgccggggggtacccccgcctgaagaccttcggagtccctctaggttctatcctgtgtctcgcagggtccctgagtactatggcccctactcctcccagtaccccgatgattatcagtactacccgccaggagtgcggccggagagcatctgttccatgccggcctatgatcggatcagcccgccctgggccctggaggacaagcgccatgccttccgcaatgggggtggccctgcctaccagctgcgagagtggaaggagcccgccagctacgggcggcaggatgccaccgtctggatcccaagcccctcccggcagccagtctattatgatgagctggatgccgcctctagctccctgcgccgcctgtccctgcagccccgctcccactctgtgccccgctcacccagccagggctcctacagccgtgcccgcatttactcccctgtccgctcacccagtgcccgttttgagcggctgccacctcgcagtgaggacatctatgctgaccctgctgcctatgtgatgaggcgatccatcagctcccccaaggtccctccatacccagaagtgttccgggacagcctccacacctacaagttaaacgagcaagacacagataagctgctgggaaaattgtgtgagcagaacaaggtggtgagggagcaggaccggctggtgcagcagctccgagctgagaaggagagcctggaaagtgccttgatggggacccaccaggagctggagatgtttggaagccagcccgcctacccagaaaagctgcgacacaaaaaggattcactgcagaaccagctcatcaacatccgcgtggagctgtctcaggcgaccacggccctgacaaacagcaccatagagtatgagcacctcgagtctgaggtctctgccctgcacgatgacctctgggagcagctcaatttggacacccagaatgaggtgctgaaccggcaaatccaaaaggagatctggaggatccaggacgtgatggaggggctgaggaagaacaacccctcccggggcacggacaccgccaagcacagaggaggacttggcccctcagccacctacagctccaacagcccggccagccccctcagctctgccagcctcaccagccccctgagccccttttcactggtgtcgggctctcaggggtcccccaccaagcctggctccaacgagcccaaggcaaactatgaacaaagcaagaaagacccccaccagacattgcccctggacacccccagagacatcagccttgtgcccaccaggcaagaggtagaggcagagaagcaggcagctctcaacaaagttggcgttgtgccccctcggacaaaatcgcccactgatgatgaggtgaccccatcagcagtggtaagaaggaatgccagtgggctcaccaatggactctcctcccaggaacgccccaagagtgctgtgtttcctggcgaggggaaggtcaagatgagcgtggaggagcagattgaccgaatgcggcggcaccagagtggctccatgagggagaagcggaggagcctgcagctcccggccagcccggcccccgaccccagtccccggccagcctacaaagtggtgcgccgccaccgcagcatccatgaggtagacatctccaacctggaggcagccctgcgggcagaggagcctggcgggcatgcctacgagacaccccgggaggaaattgcccggcttcgcaaaatggagctagagccccagcattatgacgtggacatcaataaggagctctccactccagacaaagtcctcatccctgaacggtacattgacctggagcctgacactcccctgagccctgaggagttgaaggagaagcagaagaaggtggagaggatcaagacactcattgccaaatccagtatgcagaacgtggtgcccatcggcgagggggactctgtggacgtgccccaggactcagagagccagctgcaggagcaggagaagcggattgaaatctcctgcgccctggcgaccgaggcctcccgcaggggccgcatgctgtctgtgcaatgtgccaccccaagccctcccacctcccctgcttccccggctcctccagcaaaccccctgtcgtctgaatccccacggggcgccgacagcagctataccatgcgggtctgagctctgactgcaagccctggctgaggccaatgctgtgaagctccacagagccacattctgaagccgtcctctgcccacctgaggtcctggctccccaccctggccccctgcccctgcactcccatgggaatgccgcagggagccaggctggggccatgggctgctgccagaggaccgtggatacctcagtgtccacacacccaccatgcccagccctggagccatcactactcacaccgtggtcctgggccagggcctgagatgacagtggggagcaccatcctcattaatgtccaagtcacagggagcctcagccttgccctggctggggttgtggtgactccagtggaacattccctgatgggggacatgccgtggtggagaacacacctgtggctatcttatgtgaggactagaggtgaagaggagatggacactgcctctggagccagcctgacaccaaggacagcacttgtcatcatccctatcctcgtcagccccaccctgctgcctcagctggacccagggctttgacacaaacccagtgctttgcttatgggtgctcgctggggtccggtggagactgaccaccctgcttgagccaaagacaaggtgatgagagatggggagaggccattggctcccagagggaacagtgctggctgtggctagagaacagcaggtctgtgcagtgtctgagggcaggttgggaagggtagcagagagagagagacagaaagagagagagagagagagagagagagagatcctcagagtggaaggagggggaagcagcaggacacattggcaagtcaagcaggaaggagggagatggaaaggggatatcagattggtttcccccggtggagccttaggttagtgcccagtgcagtgccagactgtctcctctgctcctcccacctcatccctaggaggacccaccagtggagcacatgcagcctcagtggagatgcttggtgtggggatctgggtgaagggggttgagtagcgactgcctgggagatggctgttagtaggtctgcgcctggtgtctgcctcgccatcctggggtaaggggcagagagaaggacttgtcttatgtagggtgtggtcagccttggggccttacctacccagttccatgatatttcttgccctgttccccctggaatgtgcagtgggccagctgagagtacgccttgaggaggggggatgaggccttaatctgggaggcctatccccctatcccaggcatcccagacgaggactggctgaggctaggcgctctcatgatccacctgccccgggagggcagcggggaagacagagaaaagcaaacacattcctcctcagctccacccacctggagacgaatgtagccagagaggaggaaggagggaaactgaaaacaccgtggcccctcggccttctctctgctagagttgccgctcagaggcttcagcctgacttccagcggtcccaagaacacctactaattcctctccactccttcatggctgggacagttactggttcatatgcaagtaaagatgacaatttactcaacaaatatttatcgagcaccttttatgtaccaggcactgttgtaggtgcttaggatattctcatgtttctgagggattacagcctgggaggattccaccgatcttcacttctagcaggttttttaaacgtgacccttggctgtatttcccatcttcacagttcaagcaccccaaacctgccctttctcccctgcagactggcaggtgggattggctcccaggtcatttcctctctctctctttctcccaagcctttctccctccacaggaaacagatttttcagggccttccatgcctgccactttgtccgtctctttttttttttttaaagtaatattttttagaaatacatgtaaaataccaagaaataatgtctgcgcctctgccacctctctctcatctcttatttcataaagctggctctttatgttgctttacatgccttaatatatgttttatggagattatacatattatagatctatatatgtaatatatttgtttggatgtctgatcttttcctacagttcctgcccaggcctgtttttctctcccttattttccacatcattcctagcatatcaagaccataccccttgcctttttgatccaaagaaggggagaggaaagacttattttaagacatctattttatgcttttgtttaaaaaaagcaaatctattttcaaattgtgcaatgtctgaatggaattggcaaatgaggtgaggagatggggtaactgcctttaggtcccaaccctgtgcctgtccctctgccacagtggcttccttccatcctattccccagtcacgaaagggctggtccccagagctcacccagaaagcatcttgccgggggcagggcattccctcggaagtcctggcctaaggattttattacactgtctgctcctgatgaccctctgcggttgtcaggcgtgaatcctctggaaggaactgtttgcagttgtatgcacaaaggagacccatgcaggcatgcaccccagatgggctgctagactacccctcttcatcagcctgctggaaagagcagacagcgtaacagcagcctatgccaaacagcactaaggatgtcagtgtacgagacggtgcgaagcccagaggaggcggcttgggatcctctgggccatccctggccctgtagcacagacacatacaagttccttggacttgtcacactccttttcacttgatccctctctggcctgggtcacatttatgacatcccccctctgcaacctttctctctgggggctgtaccaaaggcatggtacctcagtctggtatccagactgtgaaatcagcctctgggccaaggagggtcctacagacaaggtggcatctcaacctcacccaagaaacccccgggactttaccccagcaggctgccactggggcaccgaactaagccagctcagccttccaagctgcttagcctttgtcaaccatcaaagtggggaaagggtctctggccttgcaaggatttgggcaggatggaagtctttgtctaggtctgaaatcaagggcttgggaatctagagcagagctcctggccagcgtttgaagcctggcctcccacctggggcatttactgacaccctgtcgccagcctagaacatcctgctctgaatgaacagagcccagatgggggtccagagctaagtgacccacctggggaagctctgattattcatccagggccttctcaatgagcacattacctccatgatcaataaccaagaggctgcagtcaaatactgctactgtcactttgaagattttctaagggcacaagtggcacacttgctctccggcctttgggagaggcatgttcttgggcagggctggctacggcaagagggaaccaattcctttcccctttaggcaccctctacctggcagctcttaaaactaagaaaaaatatgatatacacacacattatatatatatatatatatacacacacacacacacacacacgtatatctatttatgcacatattggggccaatttgatttgctagtattagacaataaactgtacaaggaaatttattatctcagtgtctttatttagcataaaagtggccttagaagaagggtgaaggttagatagatggaatctctgtcaggggacaaacagctgtagcatccccttagcatctttctagccaatgagccccctccccaggaggagggatggcctgactgaaacaggtgagagtttgcttccccctttcagcagcattctttttagatttaggtactgaagaatcccagtgagttctgcatttgtatcttgcaagtttgtataaacccaatacaggaaataaaatgaatggtttgtaaaaaaaaaaaaaaaaaaaaaaaaaaaaaaaaaaaa

SEQ ID NO: 12481 - DNA, 1170 bp, Homo sapiens
aaggctattattaccaccactgagtggcttaaataatcctgtcaacagcaatcgcccatttccaaagccatggtgaaacatctctgtgctaatttcttttgttttgtttcctaattttttttttttggcaggtggtgggaaataatctttgtcttctttggagtaaaccttcaacaccggattttttcttttaattatggatgtaaaccccaatatccccataatttacattgggtctcgaccaattgcctaattataagaggatatatttaggctcttatttcatccacacaaaaacttgtgtaacaggtagttggaaacatctgaggcaccactttgattctgttttggatggtcatgttttttctcctccgtttccccagcatgtctgccaccatcctcatgcactgcttccaagtgcctgggagcctttatgagcgtccctaaacctaaaagaatccagaggcggggctcggatgaaccctcgagataagcaagtgagccgcttctcccctctaaaggatgtttacacgtgggtggcactcgctggaatccagcgctcgggcagccctgggaggacgcgctcagctgcgaggaggatggagagcaatacatcatcatctttggagaatttagcgacggcgcctgtgaaccagatccaagaaacaatttctgataattgtgtggtgattttctcaaaaacatcctgttcttactgtacaatggcaaaaaagcttttccatgacatgaatgttaactataaagtggtggaactggacctgcttgaatatggaaaccagttccaagatgctctttacaaaatgactggtgaaagaactgttccaagaatatttgtcaatggtacttttattggaggtgcaactgacactcataggcttcacaaagaaggaaaattgctcccactagttcatcagtgttatttaaaaaaaagtaagaggaaagaatttcagtgatgtttatactaataagtttgctagtacagtgtcagttatttaaagtggtaatgcccgataatgtcttttaaatgtttgaggatgttttaaatacatgcattgtcttcacgaagaagatgtaaaaataatgaacaataaattgcggtggaaacctaaaaaaaaaaaaaaaaaaaaaaaaaaaaaaaaaaaaaaaaaa

SEQ ID NO: 12482 - DNA, 2112 bp, Homo sapiens
ggtcgggaccggcaagatggcggcgcggacagcgttcggtgctgtgtgccggcgcctctggcagggattggggaatttttctgtaaacacttctaagggcaatacagccaaaaatggtggcttgcttctcagtaccaatatgaagtgggtacagttttcaaacctacacgttgatgttccaaaggatttgaccaaacctgtggtaacaatctctgatgaaccagacatattatataagcgcctctcggttttggtgaaaggtcacgataaggctgtattggacagttatgaatattttgctgtgcttgctgctaaagaacttggtatctctattaaagtacatgaacctccaaggaaaatagagcgatttactcttctccaatcagtgcatatttacaagaagcacagagttcagtatgaaatgagaacactttacagatgtttagagttagaacatctaactggaagcacagcagatgtctacttggaatatattcagcgaaacttacctgaaggggttgccatggaagtaacaaagacacaattagaacagttaccagaacacatcaaggagccaatctgggaaacactatcagaagaaaaagaagaaagcaagtcataaagcctcagggaggccatttttgcctaaatttgaaatgagggtgggccagatgagtatgtttaagtggagagtgcttccagctgagatgatttgagtctgtcctaactgctccattgagttctcgtgccctcatcagctgagggcagggaatggaactttaatggaagaaccacttttatctattctttttattcattgtttcagttctgatttcagcaaacatgagcaaaccactttgactgaaagcagaaagagtgaaaattctattttgttacgctactggtgttcaattattagtttgtaccatttttaatttatgtcagttgatgcatctgaaaataagtgcttggagtgttcgtacccttatttttttttaagattcctagaaggaatctttggttaattcagattgagcagttaaagtttttgctatttacctttgtgcaggctggcatatgctaatttgggggtggtaaccaaccgattttatctcatgtaagcattacattttgaagactgaatatacttcacagcagatcaaacacatttatggcatgcactgacctcttcttggagcccagaactttatagagttgcctaccagggttactgtaatggaatttatgatcttaagaaattactagttgtattatttatcctatgattcattcattcaataagcttttactgcataaactttacatccagcactgtagttaagtacccaaaattgaatagaaataatggcttttgaaaattgcacaaagcaggccaggcacggtggctcacgcctgtaatcccagcactttgggaggccgaggcaggcggatcacgaggtcaagagatccagaccatcctggctaacacggtgaaaccccgtctctaataaaaatacaaaaattagctggacatggtggcacgtgcctgtaatcccagctactcaggaggctgaggcaggagaatcgcgtgaacccgggcccggtggaggctgcagtgagacgagatcgcgccactgcactccagcctggcgacagagcgagacaccgtctcaaaaaaaaaaaaaaagaaaattgtgcaaagcataggtaaatatttttctttattaagcttctcactgagaagccctctttattttggtaaatgtcactctgtttgttaggagatgtctgcttttccatgaaatgaaatagtggctaaagccctgaaagaggcaagactacaatgggctgaaacagttggtatagcaaccccagagaagtgcttcattttctttttatagtagaagcaggtccatgtcttttgtggtttcctgcacatctttggagtagttatgacttctcagtttttccccccttaaactgcattgcctattcttttttcctgacatgctatcaggtatcagtgtgttgaatacataatgcttgtgtatcagacttacgttactgtcatcaccattaaaagaattgcagccttgtgccccatgaccttca

SEQ ID NO: 12483 - DNA, 2943 bp, Homo sapiens
accaggcaacaccattgaaggctcatatgtaaaaatccatgccttcctttctcccaatctccattcccaaacttagccactggcttctggctgaggccttacgcatacctcccggggcttgcacacaccttcttctacagaagacacaccttgggcatatcctacagaagaccaggcttctctctggtccttggtagagggctactttactgtaacagggccagggtggagagttctctcctgaagctccatcccctctataggaaatgtgttgacaatattcagaagagtaagaggatcaagacttctttgtgctcaaataccactgttctcttctctaccctgccctaaccaggagcttgtcaccccaaactctgaggtgatttatgccttaatcaagcaaacttccctcttcagaaaagatggctcattttccctcaaaagttgccaggagctgccaagtattctgccaattcaccctggagcacaatcaacaaattcagccagaacacaactacagctactattagaactattattattaataaattcctctccaaatctagccccttgacttcggatttcacgatttctcccttcctcctagaaacttgataagtttcccgcgcttccctttttctaagactacatgtttgtcatcttataaagcaaaggggtgaataaatgaaccaaatcaataacttctggaatatctgcaaacaacaataatatcagctatgccatctttcactattttagccagtatcgagttgaatgaacatagaaaaatacaaaactgaattcttccctgtaaattccccgttttgacgacgcacttgtagccacgtagccacgcctacttaagacaattacaaaaggcgaagaagactgactcaggcttaagctgccagccagagagggagtcatttcattggcgtttgagtcagcaaagaagtcaagatggccaaagttccagacatgtttgaagacctgaagaactgttacagtgaaaatgaagaagacagttcctccattgatcatctgtctctgaatcagaaatccttctatcatgtaagctatggcccactccatgaaggctgcatggatcaatctgtgtctctgagtatctctgaaacctctaaaacatccaagcttaccttcaaggagagcatggtggtagtagcaaccaacgggaaggttctgaagaagagacggttgagtttaagccaatccatcactgatgatgacctggaggccatcgccaatgactcagaggaagaaatcatcaagcctaggtcagcaccttttagcttcctgagcaatgtgaaatacaactttatgaggatcatcaaatacgaattcatcctgaatgacgccctcaatcaaagtataattcgagccaatgatcagtacctcacggctgctgcattacataatctggatgaagcagtgaaatttgacatgggtgcttataagtcatcaaaggatgatgctaaaattaccgtgattctaagaatctcaaaaactcaattgtatgtgactgcccaagatgaagaccaaccagtgctgctgaaggagatgcctgagatacccaaaaccatcacaggtagtgagaccaacctcctcttcttctgggaaactcacggcactaagaactatttcacatcagttgcccatccaaacttgtttattgccacaaagcaagactactgggtgtgcttggcaggggggccaccctctatcactgactttcagatactggaaaaccaggcgtaggtctggagtctcacttgtctcacttgtgcagtgttgacagttcatatgtaccatgtacatgaagaagctaaatcctttactgttagtcatttgctgagcatgtactgagccttgtaattctaaatgaatgtttacactctttgtaagagtggaaccaacactaacatataatgttgttatttaaagaacaccctatattttgcatagtaccaatcattttaattattattcttcataacaattttaggaggaccagagctactgactatggctaccaaaaagactctacccatattacagatgggcaaattaaggcataagaaaactaagaaatatgcacaatagcagttgaaacaagaagccacagacctaggatttcatgatttcatttcaactgtttgccttctacttttaagttgctgatgaactcttaatcaaatagcataagtttctgggacctcagttttatcattttcaaaatggagggaataatacctaagccttcctgccgcaacagttttttatgctaatcagggaggtcattttggtaaaatacttcttgaagccgagcctcaagatgaaggcaaagcacgaaatgttattttttaattattatttatatatgtatttataaatatatttaagataattataatatactatatttatgggaaccccttcatcctctgagtgtgaccaggcatcctccacaatagcagacagtgttttctgggataagtaagtttgatttcattaatacagggcattttggtccaagttgtgcttatcccatagccaggaaactctgcattctagtacttgggagacctgtaatcatataataaatgtacattaattaccttgagccagtaattggtccgatctttgactcttttgccattaaacttacctgggcattcttgtttcaattccacctgcaatcaagtcctacaagctaaaattagatgaactcaactttgacaaccatgagaccactgttatcaaaactttcttttctggaatgtaatcaatgtttcttctaggttctaaaaattgtgatcagaccataatgttacattattatcaacaatagtgattgatagagtgttatcagtcataactaaataaagcttgcaacaaaattctctgacaaaaaaaaaaaaaaaa

SEQ ID NO: 12484 - DNA, 3988 bp, Homo sapiens
tgcaactccgagcgtgagtccaggctaaggggacgccggccggggaagaggcgcggcgggagaagcgaccgcagcgggagcccggccaccgagggctgccggcactaggcgcagagccgccagcgctcggaagcccgcggggtgcgggagcgggaacagacttcttttgtagaattatcctatggaatgatattttcataatgagtcaacaaggttacgtggctacacctccgtattctcagcctcagcctggaataggcctttctccacctcattatgggcactatggggatccgtcgcacacagcatctccaacaggtatgatgaagccagcagggcctttgggggccaccgccactaggggaatgttgcctccgggtcccccacctcctggaccccatcagtttggtcagaatggagctcatgccactggtcaccctccccaaagatttccaggccctccacctgtcaacaatgtggcatcctcacatgcaccataccaaccctctgcacaatcttcttatccaggtcctatatccacttcatctgtcacccagctgggcagccagctcagtgctatgcaaatcaacagctatggttcaggcatggctcctccaagccagggaccccctggccctctgtcagccacatcattgcagactcctccacgacctccacagccttccattttgcagcctggatctcaagttcttccaccaccacccaccacactcaatggtcctggtgcctcacctttgcctctaccaatgtacagaccagatgggctctctgggcctcctcctccaaatgcccagtaccagcccccacctcttccaggccagaccttgggtgctggatatcctccgcagcaggccaactctggtccccagatggcaggcgcacaactgtcttacccaggaggcttccctggaggtcctgcacagatggctggtccgccacagccccagaagaagctggatcctgactctatccctagcccaatccaggtgattgagaatgatagagccagcagaggaggacaagtttatgccaccaacaccagaggccagatccctcccctggtcactacagattgcatgatacaagaccaaggaaatgccagtcctcgattcatccgttgtacaacatactgttttccatgcacgtcagatatggctaagcaagctcagattccattagctgctgtcatcaagccctttgccaccattccttcaaatgagagtcccctttacttggtaaatcacggcgagagtggaccagtcagatgcaacaggtgcaaggcctacatgtgcccatttatgcagttcatcgaaggaggaaggagatatcagtgtggattttgcaactgtgtgaatgatgttccaccattctatttccaacatctggaccacattggaagaagactggaccactatgagaaaccagagttatctctaggatcttatgaatatgttgccactttggattattgcagaaagagtaagcctcccaacccaccagcctttatcttcatgattgatgtttcatatagtaacataaagaatggacttgtcaagctcatatgtgaagaactgaagaccatgctggaaaaaattccaaaggaagagcaagaagagacgtctgcaattcgagtgggttttatcacatataacaaagttctccatttctttaatgtgaagagtaatctggcccagcctcagatgatggtggtgactgatgttggagaagtctttgttcctttgttggatggtttccttgtcaactatcaagaatcccaatctgtgattcataatttgttggaccagattccagacatgtttgcagactctaatgaaaatgagactgtctttgcttctgtcatccaggctggcatggaagcactaaaggcagcagactgtcctgggaagctgttcatcttccattcttccttgccaactgctgaagcaccagggaagctcaaaaacagagatgacaaaaaactggttaatacagacaaagagaagatacttttccagccccaaacaaatgtctatgactcattggccaaggactgcgtggctcacggctgctctgtgacactcttcctctttcctagtcagtatgtggacgtggcctcgctggggctggttcctcagctcactggaggaaccctttacaaatacaacaatttccagatgcacttggatagacaacaatttttgaacgacctcagaaatgatattgaaaagaaaataggctttgatgctattatgagggttcgtaccagcacaggtttcagagccactgatttctttggtggaatcttgatgaacaacaccaccgatgtagaaatggctgccatcgattgtgacaaggcagtgaccgtggagttcaagcacgatgacaaactcagtgaagacagtggagccttaatccagtgtgctgtgctttacacgacaatcagtggtcaaagaagacttcggattcacaatcttggcttaaactgcagctctcagctagctgatctttataagagctgtgagacagatgctcttatcaacttctttgccaagtcagcttttaaagcagttctccaccagcctttgaaggtcatccgggaaattctagttaatcagactgcccatatgttggcatgttaccggaagaattgtgcaagtccttctgcagcaagccagcttattctaccagattccatgaaagtattgccagtgtacatgaattgcttgttgaaaaactgtgtactactcagcagaccagagatctcaactgatgaacgagcataccagagacagctggtcatgaccatgggtgtggctgactctcagcttttcttctacccacaacttctgcccatacacacgttagatgtcaagagtacaatgttacctgctgccgttcgttgctctgagtcccgtctttcagaagaaggaatattcttactggctaatggtctacacatgttcctgtggttgggagtaagcagcccaccagaactgatccaaggaatatttaatgtgccatcttttgcacatatcaacacagatatgacattgctgcctgaagtgggaaacccatactctcaacaactcagaatgataatgggtattatccaacaaaagaggccatattcaatgaagctcacaattgtaaagcagcgagaacaaccagaaatggttttccgacagttcctggtagaagacaaaggactttacggaggctcttcttatgtggatttcctttgttgtgttcacaaggagatctgtcagctgcttaattaattgaaacttctctgtcattgatgttgcatttccaaggagataatctccttcttggtgcctaattttctagatgataataggctagttttgatttcttgctcattttcagaataactttccaggaagagatggcatttagaacttcagctttggtgctcaggtataaagccaattaaggtacaattgtaccataaagggaacaatctgtttctgattgcacagtttctaatttttaaaactgatgtggtttgcatttcataaaaggcaaagtttacagaaccataaacattctcaattttctttatgctagacatataaattatttttcaaactgtatagatttggggtaaaaagttgtctcagttcctctcccaattgcaatgagaaaaaaaagcttaatttttacattatacttaattttctaaaaccatgtaactccattgaacatttttcaacttaaggtctgcatagcagacttttaataaccttgggatttatctggtagaacaatatgtgttctacatttttttcataattatatattgtgtatgttaaaactattttccagttgttttgtctgtaaaactgtctttatcaatatgcttaatggttctttgtacaattttgaaagtttctacctgtatataatggatgttaaccagtatcaataaatcacttcgtataatctt

SEQ ID NO: 12485 - DNA, 7816 bp, Homo sapiens
ttttcttgcttttcttcccttttttttctttttgcaaacaaaacaaaaaacagcatagaagaaagagcaaaataaagaagaagaagaggaggaagagagggaaagagaggaagggaaaaaaaacaccaacccgggcagaggaggaggtgcggcggcggcggcggcggcggcagcggcggcagcggcgcggcggcggctcggaccccctcccccggctccccccatcagtgcagctctccgggcgatgccagaatagatgccggggcaatgtcccgccgcaaacagggcaacccgcagcacttgtcccagagggagctcatcaccccagaggctgaccatgtggaggccgccatcctcgaagaagacgagggtctggagatagaggagccaagtggcctggggctgatggtgggtggccccgaccctgacctgctcacctgtggccagtgtcaaatgaacttccccttgggggacatcctggtttttatagagcacaaaaggaagcagtgtggcggcagcttgggtgcctgctatgacaaggccctggacaaggacagcccgccaccctcctcacgctccgagctcaggaaagtgtccgagccggtggagatcgggatccaagtcacccccgacgaagatgaccacctgctctcacccacgaaaggcatctgtcccaagcaggagaacattgcagggccgtgcaggcctgcccagctgccagcggtggcccccatagctgcctcctcccaccctcactcatccgtgatcacttcacctctgcgtgccctgggcgctctcccgccctgcctccccctgccgtgctgcagcgcgcgcccggtctcgggtgacgggactcagggtgagggtcagacggaggctccctttggatgccagtgtcagttgtcaggtaaagatgagccttccagctacatttgcacaacatgcaagcagcccttcaacagcgcgtggttcctgctgcagcacgcgcagaacacgcacggcttccgcatctacctggagcccgggccggccagcagctcgctcacgccgcggctcaccatcccgccgccgctcgggccggaggccgtggcgcagtccccgctcatgaatttcctgggcgacagcaaccccttcaacctgctgcgcatgacgggccccatcctgcgggaccacccgggcttcggcgagggccgcctgccgggcacgccgcctctcttcagtcccccgccgcgccaccacctggacccgcaccgcctcagtgccgaggagatggggctcgtcgcccagcaccccagtgccttcgaccgagtcatgcgcctgaaccccatggccatcgactcgcccgccatggacttctcgcggcggctccgcgagctggcgggcaacagctccacgccgccgcccgtgtccccgggccgcggcaaccctatgcaccggctcctgaaccccttccagcccagccccaagtccccgttcctgagcacgccgccgctgccgcccatgccccctggcggcacgccgcccccgcagccgccagccaagagcaagtcgtgcgagttctgcggcaagaccttcaagttccagagcaatctcatcgtgcaccggcgcagtcacacgggcgagaagccctacaagtgccagctgtgcgaccacgcgtgctcgcaggccagcaagctcaagcgccacatgaagacgcacatgcacaaggccggctcgctggccggccgctccgacgacgggctctcggccgccagctcccccgagcccggcaccagcgagctggcgggcgagggcctcaaggcggccgacggtgacttccgccaccacgagagcgacccgtcgctgggccacgagccggaggaggaggacgaggaggaggaggaggaggaggaggagctgctactggagaacgagagccggcccgagtcgagcttcagcatggactcggagctgagccgcaaccgcgagaacggcggtggtggggtgcccggggtcccgggcgcggggggcggcgcggccaaggcgctggctgacgagaaggcgctggtgctgggcaaggtcatggagaacgtgggcctaggcgcactgccgcagtacggcgagctcctggccgacaagcagaagcgcggcgccttcctgaagcgtgcggcgggcggcggggacgcgggcgacgacgacgacgcgggcggctgcggggacgcgggcgcgggcggcgcggtcaacgggcgcgggggcggcttcgcgccaggcaccgagcccttccccgggctcttcccgcgcaagcccgcgccgctgcccagccccgggctcaacagcgccgccaagcgcatcaaggtggagaaggacctggagctgccgcccgccgcgctcatcccgtccgagaacgtgtactcgcagtggctggtgggctacgcggcgtcgcggcacttcatgaaggaccccttcctgggcttcacggacgcacgacagtcgcccttcgccacgtcgtccgagcactcgtccgagaacggcagcctgcgcttctccacgccgcccggggacctgctggacggcggcctctcgggccgcagcggcacggccagcggaggcagcaccccgcacctgggcggcccgggccccgggcggcccagctccaaggagggccgccgcagcgacacgtgcgagtactgcggcaaggtgttcaagaactgcagcaacttgacggtgcaccggcggagccacaccggcgagcggccttacaagtgcgagctgtgcaactacgcgtgcgcgcagagcagcaagctcacgcgccacatgaagacgcacgggcagatcggcaaggaggtgtaccgctgcgacatctgccagatgcccttcagcgtctacagcaccctggagaaacacatgaaaaagtggcacggcgagcacttgctgactaacgacgtcaaaatcgagcaggccgagaggagctaagcgcgcgggccccggcgccccgcacctgtacagtggaaccgttgccaaccgagagaatgctgacctgacttgcctccgtgtcaccgccaccccgcaccccgcgtgtccccggggcccaggggaggcggcactccaacctaacctgtgtctgcgaagtcctatggaaacccgagggttgattaaggcagtacaaattgtggagccttttaactgtgcaataatttctgtatttattgggttttgtaatttttttggcatgtgcaggtactttttattattattttttctgtttgaattcctttaagagattttgttgggtatccatcccttctttgttttttttttaacccggtagtagcctgagcaatgactcgcaagcaatgttagaggggaagcatatcttttaaattataatttggggggaggggtggtgctgcttttttgaaatttaagctaagcatgtgtaatttcttgtgaagaagccaacactcaaatgacttttaaagttgtttactttttcattccttccttttttttgtcctgaaataaaaagtggcatgcagttttttttttaattattttttaattttttttttggtttttgtttttggggtggggggtgtggatgtacagcggataacaatctttcaagtcgtagcactttgtttcagaactggaatggagatgtagcactcatgtcgtcccgagtcaagcggccttttctgtgttgatttcggctttcatattacataagggaaaccttgagtggtggtgctgggggaggcaccccacagactcagcgccgccagagatagggtttttggagggctcctctgggaaatggcccgacagcattctgaggttgtgcatgaccagcagatactatcctgttggtgtgccctggggtgccatggctgctattcgctgtagattaggctacataaaatgggctgagggtacctttttggggagatggggtggcctgcagtgacacagaaaggaagaaactagcggtgttcttttaggcgttttctggcttgacggcttctctctttttttaaatcacccccaccacataaatctcaaatcctatgttgctacaaggggtcatccatcatttcccaagcagacgaatgccctaattaattgaagttagtgttctctcatttaatgcacactgatgatattgtagggatgggtggggtggggatcttgcaaatttctattctcttttactgaaaaagcaggggatgagttccatcagaaggtgcccagcgctacttcccaggtttttattttttttttcctatctcattaggttggaaggtactaaatattgaactgttaagattagacatttgaattctgttgacccgcactttaaagcttttgtttgcatttaaattaaatggcttctaaacaagaaattgcagcatattcttctctttggcccagaggtgggttaaactgtaagggacagctgagattgagtgtcagtattgctaagcgtggcattcacaatactggcactataaagaacaaaataaaataataatttataggacagtttttctactgccattcaatttgatgtgagtgccttgaaaactgatcttcctatttgagtctcttgagacaaatgcaaaactttttttttgaaatgaaaagactttttaaaaaagtaaaacaagaaaagtacattctttagaaactaacaaagccacatttactttaagtaaaaaaaaaaaaaattctggttgaagatagaggatatgaaatgccataagacccaatcaaatgaagaaataaacccagcacaaccttggacatccattagctgaattatcctcagccccttttgtttttgggacaacgctgcttagatatggagtggaggtgatttactgctgaattaaaactcaagtgacacaagttacaagttgatatcgttgaatgaaaagcaaaacaaaaacaattcaggaacaacggctaattttttctaaagttaaatttagtgcactctgtcttaaaaatacgtttacagtattgggtacatacaagggtaaaaaaaaaattgtgtgtatgtgtgttggagcgatctttttttttcaaagtttgcttaataggttatacaaaaatgccacagtggccgcgtgtatattgttttcttttggtgacggggttttagtatatattatatatattaaaatttcttgattactgtaaaagtggaccagtatttgtaataatcgagaatgcctgggcattttacaaaacaagaaaaaaaatacccttttcttttccttgaaaatgttgcagtaaaatttaaatggtgggtctataaatttgttcttgttacagtaactgtaaagtcggagttttagtaaatttttttctgccttgggtgttgaatttttatttcaaaaaaaatgtatagaaacttgtatttggggattcaaaggggattgctacaccatgtagaaaaagtatgtagaaaaaaagtgcttaatattgttattgctttgcagaaaaaaaaaaaatcacatttctgacctgtacttatttttctcttcccgcctccctctggaatggatatattggttggttcatatgatgtaggcacttgctgtatttttactggagctcgtaattttttaactgtaagcttgtccttttaaagggatttaatgtacctttttgttagtgaatttggaaataaaaagaaaaaaaaaacaaaaacaaacaggctgccataatatatttttttaatttggcaggataaaatattgcaaaaaaaacacatttgtatgttaagtcctattgtacaggagaaaaagggttgtttgacaacctttgagaaaaagaaacaaaaggaagtagttaaatgctttggttcacaaatcatttagttgtatatattttttgtcggaattggcctacacagagaaccgttcgtgttgggcttctctctgaacgccccgaaccttgcatcaaggctccttggtgtggccacagcagaccagatgggaaattatttgtgttgagtggaaaaaaatcagtttttgtaaagatgtcagtaacattccacatcgtcctccctttctctaagaggccatctctaagatgtcagatgtagaggagagagagcgagagaacatcttccttctctaccatcactcctgtggcggtcaccaccaccacctctcccgcccttaccagcagaaagcaatgcaaactgagctgctttagtccttgagaaattgtgaaacaaacacaaatatcataaaaggagctggtgattcagctgggtccaggtgaagtgacctgctgttgagaccggtacaaattggatttcaggaaggagactccatcacagccaggacctttcgtgccatggagagtgttggcctcttgtctttcttccctgctttgctgctttgctctctgaaacctacattccgtcagtttccgaatgcgagggcctgggatgaatttggtgcctttccatatctcgttctctctccttcccctgcgtttcctctccatccttcatcctccattggtcctttttttttctttcattttttatttaatttcttttcttcctgtctgttcctcccctaatcctctattttatttttattttttgtaaagccaagtagctttaagataaagtggtggtcttttggatgagggaataatgcatttttaaataaaataccaatatcaggaagccattttttatttcaggaaatgtaagaaaccattatttcaggttatgaaagtataaccaagcatccttttgggcaattccttaccaaatgcagaagcttttctgttcgatgcactctttcctccttgccacttacctttgcaaagttaaaaaaaaggggggagggaatgggagagaaagctgagatttcagtttcctactgcagtttcctacctgcagatccaggggctgctgttgcctttggatgccccactgaggtcctagagtgcctccagggtggtcttcctgtagtcataacagctagccagtgctcaccagcttaccagattgccaggactaagccatcccaaagcacaagcattgtgtgtctctgtgactgcagagaagagagaattttgcttctgttttgtgtttaaaaaaccaacacggaagcagatgatcccgagagagaggcctctagcatgggtgacccagccgacctcaggccggtttccgcactgccacaactttgttcaaagttgcccccaattggaacctgccacttggcattagagggtctttcatggggagagaaggagactgaattactctaagcaaaatgtgaaaagtaaggaaatcagcctttcatcccggtcctaagtaaccgtcagccgaaggtctcgtggaacacaggcaaacccgtgattttggtgctccttgtaactcagccctgcaaagcaaagtcccattgatttaagttgtttgcatttgtactggcaaggcaaaatatttttattaccttttctattacttattgtatgagcttttgttgtttacttggaggttttgtcttttactacaagtttggaactatttattattgcttggtatttgtgctctgtttaagaaacaggcacttttttttattatggataaaatgttgagatgacaggaggtcatttcaatatggcttagtaaaatatttattgttcctttattctctgtacaagattttgggcctctttttttccttaatgtcacaatgttgagttcagcatgtgtctgccatttcatttgtacgcttgttcaaaaccaagtttgttctggtttcaagttataaaaataaattggacatttaacttgatctccaaa

SEQ ID NO: 12486 - DNA, 7603 bp, Homo sapiens
ttttcttgcttttcttcccttttttttctttttgcaaacaaaacaaaaaacagcatagaagaaagagcaaaataaagaagaagaagaggaggaagagagggaaagagaggaagggaaaaaaaacaccaacccgggcagaggaggaggtgcggcggcggcggcggcggcggcagcggcggcagcggcgcggcggcggctcggaccccctcccccggctccccccatcagtgcagctctccgggcgatgccagaatagatgccggggcaatgtcccgccgcaaacagggcaacccgcagcacttgtcccagagggagctcatcaccccagaggctgaccatgtggaggccgccatcctcgaagaagacgagggtctggagatagaggagccaagtggcctggggctgatggtgggtggccccgaccctgacctgctcacctgtggccagtgtcaaatgaacttccccttgggggacatcctggtttttatagagcacaaaaggaagcagtgtggcggcagcttgggtgcctgctatgacaaggccctggacaaggacagcccgccaccctcctcacgctccgagctcaggaaagtgtccgagccggtggagatcgggatccaagtcacccccgacgaagatgaccacctgctctcacccacgaaaggcatctgtcccaagcaggagaacattgcaggtaaagatgagccttccagctacatttgcacaacatgcaagcagcccttcaacagcgcgtggttcctgctgcagcacgcgcagaacacgcacggcttccgcatctacctggagcccgggccggccagcagctcgctcacgccgcggctcaccatcccgccgccgctcgggccggaggccgtggcgcagtccccgctcatgaatttcctgggcgacagcaaccccttcaacctgctgcgcatgacgggccccatcctgcgggaccacccgggcttcggcgagggccgcctgccgggcacgccgcctctcttcagtcccccgccgcgccaccacctggacccgcaccgcctcagtgccgaggagatggggctcgtcgcccagcaccccagtgccttcgaccgagtcatgcgcctgaaccccatggccatcgactcgcccgccatggacttctcgcggcggctccgcgagctggcgggcaacagctccacgccgccgcccgtgtccccgggccgcggcaaccctatgcaccggctcctgaaccccttccagcccagccccaagtccccgttcctgagcacgccgccgctgccgcccatgccccctggcggcacgccgcccccgcagccgccagccaagagcaagtcgtgcgagttctgcggcaagaccttcaagttccagagcaatctcatcgtgcaccggcgcagtcacacgggcgagaagccctacaagtgccagctgtgcgaccacgcgtgctcgcaggccagcaagctcaagcgccacatgaagacgcacatgcacaaggccggctcgctggccggccgctccgacgacgggctctcggccgccagctcccccgagcccggcaccagcgagctggcgggcgagggcctcaaggcggccgacggtgacttccgccaccacgagagcgacccgtcgctgggccacgagccggaggaggaggacgaggaggaggaggaggaggaggaggagctgctactggagaacgagagccggcccgagtcgagcttcagcatggactcggagctgagccgcaaccgcgagaacggcggtggtggggtgcccggggtcccgggcgcggggggcggcgcggccaaggcgctggctgacgagaaggcgctggtgctgggcaaggtcatggagaacgtgggcctaggcgcactgccgcagtacggcgagctcctggccgacaagcagaagcgcggcgccttcctgaagcgtgcggcgggcggcggggacgcgggcgacgacgacgacgcgggcggctgcggggacgcgggcgcgggcggcgcggtcaacgggcgcgggggcggcttcgcgccaggcaccgagcccttccccgggctcttcccgcgcaagcccgcgccgctgcccagccccgggctcaacagcgccgccaagcgcatcaaggtggagaaggacctggagctgccgcccgccgcgctcatcccgtccgagaacgtgtactcgcagtggctggtgggctacgcggcgtcgcggcacttcatgaaggaccccttcctgggcttcacggacgcacgacagtcgcccttcgccacgtcgtccgagcactcgtccgagaacggcagcctgcgcttctccacgccgcccggggacctgctggacggcggcctctcgggccgcagcggcacggccagcggaggcagcaccccgcacctgggcggcccgggccccgggcggcccagctccaaggagggccgccgcagcgacacgtgcgagtactgcggcaaggtgttcaagaactgcagcaacttgacggtgcaccggcggagccacaccggcgagcggccttacaagtgcgagctgtgcaactacgcgtgcgcgcagagcagcaagctcacgcgccacatgaagacgcacgggcagatcggcaaggaggtgtaccgctgcgacatctgccagatgcccttcagcgtctacagcaccctggagaaacacatgaaaaagtggcacggcgagcacttgctgactaacgacgtcaaaatcgagcaggccgagaggagctaagcgcgcgggccccggcgccccgcacctgtacagtggaaccgttgccaaccgagagaatgctgacctgacttgcctccgtgtcaccgccaccccgcaccccgcgtgtccccggggcccaggggaggcggcactccaacctaacctgtgtctgcgaagtcctatggaaacccgagggttgattaaggcagtacaaattgtggagccttttaactgtgcaataatttctgtatttattgggttttgtaatttttttggcatgtgcaggtactttttattattattttttctgtttgaattcctttaagagattttgttgggtatccatcccttctttgttttttttttaacccggtagtagcctgagcaatgactcgcaagcaatgttagaggggaagcatatcttttaaattataatttggggggaggggtggtgctgcttttttgaaatttaagctaagcatgtgtaatttcttgtgaagaagccaacactcaaatgacttttaaagttgtttactttttcattccttccttttttttgtcctgaaataaaaagtggcatgcagttttttttttaattattttttaattttttttttggtttttgtttttggggtggggggtgtggatgtacagcggataacaatctttcaagtcgtagcactttgtttcagaactggaatggagatgtagcactcatgtcgtcccgagtcaagcggccttttctgtgttgatttcggctttcatattacataagggaaaccttgagtggtggtgctgggggaggcaccccacagactcagcgccgccagagatagggtttttggagggctcctctgggaaatggcccgacagcattctgaggttgtgcatgaccagcagatactatcctgttggtgtgccctggggtgccatggctgctattcgctgtagattaggctacataaaatgggctgagggtacctttttggggagatggggtggcctgcagtgacacagaaaggaagaaactagcggtgttcttttaggcgttttctggcttgacggcttctctctttttttaaatcacccccaccacataaatctcaaatcctatgttgctacaaggggtcatccatcatttcccaagcagacgaatgccctaattaattgaagttagtgttctctcatttaatgcacactgatgatattgtagggatgggtggggtggggatcttgcaaatttctattctcttttactgaaaaagcaggggatgagttccatcagaaggtgcccagcgctacttcccaggtttttattttttttttcctatctcattaggttggaaggtactaaatattgaactgttaagattagacatttgaattctgttgacccgcactttaaagcttttgtttgcatttaaattaaatggcttctaaacaagaaattgcagcatattcttctctttggcccagaggtgggttaaactgtaagggacagctgagattgagtgtcagtattgctaagcgtggcattcacaatactggcactataaagaacaaaataaaataataatttataggacagtttttctactgccattcaatttgatgtgagtgccttgaaaactgatcttcctatttgagtctcttgagacaaatgcaaaactttttttttgaaatgaaaagactttttaaaaaagtaaaacaagaaaagtacattctttagaaactaacaaagccacatttactttaagtaaaaaaaaaaaaaattctggttgaagatagaggatatgaaatgccataagacccaatcaaatgaagaaataaacccagcacaaccttggacatccattagctgaattatcctcagccccttttgtttttgggacaacgctgcttagatatggagtggaggtgatttactgctgaattaaaactcaagtgacacaagttacaagttgatatcgttgaatgaaaagcaaaacaaaaacaattcaggaacaacggctaattttttctaaagttaaatttagtgcactctgtcttaaaaatacgtttacagtattgggtacatacaagggtaaaaaaaaaattgtgtgtatgtgtgttggagcgatctttttttttcaaagtttgcttaataggttatacaaaaatgccacagtggccgcgtgtatattgttttcttttggtgacggggttttagtatatattatatatattaaaatttcttgattactgtaaaagtggaccagtatttgtaataatcgagaatgcctgggcattttacaaaacaagaaaaaaaatacccttttcttttccttgaaaatgttgcagtaaaatttaaatggtgggtctataaatttgttcttgttacagtaactgtaaagtcggagttttagtaaatttttttctgccttgggtgttgaatttttatttcaaaaaaaatgtatagaaacttgtatttggggattcaaaggggattgctacaccatgtagaaaaagtatgtagaaaaaaagtgcttaatattgttattgctttgcagaaaaaaaaaaaatcacatttctgacctgtacttatttttctcttcccgcctccctctggaatggatatattggttggttcatatgatgtaggcacttgctgtatttttactggagctcgtaattttttaactgtaagcttgtccttttaaagggatttaatgtacctttttgttagtgaatttggaaataaaaagaaaaaaaaaacaaaaacaaacaggctgccataatatatttttttaatttggcaggataaaatattgcaaaaaaaacacatttgtatgttaagtcctattgtacaggagaaaaagggttgtttgacaacctttgagaaaaagaaacaaaaggaagtagttaaatgctttggttcacaaatcatttagttgtatatattttttgtcggaattggcctacacagagaaccgttcgtgttgggcttctctctgaacgccccgaaccttgcatcaaggctccttggtgtggccacagcagaccagatgggaaattatttgtgttgagtggaaaaaaatcagtttttgtaaagatgtcagtaacattccacatcgtcctccctttctctaagaggccatctctaagatgtcagatgtagaggagagagagcgagagaacatcttccttctctaccatcactcctgtggcggtcaccaccaccacctctcccgcccttaccagcagaaagcaatgcaaactgagctgctttagtccttgagaaattgtgaaacaaacacaaatatcataaaaggagctggtgattcagctgggtccaggtgaagtgacctgctgttgagaccggtacaaattggatttcaggaaggagactccatcacagccaggacctttcgtgccatggagagtgttggcctcttgtctttcttccctgctttgctgctttgctctctgaaacctacattccgtcagtttccgaatgcgagggcctgggatgaatttggtgcctttccatatctcgttctctctccttcccctgcgtttcctctccatccttcatcctccattggtcctttttttttctttcattttttatttaatttcttttcttcctgtctgttcctcccctaatcctctattttatttttattttttgtaaagccaagtagctttaagataaagtggtggtcttttggatgagggaataatgcatttttaaataaaataccaatatcaggaagccattttttatttcaggaaatgtaagaaaccattatttcaggttatgaaagtataaccaagcatccttttgggcaattccttaccaaatgcagaagcttttctgttcgatgcactctttcctccttgccacttacctttgcaaagttaaaaaaaaggggggagggaatgggagagaaagctgagatttcagtttcctactgcagtttcctacctgcagatccaggggctgctgttgcctttggatgccccactgaggtcctagagtgcctccagggtggtcttcctgtagtcataacagctagccagtgctcaccagcttaccagattgccaggactaagccatcccaaagcacaagcattgtgtgtctctgtgactgcagagaagagagaattttgcttctgttttgtgtttaaaaaaccaacacggaagcagatgatcccgagagagaggcctctagcatgggtgacccagccgacctcaggccggtttccgcactgccacaactttgttcaaagttgcccccaattggaacctgccacttggcattagagggtctttcatggggagagaaggagactgaattactctaagcaaaatgtgaaaagtaaggaaatcagcctttcatcccggtcctaagtaaccgtcagccgaaggtctcgtggaacacaggcaaacccgtgattttggtgctccttgtaactcagccctgcaaagcaaagtcccattgatttaagttgtttgcatttgtactggcaaggcaaaatatttttattaccttttctattacttattgtatgagcttttgttgtttacttggaggttttgtcttttactacaagtttggaactatttattattgcttggtatttgtgctctgtttaagaaacaggcacttttttttattatggataaaatgttgagatgacaggaggtcatttcaatatggcttagtaaaatatttattgttcctttattctctgtacaagattttgggcctctttttttccttaatgtcacaatgttgagttcagcatgtgtctgccatttcatttgtacgcttgttcaaaaccaagtttgttctggtttcaagttataaaaataaattggacatttaacttgatctccaaa

SEQ ID NO: 12487 - DNA, 3689 bp, Homo sapiens
atttagtccgcaacacctcgctccccaggaggtctgccagcctggactggaagcgtgcaacactccagagtcgtaggagtgaacactgcacaggaatctctgcccatctcaggagaaaccaaacctggggaaaatgtttgcggtccacttgatggcattttacttcagcaagctgaaggaggaccagatcaagaaggtggacaggttcctgtatcacatgcggctctccgatgacacccttttggacatcatgaggcggttccgggctgagatggagaagggcctggcaaaggacaccaaccccacggctgcagtgaagatgttgcccaccttcgtcagggccattcccgatggttccgaaaatggggagttcctttccctggatctcggagggtccaagttccgagtgctgaaggtgcaagtcgctgaagaggggaagcgacacgtgcagatggagagtcagttctacccaacgcccaatgaaatcatccgcgggaacggcatagagctgtttgaatatgtagctgactgtctggcagatttcatgaagaccaaagatttaaagcataagaaattgccccttggcctaactttttctttcccctgtcgacagactaaactggaagagggtgtcctactttcgtggacaaaaaagtttaaggcacgaggagttcaggacacggatgtggtgagccgtctgaccaaagccatgagaagacacaaggacatggacgtggacatcctggccctggtcaatgacaccgtggggaccatgatgacctgtgcctatgacgacccctactgcgaagttggtgtcatcatcggaactggcaccaatgcgtgttacatggaggacatgagcaacattgacctggtggagggcgacgagggcaggatgtgcatcaacacagagtggggggccttcggggacgacggggccctggaggacattcgcactgagttcgacagggagctggacctcggctctctcaacccaggaaagcaactgttcgagaagatgatcagtggcctgtacctgggggagcttgtcaggcttatcttgctgaagatggccaaggctggcctcctgtttggtggtgagaaatcttctgctctccacactaagggcaagatcgaaacacggcacgtggctgccatggagaagtataaagaaggccttgctaatacaagagagatcctggtggacctgggtctggaaccgtctgaggctgactgcattgccgtccagcatgtctgtaccatcgtctccttccgctcggccaatctctgtgcagcagctctggcggccatcctgacacgcctccgggagaacaagaaggtggaacggctccggaccacagtgggcatggacggcaccctctacaagatacaccctcagtacccaaaacgcctgcacaaggtggtgaggaaactggtcccaagctgtgatgtccgcttcctcctgtcagagagtggcagcaccaagggggccgccatggtgaccgcggtggcctcccgcgtgcaggcccagcggaagcagatcgacagggtgctggctttgttccagctgacccgagagcagctcgtggacgtgcaggccaagattcgggctgagctggagtatgggctgaagaagaagagccacgggctggccacggtcaggatgctgcccacctacgtctgcgggctgccggacggcacagagaaaggaaagtttctcgccctggatcttgggggaaccaacttccgggtcctcctggtgaagatcagaagtggacggaggtcagtgcgaatgtacaacaagatcttcgccatccccctggagatcatgcagggcactggtgaggagctctttgatcacattgtgcagtgcatcgccgacttcctggactacatgggcctcaagggagcctccctacctttgggcttcacattctcatttccctgcaggcagatgagcattgacaagggaacactcatagggtggaccaaaggtttcaaggccactgactgtgaaggggaggacgtggtggacatgctcagggaagccatcaagaggagaaacgagtttgacctggacattgttgcagtcgtgaatgatacagtggggaccatgatgacctgtggctatgaagatcctaattgtgagattggcctgattgcaggaacaggcagcaacatgtgctacatggaggacatgaggaacatcgagatggtggaggggggtgaagggaagatgtgcatcaatacagagtggggaggatttggagacaatggctgcatagatgacatccggacccgatacgacacggaggtggatgaggggtccttgaatcctggcaagcagagatacgagaaaatgaccagtgggatgtacttgggggagattgtgcggcagatcctgatcgacctgaccaagcagggtctcctcttccgagggcagatttcagagcgtctccggaccaggggcatcttcgaaaccaagttcctgtcccagatcgaaagcgatcggctggcccttctccaggtcaggaggattctgcagcagctgggcctggacagcacgtgtgaggacagcatcgtggtgaaggaggtgtgcggagccgtgtcccggcgggcggcccagctctgcggtgctggcctggccgctatagtggaaaaaaggagagaagaccaggggctagagcacctgaggatcactgtgggtgtggacggcaccctgtacaagctgcaccctcacttttctagaatattgcaggaaactgtgaaggaactagcccctcgatgtgatgtgacattcatgctgtcagaagatggcagtggaaaaggggcagcactgatcactgctgtggccaagaggttacagcaggcacagaaggagaaataggaacccctgggattggacctgatgcatcttggatactgaacagcttttcctctggcagatcagttggtcagagaccaatgggcaccctcctggctgacctcaccttctggatggccgaaagagaaccccaggttctcgggtactcttagtatcttgtactggatttgcagtgacattacatgacatctctatttggtatatttgggccaaaatgggccaacttatgaaatcaaagtgtctgtcctgagagatcccctttcaacacattgttcaggtgaggcttgagctgtcaattctctatggctttcagtcttgtggctgcgggacttggaaatatatagaatctgcccatgtggctggcaggctgtttccccattgggatgcttaagccatctcttataggggattggaccctgtacttgtggatgaacattggagagcaagaggaactcacgttatgaactagggggatctcatctaacttgtccttaacttgccatgttgacttcaaacctgttaagagaacaaagactttgaagtatccagccccagggtgcagagaggttgattgccagggagcactgcaggaatcattgcatgcttaaagcgagttatgtcagcaccctgtaggattttgttccttattaagtgtgtgccatgtggtggggtgctgtctggggcatctgtttttcattttgcctgtggtttgtgttgcaggtgttgatagttgttttaaggattgttaggtataggaaatccagtaaattaataaaaaaattttgattttccaataaaaaaaaag

SEQ ID NO: 12488 - DNA, 3889 bp, Homo sapiens
gagactgagtattctaccttgtaaatactgttatttgtatatactgtaaatgatgacatcggtgggcactaaccgagcccggggaaactgggaacaacctcaaaaccaaaaccagacacagcacaagcagcggccacaggccactgcagaacaaattagacttgcacagatgatttcggaccataatgatgctgactttgaggagaaggtgaaacaattgattgatattacaggcaagaaccaggatgaatgtgtgattgctttgcatgactgcaatggagatgtcaacagagctatcaatgttcttctggaaggaaacccagacacgcattcctgggagatggtcgggaagaagaagggagtctcaggccagaaggatggtggccagacggaatccaatgaggaaggcaaagaaaatcgagaccgggacagagactatagtcggcgacgtggtgggccaccaagacgggggagaggtgccagccgtggacgagagtttcgaggtcaggaaaatggattggatggcaccaagagtggagggccttctggaagaggaacagaaagaggcagaaggggccgtggccgaggcagaggtggctctggtaggcgaggaggaaggttttctgctcaaggaatgggaacctttaacccagctgattatgcagagccagccaatactgatgataactatggcaatagcagcggcaatacgtggaacaacactggccactttgaaccagatgatgggacgagtgcatggaggactgcaacagaggagtgggggactgaagattggaatgaagatctttctgagaccaagatcttcactgcctctaatgtgtcttcagtgcctctgcctgcggagaatgtgacaatcactgctggtcagagaattgaccttgctgttctgctggggaagacaccatctacaatggagaatgattcatctaatctggatccgtctcaggctccttctctggcccagcctctggtgttcagtaattcgaagcagactgccatatcacagcctgcttcagggaacacattttctcatcacagtatggtgagcatgttagggaaaggatttggtgatgtcggtgaagctaaaggcggcagtactacaggctcccagttcttggagcaattcaagactgcccaagccctggctcagttggcagctcagcattctcagtctggaagcaccaccacctcctcttgggacatgggctcgacgacacaatccccatcactggtgcagtatgatttgaagaacccaagtgattcagcagtgcacagcccctttacaaagcgccaggcttttaccccatcttcaaccatgatggaggtgttccttcaggagaagtcacctgcagtggctacctccacagctgcacctccacctccgtcttctcctctgccaagcaaatccacatcggctccacagatgtcgcctggatcttcagacaaccagtcctctagccctcagccggctcaccagaaactgaaacagcagaagaaaaaagcctccttgacttctaagattcctgctctggctgtggagatgcctggctcagcagatatctcagggctaaacctgcagtttggggcattgcagtttgggtcagagcctgtcctttctgattatgagtccacccccaccacgagcgcctcttcaagccaggctccaagtagcctgtataccagcacggccagtgaatcatcctctacaatttcatctaaccagagtcaggagtctggttatcagagcggcccaattcagtcgacaacctatacctcccaaaataatgctcagggccctctttatgaacagagatccacacagactcggcggtaccccagctccatctcttcatcaccccaaaaggacctgactcaggcaaagaatggcttcagttctgtgcaggccacgcagttacagaccacacaatctgttgaaggtgctacaggctctgcagtgaaatctgattcaccttccacttctagcatcccccctctcaatgaaacggtatctgcagcttccttactgacgacaaccaatcagcattcatcctccttgggtggcttgagccacagtgaggagattccaaatactaccaccacacaacacagcagcacgttatctacgcagcagaataccctttcatcatcaacatcttctgggcgcacttcgacatccactcttttgcacacaagtgtggagagtgaggcgaatctccattcttcctccagcactttttccaccacatccagcacagtctctgcacctcccccagtggtcagtgtctcctccagtctcaatagtggcagtagcctgggcctcagcctaggcagcaactccactgtcacagcctcgactcgaagctcagttgctacgacttcaggaaaagctcctcccaacctccctcctggggtcccgccgttgttgcctaatccgtatattatggctccagggctgttacatgcctacccgccacaagtatatggttatgatgacttgcagatgcttcagacaagatttccattggattactacagcatcccatttcccacacccactactccgctgactgggagggatggtagcctggccagcaacccttattctggtgacctcacaaagttcggccgtggggatgcctcctccccagccccggccacaaccttggcccaaccccaacagaaccagacgcagactcaccataccacgcagcagacattcctgaacccggcgctgcctcctggctacagttacaccagcctgccatactatacaggggtcccgggcctccccagcaccttccagtatgggcctgctgtgttccctgtggctcctacctcttccaagcagcatggtgtgaatgtcagtgtgaatgcatcggccacccctttccaacagccgagtggatatgggtctcatggatacaacactggtgtttcagtcacctccagtaacacgggcgtgccagatatctcgggttctgtgtactccaaaacccagcagtcctttgagaaacaaggttttcattccggtactcctgctgcttccttcaacttgccttcagccctaggaagtgggggccccatcaatccggccacagctgctgcctacccacctgccccctttatgcacattctgaccccccatcagcagccgcattctcagatccttcaccatcacctgcagcaggatggccagacgggcagcgggcaacgtagccagaccagctccatcccgcagaagccccagaccaacaagtctgcctacaacagctacagctggggggccaactgaggccctgaccctcttctcccggtcccatcttctgagagggcttctcagcctggaaactatggaaacagcatcaaagagaaaggaatgtggggggtttccgctgccccccacccccagcggcccaccccatgcctcagcttcatgtctgtcccattcctataccatccccaccctgttgtatgtattataggatttgtattttctccttttttttcccccttccattccttctcccctcttgcattcaagattatgaaactttgctatgggccctgcacttcctttgcttcctcctgttcaccctggtggtgtacggatgaggcggggaggtgggacccccaaacatatatcagcccaacagccctaagtctccttctttattattaggaaaacaacaacaacaacaaacaaaaaaatggcgtcatgaatatgaacagcattgtcagatgaattagttgaagtggttttttttttgtttttttttttttttttgtactgtgtcctcaaatttaatggattaatgtgtcttgtatatataaaaagaaaacctctaccttcaaaaaaaaaaaaaaaaaa

SEQ ID NO: 12489 - DNA, 4756 bp, Homo sapiens
gcgacgctcacgaacgatcagagctgcgggcgacgcaacgaagcccggaggccgcaggctgcgcgctccctcgcagcagccgggcgggcaaaagcccccagtcctcggcccccgcgcaagcgacgccgggaaatgcccacatccgggaaacctgcagcggagtgcggcggcggcgacactgagtggaaggcaaaatggcggcggcggcggcggtggcctggtgttaaggggagagccaggtccttacgacccctgggacgggccgcgctggcccgcggcagcccccccgttcgtctccccgctctgccccaccagggatacttggggttgctgggacggactctggccgcctcagcgtccgccctcaggcccgtggccgctgtccaggagctctgctctcccctccagagttaattatttatattgtaaagaattttaacagtcctggggacttccttgaaggatcattttcacttttgctcagaagaaagctctggatctatcaaataaagaagtccttcgtgtgggctacatatatagatgttttcatgaagaggagtgaaaagccagaaggatatagacaaatgaggcctaagacctttcctgccagtaactatactgtcagtagccggcaaatgttacaagaaattcgggaatcccttaggaatttatctaaaccatctgatgctgctaaggctgagcataacatgagtaaaatgtcaaccgaagatcctcgacaagtcagaaatccacccaaatttgggacgcatcataaagccttgcaggaaattcgaaactctctgcttccatttgcaaatgaaacaaattcttctcggagtacttcagaagttaatccacaaatgcttcaagacttgcaagctgctggatttgatgaggatatggttatacaagctcttcagaaaactaacaacagaagtatagaagcagcaattgaattcattagtaaaatgagttaccaagatcctcgacgagagcagatggctgcagcagctgccagacctattaatgccagcatgaaaccagggaatgtgcagcaatcagttaaccgcaaacagagctggaaaggttctaaagaatccttagttcctcagaggcatggcccgccactaggagaaagtgtggcctatcattctgagagtcccaactcacagacagatgtaggaagacctttgtctggatctggtatatcagcatttgttcaagctcaccctagcaacggacagagagtgaaccccccaccaccacctcaagtaaggagtgttactcctccaccacctccaagaggccagactccccctccaagaggtacaactccacctcccccttcatgggaaccaaactctcaaacaaagcgctattctggaaacatggaatacgtaatctcccgaatctctcctgtcccacctggggcatggcaagagggctatcctccaccacctctcaacacttcccccatgaatcctcctaatcaaggacagagaggcattagttctgttcctgttggcagacaaccaatcatcatgcagagttctagcaaatttaactttccatcagggagacctggaatgcagaatggtactggacaaactgatttcatgatacaccaaaatgttgtccctgctggcactgtgaatcggcagccaccacctccatatcctctgacagcagctaatggacaaagcccttctgctttacaaacagggggatctgctgctccttcgtcatatacaaatggaagtattcctcagtctatgatggtgccaaacagaaatagtcataacatggaactatataacattagtgtacctggactgcaaacaaattggcctcagtcatcttctgctccagcccagtcatccccgagcagtgggcatgaaatccctacatggcaacctaacataccagtgaggtcaaattcttttaataacccattaggaaatagagcaagtcactctgctaattctcagccttctgctacaacagtcactgcaattacaccagctcctattcaacagcctgtgaaaagtatgcgtgtattaaaaccagagctacagactgctttagcacctacacacccttcttggataccacagccaattcaaactgttcaacccagtccttttcctgagggaaccgcttcaaatgtgactgtgatgccacctgttgctgaagctccaaactatcaaggaccaccaccaccctacccaaaacatctgctgcaccaaaacccatctgttcctccatacgagtcaatcagtaagcctagcaaagaggatcagccaagcttgcccaaggaagatgagagtgaaaagagttatgaaaatgttgatagtggggataaagaaaagaaacagattacaacttcacctattactgttaggaaaaacaagaaagatgaagagcgaagggaatctcgtattcaaagttattctcctcaagcatttaaattctttatggagcaacatgtagaaaatgtactcaaatctcatcagcagcgtctacatcgtaaaaaacaattagagaatgaaatgatgcgggttggattatctcaagatgcccaggatcaaatgagaaagatgctttgccaaaaagaatctaattacatccgtcttaaaagggctaaaatggacaagtctatgtttgtgaagataaagacactaggaataggagcatttggtgaagtctgtctagcaagaaaagtagatactaaggctttgtatgcaacaaaaactcttcgaaagaaagatgttcttcttcgaaatcaagtcgctcatgttaaggctgagagagatatcctggctgaagctgacaatgaatgggtagttcgtctatattattcattccaagataaggacaatttatactttgtaatggactacattcctgggggtgatatgatgagcctattaattagaatgggcatctttccagaaagtctggcacgattctacatagcagaacttacctgtgcagttgaaagtgttcataaaatgggttttattcatagagatattaaacctgataatattttgattgatcgtgatggtcatattaaattgactgactttggcctctgcactggcttcagatggacacacgattctaagtactatcagagtggtgaccatccacggcaagatagcatggatttcagtaatgaatggggggatccctcaagctgtcgatgtggagacagactgaagccattagagcggagagctgcacgccagcaccagcgatgtctagcacattctttggttgggactcccaattatattgcacctgaagtgttgctacgaacaggatacacacagttgtgtgattggtggagtgttggtgttattctttttgaaatgttggtgggacaacctcctttcttggcacaaacaccattagaaacacaaatgaaggttatcaactggcaaacatctcttcacattccaccacaagctaaactcagtcctgaagcttctgatcttattattaaactttgccgaggacccgaagatcgcttaggcaagaatggtgctgatgaaataaaagctcatccattttttaaaacaattgacttctccagtgacctgagacagcagtctgcttcatacattcctaaaatcacacacccaacagatacatcaaattttgatcctgttgatcctgataaattatggagtgatgataacgaggaagaaaatgtaaatgacactctcaatggatggtataaaaatggaaagcatcctgaacatgcattctatgaatttaccttccgaaggttttttgatgacaatggctacccatataattatccgaagcctattgaatatgaatacattaattcacaaggctcagagcagcagtcggatgaagatgatcaaaacacaggctcagagattaaaaatcgcgatctagtatatgtttaacacactagtaaataaatgtaatgaggatttgtaaaagggcctgaaatgcgaggtgttttgaggttctgagagtaaaattatgcaaatatgacagagctatatatgtgtgctctgtgtacaatattttattttcctaaattatgggaaatccttttaaaatgttaatttattccagccgtttaaatcagtatttagaaaaaaattgttataaggaaagtaaattatgaactgaatattatagtcagttcttggtacttaaagtacttaaaataagtagtgctttgtttaaaaggagaaacctggtatctatttgtatatatgctaaataattttaaaatacaagagtttttgaaatttttttgaaagacagttttagttttatcttgctttaaccaaatatgaaacataccccctattttacagagctcttttttcccctcataaccttgtttttggtagaaaataagctagagaaattaagccatcgtgttggtgagtgttcctaggctaatgataatctgtataattcacatcctgaaactaaggaatacagggttgaaaaaatattaatatgtttgtcagaaggaaaaataatgcatttattttcccccccaccccccgccccatggaatatttaatctatttaatcttcttgcatttatttctcaagaattactggctttaaaagaagccaaagcactactagctttttttccatattggtatttttgatgctgcttccaattttaaaagggaacaaagctgccataaatcgaaatgttcaatactaaaagctaaaatatttctcaccatcg

SEQ ID NO: 12490 - DNA, 2216 bp, Homo sapiens
cgtctctctgcccccgccgctgccatggcggcagctccgccgctttccaaggccgagtatctgaagcgttacttgtccggggcagatgccggcgtcgaccggggatctgagtccggtcgcaagcgtcgcaaaaagcggccgaagcctggcggggccggcggcaagggaatgcggattgtggatgatgatgtgagctggacagctatctccacaaccaaactagaaaaggaggaagaggaagatgatggagatttgcctgtggtggcagagtttgtggatgagcggccagaagaggtaaagcagatggaggcctttcgttccagtgccaaatggaagcttctgggaggccacaacgaagacctaccctcaaacagacattttcgtcacgataccccggattcatctcctaggagggtccgtcatggtaccccagatccatctcctaggaaggaccgtcatgacaccccggatccatctcctaggagggcccgtcatgacaccccagatccttctcccctcagaggggctcgtcatgactcagacacatctcctcccaggaggatccgtcatgactcctcagacacttcacccccaaggagggcccgtcatgattctccagatccttctcccccaaggaggcctcagcataattcttcaggtgcatctcctaggagagtccgtcatgattcaccagatccctctcctcctaggcgagcccgtcatggttcctcagatatctcttcccccagaagggtccataacaactcccctgacacatctaggaggactcttggctcttcagacacacagcaactcagaagggcccgtcatgactcccctgatttggctcctaatgtcacttattccctgcccagaaccaaaagtggtaaagccccagaaagagcctctagcaagacttctccacattggaaggagtcaggagcctcccatttgtcattcccaaagaacagcaaatatgagtatgaccctgacatctctcctccacgaaaaaagcaagcaaaatcccattttggagacaagaagcagcttgattccaaaggtgactgccagaaagcaactgattcagacctttcttctccacggcataaacaaagtccagggcaccaggattctgattcagatctgtcacctccacggaatagacctagacaccggagctctgattctgacctctctccaccaaggaggagacagaggaccaaatcttctgattctgacctgtccccgcctcgaaggagtcagcctcctggaaagaaggctgcacacatgtattctggggctaaaactgggttggtgttaactgacatacagcgagaacagcaggagctcaaggaacaggatcaagaaaccatggcatttgaagctgaatttcaatatgctgaaaccgtatttcgagataagtctggtcgtaagaggaatttgaaactcgaacgtttagagcaaaggaggaaagcagaaaaggactcagagagagatgagctgtatgcccagtggggaaaagggcttgcccagagccggcaacagcaacaaaatgtggaggatgcaatgaaagagatgcaaaagcctctggcccgctatattgatgacgaagatctggataggatgctaagagaacaggaaagagagggggaccctatggccaacttcatcaagaagaataaggccaaggagaacaagaataaaaaagtgagacctcgctacagtggtccagcacctcctcccaacagatttaatatctggcctggatatcgctgggacggagtggacagatccaatggatttgaacagaagcgctttgccaggcttgccagcaagaaggcagtggaggaacttgcctacaaatggagtgttgaggatatgtaactttcctgaggctgtgggggtggctgggctgtggtagtgggcataggcagcgagatatccagtggtaacagttgtctgtgctaataattggagcccacacagaccagcaacttgttgaatgccagttttgaccacagaagaatattcgagacctgatgtttggactgaggtacctgtacttcttgggtgtgacagcaccggctgttgctggctttcagaggaagcattgatttctcattgaccagggtttgttcttggtagggtttttctttttcttttttaaataaacatgtatttatttttttaaaaaaaaaaaaaaaaaaaaaaaaaaa

SEQ ID NO: 12491 - DNA, 7605 bp, Homo sapiens
gggatgaggagggggaaaccgggggaaaagagggaaaagagccgggagagaggtgggcaaggacgagggcgagggcacggccgggtcctggctggccaaacgaggctcgcggaagcagcagccgccgcctgaccgcagatatggaagaaagtagcagtgttgccatgttggtgccagatattggggaacaggaagctatactgactgctgaaagtatcatcagtccttcattggaaattgatgaacaaagaaaaactaaaccagatccattaatccatgttatccagaagttaagcaagatagtggaaaatgaaaagtcacaaaaatgtcttttaattgggaagaaacgcccacgttcaagtgctgcaacacactctcttgaaacccaagaactttgtgagattccggctaaagtaatccagtcacctgctgctgatactagaagggctgagatgtcacaaacaaattttacccctgacactcttgcccagaatgaagggaaggctatgtcttatcagtgtagcctttgtaagtttctatcatcatccttttccgtgttaaaagatcatattaagcaacatggtcagcaaaatgaagtgatactgatgtgctcagagtgccatattacatctagaagccaggaggaacttgaagcccacgtggtgaatgaccatgacaatgatgccaatatccacacccaatccaaagcccaacagtgcgtaagcccctccagctctttgtgtcggaaaaccacagaaagaaatgaaaccattccagatatcccagtaagtgtggacaatctacagactcatactgtccaaactgcatctgtggcagaaatgggtaggaggaaatggtatgcatacgaacagtacggcatgtatcgatgcttgttttgtagttatacttgtggccagcagagaatgttgaaaacacacgcttggaaacatgctggggaggttgattgctcctatccaatctttgaaaatgaaaatgaacccctaggcctgctggattcttcagcagctgctgcgcctggtggggtcgatgcagtcgtcattgctattggagagagtgaactgagtatccacaatgggccatcagtgcaagtgcagatttgcagctcagaacagttatcatcttcatctcctttagaacagagtgcagaaagaggagtacacctaagtcagtcagttaccctggaccccaatgaggaagaaatgctagaagtgatttctgatgcagaggagaatctgattcctgatagcctgcttacatcagcacagaaaatcatcagcagcagccccaataaaaaagggcatgttaacgtgatagtggagcgattgccaagtgctgaagaaaccctttcacagaagcgcttcctcatgaacactgaaatggaagaagggaaggacctgagcctgacagaagctcagattgggcgcgaaggaatggatgatgtttatcgtgctgataaatgtactgttgatattgggggattgatcataggctggagcagttcagagaaaaaagacgagttaatgaataaaggcctggctactgatgagaatgccccaccaggccggagaaggacaaattctgagtctcttcgattacactcattagctgcagaagcccttgtcacaatgcctataagagctgcagagttgacaagagccaacctggggcactatggagatataaaccttttagatccagatactagtcaaaggcaagtagatagtacattggcagcgtactcaaaaatgatgtcgccacttaaaaactcttcagatggattaactagtcttaaccaaagcaactccaccttggtagcactcccagagggtaggcaggaattgtcagatgggcaggttaagacaggcatcagcatgtccttactcaccgtcattgaaaaattgagagaaaggacagaccaaaacgcttcagacgatgacattttgaaagagttgcaggacaacgcccagtgccaacccaacagcgatacaagtttgtccggaaacaatgtggtggaatacatcccgaatgctgaacgaccctaccgttgccgcctgtgtcactacacaagtggcaacaagggctacatcaagcagcacttacgagtccatcgacagagacagccttatcagtgtcctatctgcgagcacatagcggacaacagcaaagatttggagagtcacatgatccaccactgtaagacaagaatataccagtgcaagcagtgtgaagaatccttccattataagagtcaattgaggaaccatgagagagaacagcacagtcttccagataccttgtcaatagcaacttctaatgagccaagaatttccagtgatacagctgatggaaaatgtgtccaggaagggaataagtcttcagtccagaaacaatatagatgtgatgtgtgtgattatacaagtacaacatatgttggtgtcagaaaccacaggcgaatccataactctgataagccgtacagatgctctctgtgtgggtatgtgtgtagccatcctccttctttgaagtctcatatgtggaaacatgcaagtgaccaaaattacaactacgaacaagtaaacaaggctattaacgacgcgatttcacaaagtggcagagttctggggaaatcccctggaaagactcaattaaagagcagtgaagagagtgcagatcccgtcactggaagttcagaaaatgcagtgtcatcttcagaactgatgtcccagactcccagtgaagttctgggtaccaacgagaatgagaaactgagccctacaagtaatacctcatatagtttagaaaaaatctccagtctggcccctcctagcatggagtactgcgttttactcttctgctgttgtatttgtggttttgaatcaaccagcaaagaaaacctcttggatcatatgaaagagcacgagggtgaaattgtaaacatcatcctgaataaggaccacaatacagctctaaacacaaattaggtggaataatgactcgagcaggaaagcagtagaagaggattccttcaccacagtttcacctttacgctgtcagacaacttcctgccacagaagaagtcgttgatgtgatttttgaggaaatgacagatgtgactttggaaccaaacttgtaataaaaggaattccaaatggacaagcagtaatgatatttaaatattttgagtgagggggagtgggtcaaagaggaagtagaggtgtaatcctgtattaaccctctgtcaccccttcttagtgtcgagtgtatttattaataaaagcttattagagtgtagaaatgccagcaagagttaagaaagggcttttcaggaactattctaaaagtcataaaagggtcacagtcttaagcagagcttagttttcttctcacttgtcaaatgcagactgtgaggcctccagtgagaaatgggaggcagttctgggagggggttttttcagtgtcaccaacagagtcaacaaggaaacataattagagggctttgaaatgatctactgaaatacctaaattgatagaaattaatcatactcaatctaggacatgttcctttactccttaaaaaagaaaggaaagatctctaaattcaaagctagattgtaaataggcattcaagaagtattgtcttaaatttacgatgaatttcttgtgagcagaggacgaaacaggtgaattctcaccagactcaaaccagatctcaattcgtagtaatgctaaatcgtcttccgtgttctcagaggttcttttcagtgtctgtcagaacttggcatactttctccatagtacgtagaccttctaatactctgctaaatgaaaccacacttgttatctgaaagtgtgtgaaagaaacaatgtatgaaaatttacatttgatcatccggcattggaaatagtttgaactatttccaaaaatcccttaggggatgaggggtgaaatttaaaagctcctgaaaatgagtactgctgtgttgagcttttctttcctggggtatattaatttagttatatttagcagaagaggaatataaccaaatgtgactaaaatatagcagaaattcaggttgtttgtaaaaattttaataacaaatagcatttggcaagtctataggattcttcctatctggaaattctattttgttagagtgcgataggacatatggaaaaccaacacaaagtgctttagcattaaaactcaccatcaaatagatgtaatcttattaattacacattttgtattttaattatttcaaggagtgaagaaaacagggtgtttttgtttttgtagttctgattactcatttatgcattgttttgtttaagtaaattctgcctacaagtgaaaaggtcggtgcgctcttctgtgcaccatcctcacggtgctatttccgaatatctgaatattgatttctaacacctggatgaggctgtgaccgatcaacttggaacactgtaaaggttttcgaatgggatacgctgtaggcacgttttaagaagtattctgttcctaaagtccaggtatgattggattaatatttataaaattattattaggaattatttaagtggggccaggcatcttgcaacattttctgattttttttttctttctttctaatctcattttggtgatatttaaacaaacataaatgattgtaactttgcagcttttttatttaggtagctttaatttatttatgaaagttaatccatttctgatacgtggtttttaaaaatatgaaatggatttatatatactatattcctcaaatccactgtatgtggacttatattcattttctccttttttcggaattgaaacattttaatttcaaattcaaatagaacatttaaaatgatttcattattattacccatactgttgccactcatattgtaagtcagttttttcattgctggtacaatgactcagtatttctttataaaaatctgttgttctgaaaatcaacaaccttagaaggattttgtcttagaaaatttccttggctttagttttatatcatatttagaaaataataatgaaaagcatccccaaaatttcaatgatgtgaatttttaaattacctttatttctttaaactaattccattgattgttacttaaattttccacctggaatcatggatttaaaatttccccacctcatggggaaaaaactaacccagaagttcaaagcctttaaagtttcatctgattctggccttagaattgtccttaaaagctttctcctggccgataggaggaagcatatatcaaggaggttctttcccttcccattatcattttgtggcaagccttaagttaacaatgtgtctaccaagaacaattgagttttctaaaagtaataatgaagattatgcaattctaactgtagaagagatagctattaaaataatcagtagcctgggcatagtggctcacacctgtaatcccaatactttagaaggccaaggctggaggactgcttgagtccagaagtttaagaccagcctgggcaacacggggagaccctgtctctacaagaaattaaaaattagccaggcatagttggcacgtgcctgtagcaccagctacttgggaggttaaggtgggaggatcacttgagcctgggagatagaggcttgcagtgagccgtgatggcaccattgcactccaaccggggtgacagatgaggtcctctgtttacctccccccccaaaaaaaaaattcagtaggaattccttcatagaataacatgttatttattggtattgacttcttattagacagagctcatagtatttgttttctgctccgaacacttaaaaaatactaagacgtgatagtgaaaatagttttgaaaagaaactacatatggcaaaggtggggaggggggaagatgatgcattctgatcattataaagaatacttttcagggctctatcattttctccctttctctaatcatccagaatatggcgggtgtcccagtgttcaacagtatcatgctaatattccatttgatcggtagtccaagttctttggccagatggtgcaatgttgtgacaccgaccgaagcctttgttctggatctttcttcctattgaaggtggctgctggtggcttcataattttctgttttttttctcacaaagtaaatggtgggcatccatgtttacattgcaccttcccgtgctgtaattggcttgacaaagacaagcaggcttctctgttgagacttattgtgtttttagttttcatagacacttatttaatctttttaaattgtacagcaaggtgctctaagtaatattcgataaaatatatttaatagaaatttgcgtttgatattcatgaacatgaatacatgtatttttttaagaaataagtattgtgtaacactatggcattgcttctatagccaaagtataaaaatttctggaatactgacatgtaaagactacagttaattctgacactgtatcttattaaaataggatgatttgcattttgtaaaattatcctgcacatcaagctgcatgccttaaagcggaaactctaggactgtgttcatgggagagcagttcatctgttcagaacagtgaggcaaggtctgtagtgcttctttaactacctttggaaatactgtacaatgttagaataatttattttgctttacaggagtttgtcatgtattgactttaatattgtattttggtaataaattttttgttaaaaaaaacttggcttcaagttctattaaccacaggttgtgttcattcttttcctggaaatgatgactttattgcttagaaagttgtaaataattaaaagcttcccaagagttaaatgaaggttatgatgactcttgataacttgttaatctgttgctgactagcattagactgttacacgaagataaactgaataagcatttagctttttaaatcattttaaaaattaagtctaattttgaagcttttttccttgctacccagttcagtttctcttccaaatgtgacacgcttatatgctttcaattctgatatagtcaaagtgctaaagactagttctgctattgacgaaggaattagcattccttagtgaaggccaaaaactacagtgatatgttcacaccttgatcactctgtcgtctatacagacagctattgacatatttgttgcattgacgaagctaacatcatctgactgtatcgtgggtctggttatccatttgtgccctagaatcctgggtcacctcagttgaaagtgaccaaggccaaatatttcgtcccatgcttcccagggacaacataatcatatcccctgtctttgaaaaacccaatctgaaactgtgtcactaacctccaaattaaagaatccgagcatggaagctctagaacgtatggtccagtgtggcagccactataatatctaagtgtaaaatacatagcagttgcaaagacttagtacaaaaagaatggaaatgtattaacagttttttatattgattacatgttgaaatgatattttggtttaaataaaatattaaaatcaaaaaaaaaaaaaaaaaca

SEQ ID NO: 12492 - DNA, 4925 bp, Homo sapiens
gaagcggcgggcggggtggagcagccagctgggtccggggagcgccgccgccgcctcgatggggtgttgaaaagtctcctctagagctttggaaggctgaatgcactaaacatgaagagcttgaaagcgaagttcaggaagagtgacaccaatgagtggaacaagaatgatgaccggctactgcaggccgtggagaatggagatgcggagaaggtggcctcactgctcggcaagaagggggccagtgccaccaaacacgacagtgagggcaagaccgctttccatcttgctgctgcaaaaggacacgtggaatgcctcagggtcatgattacacatggtgtggatgtgacagcccaagatactaccggacacagcgccttacatctcgcagccaagaacagccaccatgaatgcatcaggaggctgcttcagtctaaatgcccagccgaaagtgtcgacagctctgggaaaacagctttacattatgcagcggctcagggctgccttcaagctgtgcagattctctgcgaacacaagagccccataaacctcaaagatttggatgggaatataccgctgcttcttgctgtacaaaatggtcacagtgagatctgtcactttctcctggatcatggagcagatgtcaattccaggaacaaaagtggaagaactgctctcatgctggcctgtgagattggcagctctaacgctgtggaagccttaattaaaaagggtgcagacctaaaccttgtagattctcttggatacaatgccttacattattccaaactctcagaaaatgcaggaattcaaagccttctattatcaaaaatctctcaggatgctgatttaaagaccccaacaaaaccaaagcagcatgaccaagtctctaaaataagctcagaaagaagtggaactccaaaaacacgcaaagctccaccacctcctatcagtcctacccagttgagtgatgtctcttccccaagatcaataacttcgactccactatcgggaaaggaatcggtattttttgctgaaccacccttcaaggctgagatcagttctatacgagaaaacaaagacagactaagtgacagtactacaggtgctgatagcttattggatataagttctgaagctgaccaacaagatcttctctctctattgcaagcaaaagttgcttcccttaccttacacaataaggagttacaagataaattacaggccaaatcacccaaggaggcggaagcagacctaagctttgactcataccattccacccaaactgacttgggcccatccctgggaaaacctggtgaaacctctcccccagactccaaatcatctccatctgtcttaatacattctttaggtaaatccactactgacaatgatgtcagaattcagcaactgcaagagattttgcaagatctacagaagagattagagagctctgaagcagagagaaaacagctacaggtcgaactccaatcccgaagggcagaactggtatgcttaaacaacactgagatttcagagaacagctctgacctcagccagaaacttaaagaaactcagagcaaatacgaggaggctatgaaagaagtccttagtgtgcagaagcagatgaaactcggtcttgtctcacctgaaagcatggataattattcacatttccacgagctgagggtcacggaagaggaaataaatgtgctaaagcaggatctgcagaatgcattagaagaaagtgaaagaaataaagagaaagtgagagagttagaggaaaaactggtagagagggagaaaggtacagtgattaagccacctgtggaagagtacgaggaaatgaaaagttcatattgctctgttattgagaatatgaataaggagaaagcatttttgtttgagaaataccaagaagcccaagaagaaatcatgaaattaaaagacacactaaaaagtcagatgacacaggaagccagtgatgaagctgaggacatgaaagaagccatgaataggatgatagatgaactcaataaacaggtgagcgagctgtcacagctgtacaaagaagcccaggctgagctggaggattacaggaagaggaaatctctagaggatgtcacagctgaatatatccataaagcagagcatgagaaactgatgcaattgacaaacgtgtccagggctaaagcagaagatgcactgtctgaaatgaagtctcagtattcaaaagtgttgaatgagttgacccagctcaaacaactggtggatgcacaaaaagagaactctgtctctatcacagaacatttgcaagtgataaccacgctgcggactgcagcaaaagagatggaagaaaaaataagcaatcttaaggaacaccttgcaagcaaggaagtggaagtagcaaagctggagaaacaactcttagaagagaaagctgctatgactgatgcaatggtacctcggtcttcctatgaaaaactccagtcatccttagagagtgaagtgagtgtgttggcatcgaaattaaaggaatctgtgaaagagaaagagaaggtccattcagaggttgtccagattagaagtgaggtctcacaggtgaaaagagaaaaggaaaatattcagactctcttgaaatccaaagagcaagaagtaaatgaacttctgcaaaaattccagcaagctcaggaagaacttgcagaaatgaaaagatacgctgagagctcttcaaaactggaggaagataaagataaaaagataaatgagatgtcgaaggaagtcaccaaattgaaggaggccttgaacagcctctcccagctctcctactcaacaagctcatccaaaaggcagagtcagcagctggaggcgctgcagcagcaagtcaaacagctccagaaccagctggcggaatgcaagaaacaacaccaggaggtcatatcagtttacagaatgcatcttctgtatgctgtgcagggccagatggatgaagatgtccagaaagtactgaagcaaatccttaccatgtgtaaaaaccagtctcaaaagaagtaaagtggattccttggcaggacactgccccttgtcatctgtctttgtgttagatccagagttgtcggcagccgctgccattgttctcattcgtggtatgcactgtggcctagcgtagcttcttccctttccaaaggtttctgaggacttctcccaggagaagactgcccgcctcagaactgcttagagacttcaaaccagcagaggtgaaagtccctgtcatcccttcagattccagagctgggatcagccatgcccagaggtctggtcctgatgctggcaggggggccccctcctccatccctgactggctgagtggctttatcaccaccgagtgatgtgctgaggcctcctgcagtgaatgctccttccattcctgtactcgggcagtgccattcagcacaggagagctctttttgcctttggctttcaattccaaaacatgatttaatttctaactaaattagtatggcactagttatgaagtatctgcttaaaacccttcatcatgatatcctgtggatttaaaaactctaattccatgttttcttcccatctgccttatatatctcatcaccctgcttatcaatattcagtttgatgagcactattaactaaaatatgaaacttaaaaacaaaagcaagttgtccttaaaagttctttttttaagtaaattgttgacatactgcaaattttctatgcaaacttgcctcctgctgttatctgtgaagctcaggaaatccaaacatttgtgtttcaacaagggacagtaaactgtgtgtttacagccaaaagaaatgcctcatagttcttaacctcaacttttgtagaagtatttttttctctgtaatatttttattggctcataaagatgttttcatatctgaactcctaaataagtgaaattacagtagattatattaacaaaatactttttaggtagccatgcttgagactttttaaaaatataactttttccttaaagttttcagctatagcaaaaggtagttatgtatgccagacctaatatgagctgccaccaacacccctagaactttcagccatggtgtcttcagaattgtagcgcatttctgaatctagcaaatcctccttttacccgttgaatgttttgaatgccctgactctaccagcgcccataaatgatctctagaaggactgttagtaccaatctgtttttcaactttgaagctaaaaaccctgatatggtaatattatggtgcatagcagaggtctcggaaaaaaaatatttctgttcactttactttcaggttaaaaatgtttctaacacgcttgcaacttcccttatggcattaatcttgttgagggagagagacagaatcctggactctccaaagtatttaactgaaagtagggcctgctctgacagggcccatgtcccacaaggctgcttggcctcagtgggtgcttggctgtgctggatgatatgttgatctgtattggataaggaccaatgacagcaaagcaaaaatggctttaaagcttggtgttacttttcttaagttgtttaattatagttaagcaatttcaaaaatgctccaaagaaatgtgaaaggaccttttgtcacagcacttcagaaaatacacaacagccccttctgcccccgcacagaaatgctgcagagtatataaaacttgagacatttttgtaggatgcctgacgaggtgtagccttttatcttgtttccggatgcatatttattacgagtactctggttaaatattgaaaagttatatgctgtagtttttagtattttgtctttgtaatttacagaagttattggagaaaataaacttgtttcattttgcaaaaaaaaaaaaaaaaaaaaaaaaa

SEQ ID NO: 12493 - DNA, 2117 bp, Homo sapiens
gtgggagcccgtggcctttaaagtgccgttcagccttttcctccaggggtgctttgtaaacacggctgtgctcagggctcgcgggtgaccgaaaggatcatgaactagtgacctggaaagggtactagatggaaacttgagaaaggactgcttattgataacagctaaggtattcctggaagcagagtaaataaagctcatggcccaccagctagaaagtattcttgccatgagaaaaagaatgtgataagttattcaacttatgaaattcaagttacatgtgaattctgccaggcaatacaaggacctgtggaatatgagtgatgacaaaccctttctatgtactgcgcctggatgtggccagcgttttaccaacgaggatcatttggctgtccataaacataaacatgagatgacactgaaatttggtccagcacgtaatgacagtgtcattgtggctgatcagaccccaacaccaacaagattcttgaaaaactgtgaagaagtgggtttgtttaatgagttggcgagtccatttgagaatgaattcaagaaagcttcagaagatgacattaaaaaaatgcctctagatttatcccctcttgcaacacctatcataagaagcaaaattgaggagccttctgttgtagaaacaactcaccaggatagtcctttacctcacccagagtctactaccagtgatgagaaggaagtaccattggcacaaactgcacagcccacatcagctattgttcgtccagcatcattacaggttcccaatgtgctgcttacaagttctgactcaagtgtaattattcagcaggcagtaccttcaccaacctcaagtactgtaatcacccaggcaccatcctctaacaggccaattgtccctgtaccaggcccatttcctcttctgttacatcttcctaatggacaaaccatgcctgttgctattcctgcatcaattacaagttctaatgtgcatgttccagctgcagtcccactcgttcgaccagtcaccatggtgcctagtgttccaggaatcccaggtccttcctctccccaaccagtacagtcagaagcaaaaatgagattaaaagctgctttgacccagcaacatcctccagttaccaatggtgatactgtcaaaggtcatggtagcggattggttaggactcagtcagaggaatctcgaccgcagtcattacaacagccagccacatccactacagaaactccggcttctccagctcacacaactccacagacccaaagtacaagtggtcgtcggagaagagcagctaacgaagatcctgatgaaaaaaggagaaagtttttagagcgaaatagagcagcagcttcaagatgccgacaaaaaaggaaagtctgggttcagtctttagagaagaaagctgaagacttgagttcattaaatggtcagctgcagagtgaagtcaccctgctgagaaatgaagtggcacagctgaaacagcttcttctggctcataaagattgccctgtaaccgccatgcagaagaaatctggctatcatactgctgataaagatgatagttcagaagacatttcagtgccgagtagtccacatacagaagctatacagcatagttcggtcagcacatccaatggagtcagttcaacctccaaggcagaagctgtagccacttcagtcctcacccagatggcggaccagagtacagagcctgctctttcacagatcgttatggctccttcctcccagtcacagccctcaggaagttgattaaaaacctgcagtacaacagttttagatactcattagtgacttcaaagggaaatcaaggaaagaccagtttccatttatgcgaaatctgtggttgtaaattttttttttttacttgaaattaaatttggctctaaagttggtgtagcagcagttgatcagactgaaaaacggtttttagtctctggaaaaagactgattttgctttttttataaatattattagatttattaatttttctgtgctcaatgtgtaaattgtattataattcattgtgatttatttcacttttaatttgctggtgttttaataaatgggggtgttactgaaaaaaaa

SEQ ID NO: 12494 - DNA, 4414 bp, Homo sapiens
gcggccgccatgtggtgcctgcactgcaactcggagaggacccagtcccttctggagctagagcttgacagcggcgtcgagggcgaggcccccagcagtgagactggcacatccctggacagcccctcagcctacccccagggccccttggtgcccggttccagcctgagcccggatcactacgagcacacgtcagtgggagcctatgggctgtactcggggccgccggggcaacagcagcgcacgcggaggcccaagctgcagcactcgacctccatcctgcgcaagcaggctgaggaggaggccatcaagcgctcacgctcactctccgagagctatgagctctcctcggacctgcaggacaagcaggtggagatgctagaacgaaagtatggggggcgcctggtaacccgccatgcggcccgcaccatccagacggcgtttcgccagtaccagatgaacaagaacttcgagcgcttgcgcagctccatgtcagagaaccgcatgtcacgccggattgtgctgtccaacatgaggatgcagttctcctttgaggggcctgagaaagtgcacagctcctacttcgaggggaagcaggtctcagtgactaacgacggctcccagctgggagccctggtgtcccctgagtgtggtgacctcagcgagcccaccaccctcaagtctccggccccctccagtgactttgcggacgccatcaccgagctggaggacgccttctctaggcaagtgaaatcactggccgagtccatcgacgatgccctcaactgccgcagcctgcacactgaggaggcaccggccctggatgcggcgcgggcccgggacaccgaaccccagacagccctgcacggcatggaccaccgcaaactggacgagatgacggcctcgtacagtgatgtcaccctgtacatcgatgaggaggagctgtcgccccctctgcccctctcgcaggcaggggaccggccgtccagcaccgagtcggacctgcggctacgggctgggggcgcagccccagactactgggccctggcccacaaagaggacaaggctgacacggacacgagctgccggagcacgccgtcgctggagcggcaggagcagcggctgcgggtggagcatctgccgctgctcaccatcgagccacccagcgacagctctgtggaccttagtgaccgctcggagcgggggtcactcaagaggcagagtgcttacgagcgcagccttggcgggcagcagggcagtcccaagcatggtccccacagcggcgcccccaagagcctcccccgggaggagcctgagttgcggccccggccccccaggcccctggacagccacttggccatcaatggctcagccaaccggcagagcaagtctgagtcggactactcagacggtgacaatgacagcatcaacagcacgtccaactccaacgataccatcaactgcagctccgagtcatcgtcccgtgacagcctgcgggagcagacgctcagcaagcagacctaccacaaggaggcccgcaacagctgggactcgcctgcctttagcaacgatgtcatccgcaagaggcactaccgcatcggcctgaacctcttcaacaagaagcctgagaagggagtccagtacctcatcgagcgtggctttgtgcccgacacgcccgtcggggtggcccacttcctgctgcagcgcaagggcctcagccggcagatgatcggcgagttcctgggcaaccggcagaagcagttcaaccgtgacgtgctcgactgcgtcgtggacgagatggacttctctaccatggagctggatgaggccctcaggaaattccaggcgcacatccgtgtccaaggggaggctcagaaagtggagcggctcatagaggcgttcagccagcgctactgcatctgcaaccctggggtggtgcggcaattccggaacccagacaccattttcatcctggccttcgccatcatcctgctgaacaccgacatgtacagccccaatgtcaagcccgagcggaaaatgaagctagaggacttcatcaagaacctccgaggtgtggacgatggtgaggacattccccgtgagatgctgatggggatctatgaacggatccgtaagcgagagctaaagaccaatgaggaccatgtgtcccaggtgcagaaggtggagaagctcattgtggggaaaaagccgatcggatccctgcatcccgggctcggctgtgtgctctctctgccccaccgtcggttggtctgctactgccggctctttgaggttccagacccaaacaagccccagaaactcggactacaccagcgagaaatcttcctgttcaacgacctcctggtggtcaccaagatcttccagaagaagaagaactcggtgacgtacagcttccgacagtccttctccttgtacggcatgcaggtcctgctcttcgagaaccagtactaccccaatggcatccggctcacctcgtctgtccccggagcagatatcaaagtgttaataaacttcaacgcccccaaccctcaagaccggaagaaattcaccgatgacctgcgggagtccattgcggaagtccaagagatggagaagcacaggatagagtcggagctcgagaagcagaaaggcgtcgtgcggcccagcatgtcccagtgctctagcctcaaaaaggagtcgggcaacggaacactgagccgggcctgcctggacgacagctatgccagcggtgagggcctcaagcgcagcgccctcagcagctccctgcgggacctctcggaagccgggaagcgagggcgtcgcagcagtgcgggatcgctagagagcaatgtggaatttcagcctttcgagccactgcagccgtcagtgctgtgctcctaagccatgggacccgaggactgccccccggcgcctgcccaggcggaggccctttcagaaagggcgaagctcacgcctgactctgcgggccgcggggccgcgttcccagtggacagcgtggtgagccgtggccggacggcaggaggagaggggagccccctctggctgtgtgtcaccttggctggctggctggccagggttttgccgatttccctcctcacatccctcccaccctcggtcatatcattgagatcaccgtaccagcaaatctgcaaaccaagcactttgttaatctccagagagagcaaatacagcaatctagagtttagcctttttaaaaatgtgactttaacccgcccacctgtgtcctcccattggcgtggcatttctttggtgtctgctcagaaagaaacagcatgggaccgtgtgattgggtccaggctgggctgtcagggaagcgccctggtgtctccgactcatcaattctcgggttttttaaaagccaggctccccaaagcactctgtctcgcaattttgaggaggttgttccgacctggaagcgttaaactgctgcatgtcatctggcgtcagctgtgaggctgcgctctgcgtgttgtgcgtttgcaaaatgtattggcgtgactgtaaacacatcgttgaagtaaagcgattacatattgagtatgtcagcttttctcaccctcttctgtgctgggaggagagtctaactgtaacctttaggttgttccagaaaagattcaggccgtttggcacagaattgctctttctgaagggtagcagtaatgaataggaacagacagaaaaccccaggaggggctttcaggaaactctccctctccatcgccatcctgcaagctccacagcctcgggctgccagcctgtggcactgtcctcggtgtgtcctggagctgtgctgggcagcagggcctcgcgtaaggaactgctggaacccactgagcccttcccggggtttcccgccgcactcagtgtgttccttcaggctagtgaggtttcattctgttttatttgcaagcttatcaaaagtttgtggaagatacattgttgggttccagaggctggagtcatgctgcccacatcttgtttgggaaagcaaaagctcccagtgagctggtgtccccgtgtgtctttcatgggactgtcccctttagagatcccacctgtcagagccacagcttcggggtcctgtcatcacatcccctgggaggggaggcaggaggaggccgagggccccaggatgtctgcctggtcccttctcactgtgaggacgcccttggcacacctttctcaagtcacacaaattattgcagttacatacagaattgctgacaggagcaggagacgctgagggaaacagctggcaatgtgacaaaagtcttttctgggacaacaatcaaatcatgtatttgtatttttttaagtttaccaatgaattgtacaacaatgtaaaaataaagttcatcctaatatgctgtgc

SEQ ID NO: 12495 - DNA, 6881 bp, Homo sapiens
gcggcggcggcggcggcggcggcagcggcggccaagcggccaggttggcggccggggctccgggccgcgcgaggccacggccacgccgcgccgctgcgcacaaccaacgaggcagagcgccgcccggcgcgagactgcggccgaagcgtggggcgcgcgtgcggaggaccaggcgcggcgcggctgcggctgagagtggagcctttcaggctggcatggagagcttaaggggcaactgaaggagacacactggccaagcgcggagttctgcttacttcagtcctgctgagatactctctcagtccgctcgcaccgaaggaagctgccttgggatcagagcagacataaagctagaaaaatttcaagacagaaacagtctccgccagtcaagaaaccctcaaaagtattttgccatggatatagaagatgaagaaaacatgagttccagcagcactgatgtgaaggaaaaccgcaatctggacaacgtgtcccccaaggatggcagcacacctgggcctggcgagggctctcagctctccaatgggggtggtggtggccccggcagaaagcggcccctggaggagggcagcaatggccactccaagtaccgcctgaagaaaaggaggaaaacaccagggcccgtcctccccaagaacgccctgatgcagctgaatgagatcaagcctggtttgcagtacacactcctgtcccagactgggcccgtgcacgcgcctttgtttgtcatgtctgtggaggtgaatggccaggtttttgagggctctggtcccacaaagaaaaaggcaaaactccatgctgctgagaaggccttgaggtctttcgttcagtttcctaatgcctctgaggcccacctggccatggggaggaccctgtctgtcaacacggacttcacatctgaccaggccgacttccctgacacgctcttcaatggttttgaaactcctgacaaggcggagcctcccttttacgtgggctccaatggggatgactccttcagttccagcggggacctcagcttgtctgcttccccggtgcctgccagcctagcccagcctcctctccctgtcttaccaccattcccacccccgagtgggaagaatcccgtgatgatcttgaacgaactgcgcccaggactcaagtatgacttcctctccgagagcggggagagccatgccaagagcttcgtcatgtctgtggtcgtggatggtcagttctttgaaggctcggggagaaacaagaagcttgccaaggcccgggctgcgcagtctgccctggccgccatttttaacttgcacttggatcagacgccatctcgccagcctattcccagtgagggtcttcagctgcatttaccgcaggttttagctgacgctgtctcacgcctggtcctgggtaagtttggtgacctgaccgacaacttctcctcccctcacgctcgcagaaaagtgctggctggagtcgtcatgacaacaggcacagatgttaaagatgccaaggtgataagtgtttctacaggaacaaaatgtattaatggtgaatacatgagtgatcgtggccttgcattaaatgactgccatgcagaaataatatctcggagatccttgctcagatttctttatacacaacttgagctttacttaaataacaaagatgatcaaaaaagatccatctttcagaaatcagagcgaggggggtttaggctgaaggagaatgtccagtttcatctgtacatcagcacctctccctgtggagatgccagaatcttctcaccacatgagccaatcctggaagaaccagcagatagacacccaaatcgtaaagcaagaggacagctacggaccaaaatagagtctggtgaggggacgattccagtgcgctccaatgcgagcatccaaacgtgggacggggtgctgcaaggggagcggctgctcaccatgtcctgcagtgacaagattgcacgctggaacgtggtgggcatccagggatccctgctcagcattttcgtggagcccatttacttctcgagcatcatcctgggcagcctttaccacggggaccacctttccagggccatgtaccagcggatctccaacatagaggacctgccacctctctacaccctcaacaagcctttgctcagtggcatcagcaatgcagaagcacggcagccagggaaggcccccaacttcagtgtcaactggacggtaggcgactccgctattgaggtcatcaacgccacgactgggaaggatgagctgggccgcgcgtcccgcctgtgtaagcacgcgttgtactgtcgctggatgcgtgtgcacggcaaggttccctcccacttactacgctccaagattaccaagcccaacgtgtaccatgagtccaagctggcggcaaaggagtaccaggccgccaaggcgcgtctgttcacagccttcatcaaggcggggctgggggcctgggtggagaagcccaccgagcaggaccagttctcactcacgccctgacccgggcagacatgatggggggtgcagggggctgtgggcatccagcgtcatcctccagaacctcacatctgaactgggggcaggtgcataccttggggagggagtagggggacacgggggaccaccaggtgtccacggttgtccccagcatctcacatcagacctggggcaggtgcgcagtgtggggaggggatggggtgcgtcagggcccagcatcgccgcctggcatctctctgccgcagcatttccccttctgaaccgtccagtgactgctttcaatctcggtttacgtttagaaattgagttctactgagtagggcttccttaagtttaggaaaatagaaattactttgtgtgaaattcttgaataaataatttattcagagctaggaatgtggtttataaaataggaagtaattgtgtcaggtcacttttatgccacattattttaattgcaaaaaagcatctatatatggaggagggtgggaaaatagaggtaggaaatagtagcctaaaggaaatcgccacacgtctgtctaaacttaggtctcttttctccgtaggtacctccctgggtagttccacacactaggttgtaacagtctctccctgaggagcagactcccagcatggtgtagcgtggccctgtcatgcacatggggtcccgcagcagtgactgtgtgtcctgcagaggcgtgacccaggcccctgtagccctcagcctcctctagaagcttctgtactccttgtaggatcagatcatggaaaacttttctcagtttacttctaagtaatcacagataatacatggccagtaatcccaggctggccattcattcaggttttttaaaggatatttaacttttatggactagaaggaatcacgagggctactgcacaatacatggcctaagttccctctgttccttcctctgaatcgaatggatgtgggtgaccgcccgaaggccttcacaggatggaagtagaatgatttcagtagatactcattcttggaaaatgccatagttttaaattattgtttccagctttatcaaagacatgtttgaaaaataaaaagcatccaagtgagagctggtgagaccacgtgctgctggcgtagtgtaggccagacattgacagtcctgacgggagctcagggctgcccagcgcccagcgtgcacgggacggccccacgacagagggagtcagcccgggaggtcaggagcgcggcgggcgagggccctgtgtggaccacctccaccaagctcagagatttgcaccaggtgccttgttgcctccgctcaggatgaaagaggagctgagagaagtgctctgcctgccagtgcagtgcccagctccaaggctctagagggtgttcaggtgggtctcctggggccatggggagagattggtgcagaccttaccccacagcatacacctgccacagcgaaatccagggtgttggcacctgtgtgtccgtgatgagcctaggaaaccagagcaggggcagaggggcgtcatcctcccaccggacgctgggagctcagaccccaaaactgaaacaccgtggcttcggcggggggtgtgcctcctgatgtcaggagccccatccacgtgtgtccacacagatctcgtcgcagcacggcaggaaggggtgctgcttagggctcattgttggggacatgaccgggttcagcggctagaacatctgccccacagcagcctcctcctccaccgaagagggtagttgtctccctgaagcagtcacagcaggcgtctctgccgctccgtcaccacagtggggttttgttcaggcagatcgcgctggggttctgcacctgcagaaggagaggggtctgttgtcgctggctttcccccaagcaggctcttgcacactctagaaaaaacaccttgtaagtctgtgcatttttattgtcttgataaattgtatttttttctaatggggattgggagatggacttcgtttttaaaaatatgtggattttggttaccaagtttagtgttaatatattccatatacatacaaaactacccggtatgtctggcttttcccttctgtcaggtaatagctaaagtcagcatgattgctccctgtaccaccccaaataagtgagtgcctcaccttgtggggcctgagcagctaccttgagaccatgtgaggtggcacctttccggggtggactcgtgcggccttgaggacaggcacagggcaccctatcccaagccgtccaggcaggaggaaggcagccaaggcaactgggttctgggagccctgggtggggcagctgtggggaggaactgggttcggggagccctgggcggggcggctgttggggggaactgggttcggggtgccctgggcagggggctactggggggcggctgtgaggaggagttgggttcagggagccctgggcggggtggctgtcagggggaactgggttccgggagccctgggccggggcagggggcggctgtaggaaggaactggtttcggggagccctgggcggggcggctgtggggaggaaggtgacgtgcaggggaccagaggctctgcactgctcctaggacagctcatctgtaatcagaaaaaaaataaacaaaatacagaacgctgactcctccgtgagacagatcggggaccttagcactttaatccctcccttctgagcgctcggtgtgcacttttagactatagctgtttcattgacgtgtcactctccatccagtgtccttgatgtggcttttagagacttagcagaaaattcgacacaagcaggaacttgattttttaagaaaaaatattacattttgaggacattttgacaagtaggggaagagagggcttctgttgttttgttttgttttgttttgttaactaaacctgaagtattaattccacaaagacactgtccctcaggaccactcaggtacagctctgccagggacagagtcctgctagtgggaggtctcaggtggggcggtgtgttctgtgccatgaggcagcgacaggtccagatggatgtcgtcaccaccttcctcagctctcatcacctggtcgtacgccaggcccacctcttcccagcaagggacgccaaagaactgcagtttttattctgagtcttaatttaacttttcatcatcttttcctattttggagaattttttgtaattaaaagcaattattttaaaatgtgcaagccagtatctcacaaggcatggatttctgtggaatttatttttattcaaataaccatatttatctccaggctgtggaatcgccactttctttgtgaagacagtgtctctccttgtaatctcacacaggtacactgaggaggggacggctccgtcttcacattgtgcacagatctgaggatgggattagcgaagctgtggagactgcacatccggacctgcccatgtctcaaaacaaacacatgtacagtggctctttttccttctcaaacactttaccccagaagcaggtggtctgccccaggcataaagaaggaaaattggccatctttcccacctctaaattctgtaaaattatagacttgctcaaaagattcctttttatcatccccacgctgtgtaagtggaaagggcattgtgttccgtgtgtgtccagtttacagcgtctctgccccctagcgtgttttgtgacaatctccctgggtgaggagtgggtgcacccagccccgaggccagtggttgctcggggccttccgtgtgagttctagtgttcacttgatgccggggaatagaattagagaaaactctgacctgccgggttccagggactggtggaggtggatggcaggtccgactcgaccatgacttagttgtaagggtgtgtcggctttttcagtctcatgtgaaaatcctcctgtctctggcagcactgtctgcactttcttgtttactgtttgaagggacgagtaccaagccacaagaacacttcttttggccacagcataagctgatggtatgtaaggaaccgatgggccattaaacatgaactgaacggttaaaagcacagtctatggaacgctaatggagtcagcccctaaagctgtttgctttttcaggctttggattacatgcttttaatttgattttagaatctggacactttctatgaatgtaattcggctgagaaacatgttgctgagatgcaatcctcagtgttctctgtatgtaaatctgtgtatacaccacacgttacaactgcatgagcttcctctcgcacaagaccagctggaactgagcatgagacgctgtcaaatacagacaaaggatttgagatgttctcaataaaaagaaaatgtttcact

SEQ ID NO: 12496 - DNA, 5032 bp, Homo sapiens
gcggcggcggcggcggcggcggcagcggcggccaagcggccaggttggcggccggggctccgggccgcgcgaggccacggccacgccgcgccgctgcgcacaaccaacgaggcagagcgccgcccggcgcgagactgcggccgaagcgtggggcgcgcgtgcggaggaccaggcgcggcgcggctgcggctgagagtggagcctttcaggctggcatggagagcttaaggggcaactgaaggagacacactggccaagcgcggagttctgcttacttcagtcctgctgagatactctctcagtccgctcgcaccgaaggaagctgccttgggatcagagcagacataaagctagaaaaatttcaagacagaaacagtctccgccagtcaagaaaccctcaaaagtattttgccatggatatagaagatgaagaaaacatgagttccagcagcactgatgtgaaggaaaaccgcaatctggacaacgtgtcccccaaggatggcagcacacctgggcctggcgagggctctcagctctccaatgggggtggtggtggccccggcagaaagcggcccctggaggagggcagcaatggccactccaagtaccgcctgaagaaaaggaggaaaacaccagggcccgtcctccccaagaacgccctgatgcagctgaatgagatcaagcctggtttgcagtacacactcctgtcccagactgggcccgtgcacgcgcctttgtttgtcatgtctgtggaggtgaatggccaggtttttgagggctctggtcccacaaagaaaaaggcaaaactccatgctgctgagaaggccttgaggtctttcgttcagtttcctaatgcctctgaggcccacctggccatggggaggaccctgtctgtcaacacggacttcacatctgaccaggccgacttccctgacacgctcttcaatggttttgaaactcctgacaaggcggagcctcccttttacgtgggctccaatggggatgactccttcagttccagcggggacctcagcttgtctgcttccccggtgcctgccagcctagcccagcctcctctccctgtcttaccaccattcccacccccgagtgggaagaatcccgtgatgatcttgaacgaactgcgcccaggactcaagtatgacttcctctccgagagcggggagagccatgccaagagcttcgtcatgtctgtggtcgtggatggtcagttctttgaaggctcggggagaaacaagaagcttgccaaggcccgggctgcgcagtctgccctggccgccatttttaacttgcacttggatcagacgccatctcgccagcctattcccagtgagggtcttcagctgcatttaccgcaggttttagctgacgctgtctcacgcctggtcctgggtaagtttggtgacctgaccgacaacttctcctcccctcacgctcgcagaaaagtgctggctggagtcgtcatgacaacaggcacagatgttaaagatgccaaggtgataagtgtttctacaggaacaaaatgtattaatggtgaatacatgagtgatcgtggccttgcattaaatgactgccatgcagaaataatatctcggagatccttgctcagatttctttatacacaacttgagctttacttaaataacaaagatgatcaaaaaagatccatctttcagaaatcagagcgaggggggtttaggctgaaggagaatgtccagtttcatctgtacatcagcacctctccctgtggagatgccagaatcttctcaccacatgagccaatcctggaagggtctcgctcttacacccaggctggagtgcagtggtgcaatcatggctcactgcagcctcgacctcctgggctcttaagcgatccttccacctcaaccttccaaggagctgggactacagaaccagcagatagacacccaaatcgtaaagcaagaggacagctacggaccaaaatagagtctggtgaggggacgattccagtgcgctccaatgcgagcatccaaacgtgggacggggtgctgcaaggggagcggctgctcaccatgtcctgcagtgacaagattgcacgctggaacgtggtgggcatccagggatccctgctcagcattttcgtggagcccatttacttctcgagcatcatcctgggcagcctttaccacggggaccacctttccagggccatgtaccagcggatctccaacatagaggacctgccacctctctacaccctcaacaagcctttgctcagtggcatcagcaatgcagaagcacggcagccagggaaggcccccaacttcagtgtcaactggacggtaggcgactccgctattgaggtcatcaacgccacgactgggaaggatgagctgggccgcgcgtcccgcctgtgtaagcacgcgttgtactgtcgctggatgcgtgtgcacggcaaggttccctcccacttactacgctccaagattaccaagcccaacgtgtaccatgagtccaagctggcggcaaaggagtaccaggccgccaaggcgcgtctgttcacagccttcatcaaggcggggctgggggcctgggtggagaagcccaccgagcaggaccagttctcactcacgccctgacccgggcagacatgatggggggtgcagggggctgtgggcatccagcgtcatcctccagaacctcacatctgaactgggggcaggtgcataccttggggagggagtagggggacacgggggaccaccaggtgtccacggttgtccccagcatctcacatcagacctggggcaggtgcgcagtgtggggaggggatggggtgcgtcagggcccagcatcgccgcctggcatctctctgccgcagcatttccccttctgaaccgtccagtgactgctttcaatctcggtttacgtttagaaattgagttctactgagtagggcttccttaagtttaggaaaatagaaattactttgtgtgaaattcttgaataaataatttattcagagctaggaatgtggtttataaaataggaagtaattgtgtcaggtcacttttatgccacattattttaattgcaaaaaagcatctatatatggaggagggtgggaaaatagaggtaggaaatagtagcctaaaggaaatcgccacacgtctgtctaaacttaggtctcttttctccgtaggtacctccctgggtagttccacacactaggttgtaacagtctctccctgaggagcagactcccagcatggtgtagcgtggccctgtcatgcacatggggtcccgcagcagtgactgtgtgtcctgcagaggcgtgacccaggcccctgtagccctcagcctcctctagaagcttctgtactccttgtaggatcagatcatggaaaacttttctcagtttacttctaagtaatcacagataatacatggccagtaatcccaggctggccattcattcaggttttttaaaggatatttaacttttatggactagaaggaatcacgagggctactgcacaatacatggcctaagttccctctgttccttcctctgaatcgaatggatgtgggtgaccgcccgaaggccttcacaggatggaagtagaatgatttcagtagatactcattcttggaaaatgccatagttttaaattattgtttccagctttatcaaagacatgtttgaaaaataaaaagcatccaagtgagagctggtgagaccacgtgctgctggcgtagtgtaggccagacattgacagtcctgacgggagctcagggctgcccagcgcccagcgtgcacgggacggccccacgacagagggagtcagcccgggaggtcaggagcgcggcgggcgagggccctgtgtggaccacctccaccaagctcagagatttgcaccaggtgccttgttgcctccgctcaggatgaaagaggagctgagagaagtgctctgcctgccagtgcagtgcccagctccaaggctctagagggtgttcaggtacactgaggaggggacggctccgtcttcacattgtgcacagatctgaggatgggattagcgaagctgtggagactgcacatccggacctgcccatgtctcaaaacaaacacatgtacagtggctctttttccttctcaaacactttaccccagaagcaggtggtctgccccaggcataaagaaggaaaattggccatctttcccacctctaaattctgtaaaattatagacttgctcaaaagattcctttttatcatccccacgctgtgtaagtggaaagggcattgtgttccgtgtgtgtccagtttacagcgtctctgccccctagcgtgttttgtgacaatctccctgggtgaggagtgggtgcacccagccccgaggccagtggttgctcggggccttccgtgtgagttctagtgttcacttgatgccggggaatagaattagagaaaactctgacctgccgggttccagggactggtggaggtggatggcaggtccgactcgaccatgacttagttgtaagggtgtgtcggctttttcagtctcatgtgaaaatcctcctgtctctggcagcactgtctgcactttcttgtttactgtttgaagggacgagtaccaagccacaagaacacttcttttggccacagcataagctgatggtatgtaaggaaccgatgggccattaaacatgaactgaacggttaaaagcacagtctatggaacgctaatggagtcagcccctaaagctgtttgctttttcaggctttggattacatgcttttaatttgattttagaatctggacactttctatgaatgtaattcggctgagaaacatgttgctgagatgcaatcctcagtgttctctgtatgtaaatctgtgtatacaccacacgttacaactgcatgagcttcctctcgcacaagaccagctggaactgagcatgagacgctgtcaaatacagacaaaggatttgagatgttctcaataaaaagaaaatgtttcact

SEQ ID NO: 12497 - DNA, 3562 bp, Homo sapiens
gcggcggcggcggcggcggcggcagcggcggccaagcggccaggttggcggccggggctccgggccgcgcgaggccacggccacgccgcgccgctgcgcacaaccaacgaggcagagcgccgcccggcgcgagactgcggccgaagcgtggggcgcgcgtgcggaggaccaggcgcggcgcggctgcggctgagagtggagcctttcaggctggcatggagagcttaaggggcaactgaaggagacacactggccaagcgcggagttctgcttacttcagtcctgctgagatactctctcagtccgctcgcaccgaaggaagctgccttgggatcagagcagacataaagctagaaaaatttcaagacagaaacagtctccgccagtcaagaaaccctcaaaagtattttgccatggatatagaagatgaagaaaacatgagttccagcagcactgatgtgaaggaaaaccgcaatctggacaacgtgtcccccaaggatggcagcacacctgggcctggcgagggctctcagctctccaatgggggtggtggtggccccggcagaaagcggcccctggaggagggcagcaatggccactccaagtaccgcctgaagaaaaggaggaaaacaccagggcccgtcctccccaagaacgccctgatgcagctgaatgagatcaagcctggtttgcagtacacactcctgtcccagactgggcccgtgcacgcgcctttgtttgtcatgtctgtggaggtgaatggccaggtttttgagggctctggtcccacaaagaaaaaggcaaaactccatgctgctgagaaggccttgaggtctttcgttcagtttcctaatgcctctgaggcccacctggccatggggaggaccctgtctgtcaacacggacttcacatctgaccaggccgacttccctgacacgctcttcaatggttttgaaactcctgacaaggcggagcctcccttttacgtgggctccaatggggatgactccttcagttccagcggggacctcagcttgtctgcttccccggtgcctgccagcctagcccagcctcctctccctgtcttaccaccattcccacccccgagtgggaagaatcccgtgatgatcttgaacgaactgcgcccaggactcaagtatgacttcctctccgagagcggggagagccatgccaagagcttcgtcatgtctgtggtcgtggatggtcagttctttgaaggctcggggagaaacaagaagcttgccaaggcccgggctgcgcagtctgccctggccgccatttttaacttgcacttggatcagacgccatctcgccagcctattcccagtgagggtcttcagctgcatttaccgcaggttttagctgacgctgtctcacgcctggtcctgggtaagtttggtgacctgaccgacaacttctcctcccctcacgctcgcagaaaagtgctggctggagtcgtcatgacaacaggcacagatgttaaagatgccaaggtgataagtgtttctacaggaacaaaatgtattaatggtgaatacatgagtgatcgtggccttgcattaaatgactgccatgcagaaataatatctcggagatccttgctcagatttctttatacacaacttgagctttacttaaataacaaagatgatcaaaaaagatccatctttcagaaatcagagcgaggggggtttaggctgaaggagaatgtccagtttcatctgtacatcagcacctctccctgtggagatgccagaatcttctcaccacatgagccaatcctggaagggtctcgctcttacacccaggctggagtgcagtggtgcaatcatggctcactgcagcctcgacctcctgggctcttaagcgatccttccacctcaaccttccaaggagctgggactacagaaccagcagatagacacccaaatcgtaaagcaagaggacagctacggaccaaaatagagtctggtgaggggacgattccagtgcgctccaatgcgagcatccaaacgtgggacggggtgctgcaaggggagcggctgctcaccatgtcctgcagtgacaagattgcacgctggaacgtggtgggcatccagggatccctgctcagcattttcgtggagcccatttacttctcgagcatcatcctgggcagcctttaccacggggaccacctttccagggccatgtaccagcggatctccaacatagaggacctgccacctctctacaccctcaacaagcctttgctcagtggcatcagcaatgcagaagcacggcagccagggaaggcccccaacttcagtgtcaactggacggtaggcgactccgctattgaggtcatcaacgccacgactgggaaggatgagctgggccgcgcgtcccgcctgtgtaagcacgcgttgtactgtcgctggatgcgtgtgcacggcaaggttccctcccacttactacgctccaagattaccaagcccaacgtgtaccatgagtccaagctggcggcaaaggagtaccaggccgccaaggtacactgaggaggggacggctccgtcttcacattgtgcacagatctgaggatgggattagcgaagctgtggagactgcacatccggacctgcccatgtctcaaaacaaacacatgtacagtggctctttttccttctcaaacactttaccccagaagcaggtggtctgccccaggcataaagaaggaaaattggccatctttcccacctctaaattctgtaaaattatagacttgctcaaaagattcctttttatcatccccacgctgtgtaagtggaaagggcattgtgttccgtgtgtgtccagtttacagcgtctctgccccctagcgtgttttgtgacaatctccctgggtgaggagtgggtgcacccagccccgaggccagtggttgctcggggccttccgtgtgagttctagtgttcacttgatgccggggaatagaattagagaaaactctgacctgccgggttccagggactggtggaggtggatggcaggtccgactcgaccatgacttagttgtaagggtgtgtcggctttttcagtctcatgtgaaaatcctcctgtctctggcagcactgtctgcactttcttgtttactgtttgaagggacgagtaccaagccacaagaacacttcttttggccacagcataagctgatggtatgtaaggaaccgatgggccattaaacatgaactgaacggttaaaagcacagtctatggaacgctaatggagtcagcccctaaagctgtttgctttttcaggctttggattacatgcttttaatttgattttagaatctggacactttctatgaatgtaattcggctgagaaacatgttgctgagatgcaatcctcagtgttctctgtatgtaaatctgtgtatacaccacacgttacaactgcatgagcttcctctcgcacaagaccagctggaactgagcatgagacgctgtcaaatacagacaaaggatttgagatgttctcaataaaaagaaaatgtttcact

SEQ ID NO: 12498 - DNA, 11365 bp, Homo sapiens
ggagccgcggggcttccatccttcctttgactgatttttaaattttaatttgtattttccccgccgccccgccccttttcctccgaccccgccctatcgctccccggcttccctgctctttcctttttcccggcttccttcctcgcgtttctttcccctgcgccctcggcttgcctctctccctcctccctcgctctctcccccttctctccccttcttcctcggtttcttccgtcctctctctccccctcctcctcccccgcctcctcctcctgcgctcccgccccctgccccctccccccgtgcctgcagacgcgcggatcgtccatgcgctcctcgcgggcagaatgctgggcagcagcgtcaagagcgtgcagcccgaggtggagctgagcagcggcggcggcgacgagggcgcggacgaaccgcggggcgccggcaggaaggcggcagcggcggacggcagaggcatgctgcccaagcgcgccaaggcgcccggcggcggcggcggcatggccaaggccagcgcggctgagctgaaggtcttcaagtccggcagcgtggacagccgtgtccccggcgggccgcccgcctccaacctgcgcaagcagaagtcactcaccaacctctcttttctcacggactccgagaaaaagctgcagctttatgagcccgaatggagcgacgatatggccaaggcgcccaaaggcttaggcaaggtggggtccaagggccgtgaagctccgctgatgtccaagacgctgtccaagtcggagcactcgctcttccaggccaagggcagcccggcgggcggtgccaagacccccctggctccgctcgcgcccaacctgggaaagccgagccggatccctcgaggaccctatgcggaggtcaagccgctcagcaaggcgcctgaagcggccgtgagcgaagatggcaaatcggacgacgagctgctctccagcaaggccaaggcgcaaaagagctctgggcctgtcccctctgccaagggccaggaggagcgcgccttcctcaaggtggaccccgagctggtggtgaccgtgctgggagacctggagcagctgctcttcagccagatgctggacccagagtcccagagaaagaggacagtgcagaatgtcctggatctccggcagaacctggaagagaccatgtccagcctgcgagggtcccaggtgactcacagctccctggagatgacctgctacgacagcgatgatgccaacccacgcagcgtgtccagcctctccaaccgctcgtcccctctgtcatggcgctatggccagtccagtccgcggctgcaggctggtgacgcgccctctgtgggtgggagctgccgctcggaggggacgcccgcctggtacatgcacggcgaacgggcccactactcccacaccatgcccatgcgcagccccagcaagctcagccatatctcccgcctggagctggtcgaatccctggactcggatgaggtggacctcaagtccggctacatgagcgacagtgacctcatgggcaagaccatgacggaggatgatgacatcactaccggctgggatgaaagcagctccatcagtagtggactcagcgatgcctcagacaatctcagttcagaagaattcaatgccagctcctcactcaactccctcccaagtactcccactgcttctcgcaggaactcaacaatagtgctacgcacagactcagagaagcgctcactggcagaaagtgggctgagctggtttagtgaatcagaggagaaagcccctaaaaaactggagtacgacagtggtagcctgaagatggaacctgggacttctaagtggcggagggagcggcctgagagctgtgatgattcatccaagggtggagaactgaaaaagcccatcagcctgggccaccctggttccctgaagaagggcaagaccccacctgtggctgtaacttcccccatcactcacacagcccagagtgccctcaaagtcgcaggcaaacctgagggcaaagctacagacaagggtaagcttgcagtgaagaatactgggctccaacgctcctcctctgatgctggtcgggaccgcctgagtgatgctaagaagcccccctcgggcattgctcgcccctccacttcgggatcctttggctacaagaagcctcctcctgccacaggcacagccactgtcatgcaaactggtggttcagccactctcagcaagatccagaagtcctcaggcatccctgtcaagccagtaaatgggcgcaagactagcttagatgtttccaacagtgcagagccaggattcctggctcctggagcccgttctaacatccagtaccgcagcctgccccggccagccaagtcaagttctatgagcgtgaccggcgggcggggtggacctcgccctgtgagcagcagcattgaccccagtctcctcagcaccaagcagggaggccttacgccttccagactgaaggagcctaccaaggtagccagtgggcggaccactccagcccctgtcaatcagacagatcgggaaaaggagaaggccaaagccaaggcagtggccttggactcagacaacatctccttgaagagtattggctccccagaaagtactcccaagaaccaagcaagccaccccacagccaccaagctggcagagctgccaccaacccctctcagggccacagcgaagagctttgtcaaaccaccctcactagccaatcttgacaaggtcaactccaacagtctggatctaccatcatccagtgataccacccatgcttcaaaggtcccagatctgcatgctacaagctcagcatctgggggccctctcccttcctgcttcacccccagtccggcacccatcctcaatattaactcagccagcttctcccagggcctggagctaatgagtggtttcagtgtgccaaaagagacccgcatgtaccccaaactctcaggcctgcacaggagcatggagtccctccagatgccaatgagcctccccagtgccttccccagcagtactcccgtccccaccccacctgctccccctgctgctcccacagaagaagagacggaagagctgacttggagtggaagccccagagctgggcaactggacagtaatcagcgggatcggaacactcttcccaagaaagggctcaggtaccagcttcagtcccaggaggagaccaaggagaggcgacattcccataccattggtgggctgcctgaatccgatgaccagtcagagctgccttctccccctgcacttcccatgtctctgagtgcaaagggccaacttaccaacatagtgagtcccactgcggccaccacgccaagaatcacccgctccaacagcatccccacccacgaggcggccttcgagctgtacagcggctcccaaatggggagcaccctgtccctggccgagagacccaagggaatgattcggtcaggatccttccgagaccccacggacgatgttcacggctcagtgctgtccctggcctccagtgcctcctccacctactcctcagctgaggagaggatgcaatctgagcaaatccggaagcttcgtagggaactggaatcatcccaggaaaaagtggccaccttgacgtctcagctttctgccaatgctaatctggtggctgcttttgagcagagcctggtgaatatgacatcccgcctgcgacacctggcagagacggccgaggagaaggacactgagctgctggatttgcgagaaaccatagactttctgaagaaaaagaactctgaggcccaggcagtcattcagggagcccttaatgcctcagaaaccacacccaaagaacttcggatcaagagacaaaactcctcagatagcatctcaagcctcaacagcatcactagccattccagcatcggcagcagcaaggatgctgatgcgaaaaagaagaaaaaaaagagttggcttcgaagttccttcaacaaagcgttcagtataaaaaaggggcccaagtcagcttcctcatactcggatatagaggagattgctacacccgactcttcagccccctcatcccccaaactacagcatggttctacagagactgcttcaccctccatcaagtcctccacctcgtcctccgtgggcactgatgtcaccgagggccctgctcacccagccccccacactaggctgttccatgcaaatgaggaggaggagccagagaagaaggaggtatcggagctgcgctctgagctatgggagaaggaaatgaagcttacagacatccgcttggaggccctcaactctgcccaccaactggatcagcttcgggagaccatgcacaacatgcagttggaggtggacctgctgaaagcagagaatgaccgactgaaggtagccccaggcccctcatcaggctccactccagggcaggtccctggatcatctgcattatcttccccacgccgctccctaggcctggcactcacccattccttcggccccagtcttgcagacacagacctgtcacccatggatggcatcagtacttgtggtccaaaggaggaagtgaccctccgggtggtggtgaggatgcccccgcagcacatcatcaaaggggacttgaagcagcaggaattcttcctgggctgtagcaaggtcagtggaaaagttgactggaagatgctggatgaagctgttttccaagtgttcaaggactatatttctaaaatggacccagcctctaccctgggactaagcactgagtccatccatggctacagcatcagccacgtgaaacgagtgttggatgcagagccccccgagatgcctccttgccgtcgaggtgtcaataacatatcagtctccctcaaaggtctgaaggagaaatgcgtcgacagcctggtgttcgagacgctgatccccaagccgatgatgcagcactacataagcctcctgctgaagcaccggcgcctcgtcctctcgggccccagcggcacgggcaagacctacctgaccaatcgcttggccgagtacctggtggagcgctctggccgtgaggtcacagagggcatcgtcagcaccttcaacatgcaccagcagtcttgcaaggatctgcaactgtatctttccaacctagccaaccagatagaccgggaaacaggaattggggatgtgcccctggtgattctattggatgacctgagtgaagcaggctccatcagtgagttggtcaatggggccctcacctgcaagtatcataaatgtccctatattataggtaccaccaatcagcctgtaaaaatgacacccaaccatggcttgcacttgagcttcaggatgttgaccttctccaacaacgtggagccagccaatggcttcctggttcgttacctgaggaggaagctggtagagtcagacagcgacatcaatgccaacaaggaagagctgcttcgggtgctcgactgggtacccaagctgtggtatcatctccacaccttccttgagaagcacagcacctcagacttcctcatcggcccttgcttctttctgtcgtgtcccattggcattgaggacttccggacctggttcattgacctgtggaacaactctatcattccctatctacaggaaggagccaaggatgggataaaggtccatggacagaaagctgcttgggaggacccagtggaatgggtccgggacacacttccctggccatcagcccaacaagaccaatcaaagctgtaccacctgcccccacccaccgtgggccctcacagcattgcctcacctcccgaggataggacagtcaaagacagcaccccaagttctctggactcagatcctctgatggccatgctgctgaaacttcaagaagctgccaactacattgagtctccagatcgagaaaccatcctggaccccaaccttcaggcaacactttaagggttcggcaatcactgtcacccccggacagcagaacgctggcatcagctatcttagctcctcctctcccctctcctctttcagagcactggctctccagccccaggaggagaacaggagggaggaggagatgaaagaggagggacaggttcttggtgctgtacctttgagaacttcctaggaaggaatggtggggtggcgtttgggaacttgtgccccctaaacacatttactggcctcctctaatgactttggggaaaagatgattctgggtctttcccttgacttcttgtttcaattacaaactcctgggctttctggggaggggttcagaaaacatcaaaacactgcagcagttcctaaatgattctcacaagcaaccctgagagagacagtcttgtgagggagatctgggggaggcaggaagctcctcagattttctcacagacccttcccaattccatcaccactgccaacaactcctcccccagagatctggctggagcccagaaaaagaagcatgtggtttaaaaaatgtttaaatcaatctgtaaaaggtaaaaatgaaaaacaaaaacaagcaaacaaacaaaaaacaatggaaaagatgaagctggagagagaggaaccagttgccaaggtagagagctgcccgctcctgccctctggatgacataggggacatcaacaagacggctgccaacctgagaagtcaccaaaccacaaaaataaccttacagccttcagggaaagactaccagctctgtctttctaccctctaatttaacaatgcataagagtcaataaaccctacttttttatttttggtttttattttgttttcatttttttctcccatttgcctatttatttttttgtttcccttttttttttctttttccgtttttccatttcctcacatgtccacgagatgcttgggttgcttttccaggggctagtttggcttttccaagtgggttttctttggagaatctgatgccatgcaattggcatgacacctgccatgccactatctttggcatccatggggcttatatgagacatgaagcattggctcagaagtagagggagaagaggaacccagttcccttgacttcccttttgagagcacacgttctgctgggtagctcaattgccagcctctgtcatgagaaggtatagccccatcttgatagaagagttactccgagctttatcatggaccagaggaaaaccagaaaactgaaaacattcctctgtcttgtggccagtttggcctttcactgcactattctgatggtgcctgactgaatccaaatatcctagctggctcttactatttttcacaaatgagtattcacatataagagatgaacatccatgtgagatcatcccaatcagaatataagactcaaggagtttgacttggtggccaatacctgccttccaaagagatcctacctttgcagatttgctcctttcccattgccttgaaggtctggcaatccctgttctttcatttgacaagtacttactgagtactcactatatacaaatcattaggttaaaacagacacacacacacacacacacacacacacacacacacacacacacaagacctgggcccttaagtttacagtccagcaggaaatgttaacctccattcagctacgcccccttgttatctagaccttcgggatcatctaagaaatgtagctgaaacccaaggagccagctagaaagaagcttttgattagatgtacaatacattgggggcagaagatctgggatcaattaagatggagcctgaaggactatggaatcttgcttgtcaggaatgggcaagtctacttcctgccatttctgaaagccccgcgggaccagcttctaggctgagctgcctagtaggctgaagcttcaggactctgcaggtcaaggatatgtgatgagcaccggcctaagtgtttgctcttcagattcctaagtagcacaagactttatcagaatctataggcataccaacctggatcactcttccacccaaccgaggagtagatgcatctgaatcttcatatcggtatattaagtccaaaagatggtccgggctgcccctcacaaaagcttctgcatccacgtggtaagctcccatggatgacagggttctgtatgatggagactattattgctattgctgctaattccatgagctgtgaagatccctaaccaactcagctgtaacatatgcaattctgtggtgggaagaggctgtgtgtccaaggatggtgctgaaatcactgccttaaggtctctgctgtgcagaatgaggaggcccccgagctggctgttctaacttagaaggaagagaagactggatgggcctgcttgggatctaggcctcttctaaaccctatcctaagctccagttccatggcaaggctcagacttttaatgccatcttaatctgatggttgagcgcttcactctattttctggtgctgcccagccagtgccttctgccatggatgttactggctacttgagaaaaaggagaggggagaaccccttctttcattccaactgcctccgaccccaaagggattcttggctctctggtaaccatggataccaccatgaattttatttggatcctcagcaggttgattctggaggcctcatgctatgactttttatttctcttcctgggatccaccaccctctactctcagctgactgctgcatttaggccaggtctccaattgctttcctccagaaagtgtgttcccgtctagtgaggtagtattgaagcctcggctttccctctggagcctgggaccctgtttacagttgcacatctgggcccctcactgtggggattgatcattctcatgaaggaatcacagttatatggcaactgcagaaggctgagcctcctcatggtgctataaccccttgggacactcatccagacttctctgaagcagaaaacctgagctccccactcactgccctagaatttatggcaaggagcaaatctacagcattctctcccacctacgtcctgcttcttggttgagactactgggatccttcagaaaagaaacactgggtcccatagctaaattctcaaccgccaggcaccttcagaagaatccagcctaatactggaatttgtgctattatcttcctctccagccccccaactccatccctcaccacagttgtctaggaaatgacatgaattcaatatctaatgtcaaccaatggggagagccacaactccaggagaggttcctgagctgagtcccttaatttctggatgaagaagaccaacaagttttgtccaatgtatttgtttctcagaccttgcctaggcactaaaaataaaatactaggtcattggaggctaatgtgggacctgatgtctgcgtgtgtgtgtgtgtgtgtgtgtgtgtgtgtctccctctctcacacacacaagagcagtttgctgttgctgtttcctaccttctgaggcttcaaagtattttttaaaatctatgctttgtggcagctctacggtgcttatctctgtctttgtgtcaatccttaagtacccatgtctttttcatgtctaaccattgggaaggtagaggctggcagggaagacaaatctgctacaagtccatgggaagaccctacaatgaaatgttcattggttggtatactgttttagtcttgaattgccaactttccaactgatctatccatattccttaagtactaaagacaaaatagagggcttctttttctctcttaatgtcttgccttctggttttcctggtttgcaagactaagtgtacctaatctcaccatctcttcacttctagctctctgaaacaagggtcacactactcagagggataaccccttacagtggtctgaggagtaactatttcctaaagtattctaaaagagtaggaagagagaaatggtagcctgctgcttctcacagacacctcacatcctcacttgggatggcatccacatagaaaccctgcatttaggtaaaatttgcctgactgaaggggactcagtcctccaaatcaaggtcaagaagatatctgcatgagaccttaagaactctttattgccattatttggagagggcgggggaattgtcctaatcacacatttaacacagggaataagtgctgaagtgacccagatcaccaagcgcagttcctcatcatactttatttttgctttccttattccttggcactgactaagctaaagttaagaagccgacttcataagccaacccctgtgatgggatggaaaaatgggcttttgcagagggtttattaatagagatggatatactactcacaagttctggctcatggctccactgagaaggccatagtaataaaatgatcttatgaacactgttccccaaaggccaaagcctgaagatattgccccttataatccaatcagccttatattttaataagtcctgaatcaacctgactacggatatatggggccaccagggtgcatgggtgcatgtctgctcagcctagccctggaagtgagcactgccggccacagatcctgggaaaggtggtagtaacccagaagatgtagccttgaagggaggatacctatcaaaatgccaaagctgcagggacacgaagacggttgaaaattcaacctatgtatactagatccttccagtttgatggtttggtcattcttcttcatgattataccatggagaattttctgtgacaagggtggtcatggaagtaagtgagtgatcccctggtttctcattccttaaagcagtggttcgcaaagtatggcacaagaccagcagcatcagcagcctttgggaacttgttagaaacgaaaattctcaatcccatcccagatctgctgaatcagaaactctaatgagaggacccggcaatccacgttttaataagccctcctggtgattctgatgcacactaaattcaactgttttaaagggaaagccctttatagtattggagttcccacactgagaggctttggggcccaaaataagaaggttctaggttgtcattcagactttaacattaatttcaaagtcacctttctcatgcttccttgtgtttctgtttttccatttatgattttaacaaagaaaggtatgtgtgcttttgggtggaagttaggagaatgtttgtgtctttcctagttgaatacaaccttcagagaaaaaccttatgccttggaaattactacctggcacacaaaggggcttcaacaaggaaaagcagttggaggtctcttccagattgctcttctgccgaattatttgtatctattccgagctgattatgtaataggatggaaaaagt

SEQ ID NO: 12499 - DNA, 10719 bp, Homo sapiens
tggagacagaatggaggtgctgccggactcggaaatggggtccaagggtagccaaggatggctgcagcttcatatgatcagttgttaaagcaagttgaggcactgaagatggagaactcaaatcttcgacaagagctagaagataattccaatcatcttacaaaactggaaactgaggcatctaatatgaaggaagtacttaaacaactacaaggaagtattgaagatgaagctatggcttcttctggacagattgatttattagagcgtcttaaagagcttaacttagatagcagtaatttccctggagtaaaactgcggtcaaaaatgtccctccgttcttatggaagccgggaaggatctgtatcaagccgttctggagagtgcagtcctgttcctatgggttcatttccaagaagagggtttgtaaatggaagcagagaaagtactggatatttagaagaacttgagaaagagaggtcattgcttcttgctgatcttgacaaagaagaaaaggaaaaagactggtattacgctcaacttcagaatctcactaaaagaatagatagtcttcctttaactgaaaatttttccttacaaacagatatgaccagaaggcaattggaatatgaagcaaggcaaatcagagttgcgatggaagaacaactaggtacctgccaggatatggaaaaacgagcacagcgaagaatagccagaattcagcaaatcgaaaaggacatacttcgtatacgacagcttttacagtcccaagcaacagaagcagagaggtcatctcagaacaagcatgaaaccggctcacatgatgctgagcggcagaatgaaggtcaaggagtgggagaaatcaacatggcaacttctggtaatggtcagggttcaactacacgaatggaccatgaaacagccagtgttttgagttctagtagcacacactctgcacctcgaaggctgacaagtcatctgggaaccaaggtggaaatggtgtattcattgttgtcaatgcttggtactcatgataaggatgatatgtcgcgaactttgctagctatgtctagctcccaagacagctgtatatccatgcgacagtctggatgtcttcctctcctcatccagcttttacatggcaatgacaaagactctgtattgttgggaaattcccggggcagtaaagaggctcgggccagggccagtgcagcactccacaacatcattcactcacagcctgatgacaagagaggcaggcgtgaaatccgagtccttcatcttttggaacagatacgcgcttactgtgaaacctgttgggagtggcaggaagctcatgaaccaggcatggaccaggacaaaaatccaatgccagctcctgttgaacatcagatctgtcctgctgtgtgtgttctaatgaaactttcatttgatgaagagcatagacatgcaatgaatgaactagggggactacaggccattgcagaattattgcaagtggactgtgaaatgtatgggcttactaatgaccactacagtattacactaagacgatatgctggaatggctttgacaaacttgacttttggagatgtagccaacaaggctacgctatgctctatgaaaggctgcatgagagcacttgtggcccaactaaaatctgaaagtgaagacttacagcaggttattgcgagtgttttgaggaatttgtcttggcgagcagatgtaaatagtaaaaagacgttgcgagaagttggaagtgtgaaagcattgatggaatgtgctttagaagttaaaaaggaatcaaccctcaaaagcgtattgagtgccttatggaatttgtcagcacattgcactgagaataaagctgatatatgtgctgtagatggtgcacttgcatttttggttggcactcttacttaccggagccagacaaacactttagccattattgaaagtggaggtgggatattacggaatgtgtccagcttgatagctacaaatgaggaccacaggcaaatcctaagagagaacaactgtctacaaactttattacaacacttaaaatctcatagtttgacaatagtcagtaatgcatgtggaactttgtggaatctctcagcaagaaatcctaaagaccaggaagcattatgggacatgggggcagttagcatgctcaagaacctcattcattcaaagcacaaaatgattgctatgggaagtgctgcagctttaaggaatctcatggcaaataggcctgcgaagtacaaggatgccaatattatgtctcctggctcaagcttgccatctcttcatgttaggaaacaaaaagccctagaagcagaattagatgctcagcacttatcagaaacttttgacaatatagacaatttaagtcccaaggcatctcatcgtagtaagcagagacacaagcaaagtctctatggtgattatgtttttgacaccaatcgacatgatgataataggtcagacaattttaatactggcaacatgactgtcctttcaccatatttgaatactacagtgttacccagctcctcttcatcaagaggaagcttagatagttctcgttctgaaaaagatagaagtttggagagagaacgcggaattggtctaggcaactaccatccagcaacagaaaatccaggaacttcttcaaagcgaggtttgcagatctccaccactgcagcccagattgccaaagtcatggaagaagtgtcagccattcatacctctcaggaagacagaagttctgggtctaccactgaattacattgtgtgacagatgagagaaatgcacttagaagaagctctgctgcccatacacattcaaacacttacaatttcactaagtcggaaaattcaaataggacatgttctatgccttatgccaaattagaatacaagagatcttcaaatgatagtttaaatagtgtcagtagtagtgatggttatggtaaaagaggtcaaatgaaaccctcgattgaatcctattctgaagatgatgaaagtaagttttgcagttatggtcaatacccagccgacctagcccataaaatacatagtgcaaatcatatggatgataatgatggagaactagatacaccaataaattatagtcttaaatattcagatgagcagttgaactctggaaggcaaagtccttcacagaatgaaagatgggcaagacccaaacacataatagaagatgaaataaaacaaagtgagcaaagacaatcaaggaatcaaagtacaacttatcctgtttatactgagagcactgatgataaacacctcaagttccaaccacattttggacagcaggaatgtgtttctccatacaggtcacggggagccaatggttcagaaacaaatcgagtgggttctaatcatggaattaatcaaaatgtaagccagtctttgtgtcaagaagatgactatgaagatgataagcctaccaattatagtgaacgttactctgaagaagaacagcatgaagaagaagagagaccaacaaattatagcataaaatataatgaagagaaacgtcatgtggatcagcctattgattatagtttaaaatatgccacagatattccttcatcacagaaacagtcattttcattctcaaagagttcatctggacaaagcagtaaaaccgaacatatgtcttcaagcagtgagaatacgtccacaccttcatctaatgccaagaggcagaatcagctccatccaagttctgcacagagtagaagtggtcagcctcaaaaggctgccacttgcaaagtttcttctattaaccaagaaacaatacagacttattgtgtagaagatactccaatatgtttttcaagatgtagttcattatcatctttgtcatcagctgaagatgaaataggatgtaatcagacgacacaggaagcagattctgctaataccctgcaaatagcagaaataaaagaaaagattggaactaggtcagctgaagatcctgtgagcgaagttccagcagtgtcacagcaccctagaaccaaatccagcagactgcagggttctagtttatcttcagaatcagccaggcacaaagctgttgaattttcttcaggagcgaaatctccctccaaaagtggtgctcagacacccaaaagtccacctgaacactatgttcaggagaccccactcatgtttagcagatgtacttctgtcagttcacttgatagttttgagagtcgttcgattgccagctccgttcagagtgaaccatgcagtggaatggtaagtggcattataagccccagtgatcttccagatagccctggacaaaccatgccaccaagcagaagtaaaacacctccaccacctcctcaaacagctcaaaccaagcgagaagtacctaaaaataaagcacctactgctgaaaagagagagagtggacctaagcaagctgcagtaaatgctgcagttcagagggtccaggttcttccagatgctgatactttattacattttgccacggaaagtactccagatggattttcttgttcatccagcctgagtgctctgagcctcgatgagccatttatacagaaagatgtggaattaagaataatgcctccagttcaggaaaatgacaatgggaatgaaacagaatcagagcagcctaaagaatcaaatgaaaaccaagagaaagaggcagaaaaaactattgattctgaaaaggacctattagatgattcagatgatgatgatattgaaatactagaagaatgtattatttctgccatgccaacaaagtcatcacgtaaagcaaaaaagccagcccagactgcttcaaaattacctccacctgtggcaaggaaaccaagtcagctgcctgtgtacaaacttctaccatcacaaaacaggttgcaaccccaaaagcatgttagttttacaccgggggatgatatgccacgggtgtattgtgttgaagggacacctataaacttttccacagctacatctctaagtgatctaacaatcgaatcccctccaaatgagttagctgctggagaaggagttagaggaggggcacagtcaggtgaatttgaaaaacgagataccattcctacagaaggcagaagtacagatgaggctcaaggaggaaaaacctcatctgtaaccatacctgaattggatgacaataaagcagaggaaggtgatattcttgcagaatgcattaattctgctatgcccaaagggaaaagtcacaagcctttccgtgtgaaaaagataatggaccaggtccagcaagcatctgcgtcttcttctgcacccaacaaaaatcagttagatggtaagaaaaagaaaccaacttcaccagtaaaacctataccacaaaatactgaatataggacacgtgtaagaaaaaatgcagactcaaaaaataatttaaatgctgagagagttttctcagacaacaaagattcaaagaaacagaatttgaaaaataattccaaggtcttcaatgataagctcccaaataatgaagatagagtcagaggaagttttgcttttgattcacctcatcattacacgcctattgaaggaactccttactgtttttcacgaaatgattctttgagttctctagattttgatgatgatgatgttgacctttccagggaaaaggctgaattaagaaaggcaaaagaaaataaggaatcagaggctaaagttaccagccacacagaactaacctccaaccaacaatcagctaataagacacaagctattgcaaagcagccaataaatcgaggtcagcctaaacccatacttcagaaacaatccacttttccccagtcatccaaagacataccagacagaggggcagcaactgatgaaaagttacagaattttgctattgaaaatactccggtttgcttttctcataattcctctctgagttctctcagtgacattgaccaagaaaacaacaataaagaaaatgaacctatcaaagagactgagccccctgactcacagggagaaccaagtaaacctcaagcatcaggctatgctcctaaatcatttcatgttgaagataccccagtttgtttctcaagaaacagttctctcagttctcttagtattgactctgaagatgacctgttgcaggaatgtataagctccgcaatgccaaaaaagaaaaagccttcaagactcaagggtgataatgaaaaacatagtcccagaaatatgggtggcatattaggtgaagatctgacacttgatttgaaagatatacagagaccagattcagaacatggtctatcccctgattcagaaaattttgattggaaagctattcaggaaggtgcaaattccatagtaagtagtttacatcaagctgctgctgctgcatgtttatctagacaagcttcgtctgattcagattccatcctttccctgaaatcaggaatctctctgggatcaccatttcatcttacacctgatcaagaagaaaaaccctttacaagtaataaaggcccacgaattctaaaaccaggggagaaaagtacattggaaactaaaaagatagaatctgaaagtaaaggaatcaaaggaggaaaaaaagtttataaaagtttgattactggaaaagttcgatctaattcagaaatttcaggccaaatgaaacagccccttcaagcaaacatgccttcaatctctcgaggcaggacaatgattcatattccaggagttcgaaatagctcctcaagtacaagtcctgtttctaaaaaaggcccaccccttaagactccagcctccaaaagccctagtgaaggtcaaacagccaccacttctcctagaggagccaagccatctgtgaaatcagaattaagccctgttgccaggcagacatcccaaataggtgggtcaagtaaagcaccttctagatcaggatctagagattcgaccccttcaagacctgcccagcaaccattaagtagacctatacagtctcctggccgaaactcaatttcccctggtagaaatggaataagtcctcctaacaaattatctcaacttccaaggacatcatcccctagtactgcttcaactaagtcctcaggttctggaaaaatgtcatatacatctccaggtagacagatgagccaacagaaccttaccaaacaaacaggtttatccaagaatgccagtagtattccaagaagtgagtctgcctccaaaggactaaatcagatgaataatggtaatggagccaataaaaaggtagaactttctagaatgtcttcaactaaatcaagtggaagtgaatctgatagatcagaaagacctgtattagtacgccagtcaactttcatcaaagaagctccaagcccaaccttaagaagaaaattggaggaatctgcttcatttgaatctctttctccatcatctagaccagcttctcccactaggtcccaggcacaaactccagttttaagtccttcccttcctgatatgtctctatccacacattcgtctgttcaggctggtggatggcgaaaactcccacctaatctcagtcccactatagagtataatgatggaagaccagcaaagcgccatgatattgcacggtctcattctgaaagtccttctagacttccaatcaataggtcaggaacctggaaacgtgagcacagcaaacattcatcatcccttcctcgagtaagcacttggagaagaactggaagttcatcttcaattctttctgcttcatcagaatccagtgaaaaagcaaaaagtgaggatgaaaaacatgtgaactctatttcaggaaccaaacaaagtaaagaaaaccaagtatccgcaaaaggaacatggagaaaaataaaagaaaatgaattttctcccacaaatagtacttctcagaccgtttcctcaggtgctacaaatggtgctgaatcaaagactctaatttatcaaatggcacctgctgtttctaaaacagaggatgtttgggtgagaattgaggactgtcccattaacaatcctagatctggaagatctcccacaggtaatactcccccggtgattgacagtgtttcagaaaaggcaaatccaaacattaaagattcaaaagataatcaggcaaaacaaaatgtgggtaatggcagtgttcccatgcgtaccgtgggtttggaaaatcgcctgaactcctttattcaggtggatgcccctgaccaaaaaggaactgagataaaaccaggacaaaataatcctgtccctgtatcagagactaatgaaagttctatagtggaacgtaccccattcagttctagcagctcaagcaaacacagttcacctagtgggactgttgctgccagagtgactccttttaattacaacccaagccctaggaaaagcagcgcagatagcacttcagctcggccatctcagatcccaactccagtgaataacaacacaaagaagcgagattccaaaactgacagcacagaatccagtggaacccaaagtcctaagcgccattctgggtcttaccttgtgacatctgtttaaaagagaggaagaatgaaactaagaaaattctatgttaattacaactgctatatagacattttgtttcaaatgaaactttaaaagactgaaaaattttgtaaataggtttgattcttgttagagggtttttgttctggaagccatatttgatagtatactttgtcttcactggtcttattttgggaggcactcttgatggttaggaaaaaaatagtaaagccaagtatgtttgtacagtatgttttacatgtatttaaagtagcatcccatcccaacttcctttaattattgcttgtcttaaaataatgaacactacagatagaaaatatgatatattgctgttatcaatcatttctagattataaactgactaaacttacatcagggaaaaattggtatttatgcaaaaaaaaatgtttttgtccttgtgagtccatctaacatcataattaatcatgtggctgtgaaattcacagtaatatggttcccgatgaacaagtttacccagcctgctttgctttactgcatgaatgaaactgatggttcaatttcagaagtaatgattaacagttatgtggtcacatgatgtgcatagagatagctacagtgtaataatttacactattttgtgctccaaacaaaacaaaaatctgtgtaactgtaaaacattgaatgaaactattttacctgaactagattttatctgaaagtaggtagaatttttgctatgctgtaatttgttgtatattctggtatttgaggtgagatggctgctcttttattaatgagacatgaattgtgtctcaacagaaactaaatgaacatttcagaataaattattgctgtatgtaaactgttactgaaattggtatttgtttgaagggtcttgtttcacatttgtattaataattgtttaaaatgcctcttttaaaagcttatataaatttttttcttcagcttctatgcattaagagtaaaattcctcttactgtaataaaaacaattgaagaagactgttgccacttaaccattccatgcgttggcacttatctattcctgaaatttcttttatgtgattagctcatcttgatttttaatatttttccacttaaacttttttttcttactccactggagctcagtaaaagtaaattcatgtaatagcaatgcaagcagcctagcacagactaagcattgagcataataggcccacataatttcctctttcttaatattatagaattctgtacttgaaattgattcttagacattgcagtctcttcgaggctttacagtgtaaactgtcttgccccttcatcttcttgttgcaactgggtctgacatgaacactttttatcaccctgtatgttagggcaagatctcagcagtgaagtataatcagcactttgccatgctcagaaaattcaaatcacatggaactttagaggtagatttaatacgattaagatattcagaagtatattttagaatccctgcctgttaaggaaactttatttgtggtaggtacagttctggggtacatgttaagtgtccccttatacagtggagggaagtcttccttcctgaaggaaaataaactgacacttattaactaagataatttacttaatatatcttccctgatttgttttaaaagatcagagggtgactgatgatacatgcatacatatttgttgaataaatgaaaatttatttttagtgataagattcatacactctgtatttggggagggaaaacctttttaagcatggtggggcactcagataggagtgaatacacctacctggtgccttgaaaatcacatcaagtagttaattatctaccccttacctgtgtttataacttccaggtaatgagaatgattttttttaaagctaaaatgccagtaaataaaagtgctatgacttgagctaagatatttgactccaatgcctgtactgtgtctactgcaccactttgtaaacacttcaatttactatctttgaaatgattgacctttaaatttttgccaaatgttatctgaaattgtctatgaataccatctacttctgttgttttcccaggcttccataaacaatggagatacatgcaaaaaaaaaaaaaaaaaa

SEQ ID NO: 12500 - DNA, 3770 bp, Homo sapiens
cgggggcggtgagtaggtagtgcggatgcgggcgcagaactacgtttcccagcaggcatacagttggtggggcggggtgtgtgtgtgtgttgggaggcgggggtccctctcctttggcttggggctccggagttgccactgccgccggcgctggtaagcttttcaggatgtccagcaaagaatcctgtgggaaaaaagagacatctcagaggaaagacaccaccacctcatcacccaattttggtgaaaaagacaagaaagagagaaaaaccccagcaagttctactagttcgtcttctataagatcagtttcatcagaaaagagaaaactgaaatcagatcatacagatgttctgtactataatataaaaagaagacaaggactgaaaagattgagtgtagaaattgacactctcagaaggagaccaaaaatcggttcttcatcccaaagacctattaaactcaaagaagcatcatattcaaatgataatcaaattattttgcagagtccttcttcaaatggaactaaaaaagacatacataaatgtgtagactttaaacctaaagatatcaaattgacaaatgctgggagcaagcttgaccatggagttaaaagccttagtagtcctaagattgccagtgatgtgaaacctaaagccgaaggccaggcaagtgaaaataaatggtctcatttacttgttcagagagagaagatgaaagaactcaagaaaggaagaaacagtaaatttagagacaattctgaaaaatgtgtcttagagaaatggaagagaaatcaattttctcaggattataactccaacaagataattaaggaacccttgggatctaggagacagaagatcagtttcaaaatccctataaaatcccgtgacaccctccagaaacttgtagaagaaaatgtcttcaacatagattctaataattcgaagactaagcaggaagaaagagaatacctggaaagctcccaggtttcattaaatgtgactaggcagaaaactgaacatttactttcagattttacatataagcggactgttcatgagtggaaacgaaaacatcattatgaccatcaagaaagtaatgattcacattctagggaaaacctaacccagagttttgaagcaccatgttgttccgtgtcatctgaaagtatccaggatgcagatcaagagatgcagatagtagaagagcttcatgctgcacgtgtgggaaaaagtgtggatttacctggagagttaatgagtatggaaattgacttagaagatgatgtacattcctcctctgcaaataatacttcagacagaaagcttctaattgttattgacacaaatattctgatgaatcatctcaaatttgttagaattttgaagacaacagaagtaccaggttttgacaaacttgtgttaataattccctgggtcgttatgcaagagctagatcgtatgaaggaaggaaaactactaaaacgtgcccagcacaaagctatacctgcagttcatttcatcaacgacagtctcaaaaatcaagatagaaagctatggggtcagtcaatacaacttgcatcccaaaaacattatggattgagtgatgagaacaatgatgatcgagtactaaaatgctgtctccagcaccaggaattattcccttgttcttttgttattctgtgcacggatgatagaaacttaagaaacaaaggcctgataagtggtgtgaagtcactcagtaaagaagaattgagtgcagagttattacgcttatctctgaacacagatgtgtgtcatcagccttgtattcctaagcaacagttgaaagcagaaacaacacccttgaaagagagctataaggaggaatctacaagttctggactgtccattctgcttgagagcattgtatctgatcttgaaaaatctcttggaacaggtttatcttcaatattagaaacagaaatgaaaattgcttttggaaacctttggatggagatcctgtacctgaaaccaccatggactctactacatttactacagtgctttaaaaaacattggttggctgtatttggattagttatggaaaagaacttgcttttaactattgagagcctatacaaaaatctccgtaaagctaataaggcagtggattttacaacagtcaaattcttgcttcaggattctagaagtttgttacatgctttcagtacaaggtcaaattatgatggtattcttccacagacctttgctcaagtaaacaacctccttcagacatttgcagaggtcaagacaaaacttaagccaaattcttcagaaaacacagtgactaaaaagcaggaaggtacttcattgaagaattctcataatcaagaaatcactgttttctcgagttctcatcttccccaacccagcaggcatcaagaaatctggtctatcctagagagtgtttggattacaatatatcagaacagcacggatgtatttcaaagattgggctcaaattcagctctgactacttcaaatatagcatcatttgaagaagcatttatatgtcttcaaaagttaatggcagctgtgagggatattcttgaaggaattcaaaggattttggccccaaacagtgattatcaagatgttgagaccctctataacttcctaatcaagtatgaggtaaataaaaatgtcaaatttactgcccaggaaatttatgattgtgtttctcagactgagtatagggaaaagttaaccattggatgccgccagctggttgagatggaatataccatgcagcagtgcaatgcatctgtttatatggaggccaaaaacaggggatggtgtgaagacatgctcaactataggatataagtactgatttgtaactttaaaggaattgcatttgtccttaagaataacagagtagttttcaatctggtcactcttttgggccaaacccaagagaattttaagaaatgtttcataggtataaaaaggtgatcgcctattactgacagtctcattgtagctctaaaaagcctaatgtatccactgtggaataaactccataggctcaactcttctggagttcacaatgcctccatacctctattcttgatagtgagccagtatctctaaggaaaggagagccgtatttttagtcatcctagggcaggagccactgtggcatctgaggaagacccagggtacagtattagcatttctttcaaccctaagtatgggcatgtgaccagagacactgccaaaccctaagaaatcattagggcatgatcatgctcaccatatttcacaaatgaaatcttaatgtgggctgttttttatgatcaaactgtcatccatgttgacctgatgaaaataacaccctccttcacctccctcagggtaatgaaagtagaaatttgactgaagctcctacttccttatacagcctttccttctgtgggcttgtcacttttcagtacatttctagtggggaagagcagggcgacccctctgctgggtttctccttaaatgtgaagcaaaataaatttatataatggaatttggtggcagtgactgatgtttgtctctagctaaaaccaactgtttagttgactttttagttataggataagttggaagtccttgtttactggaatatattatgcttttgttaacacattagattaaatagaatttggtattctattataaatgtttattttttaaagcaataaataacttatttttggtaaaaaaaaaaaaaaaaa

SEQ ID NO: 12501 - DNA, 2729 bp, Homo sapiens
ctggatggactagccggggccatggccggcgcggcggcggagtcagggcgggagctgtggaccttcgcgggttcccgggacccgagcgcaccgcggctagcctacggctacggcccgggcagcctgcgcgagctgcgggcgcgcgagttcagccgcctggcaggaactgtctatcttgaccatgcaggtgccaccttgttctcccagagccagctcgaaagcttcactagtgatctcatggaaaacacttatggtaatcctcacagccagaacatcagcagcaagctcacccatgacactgtggagcaggtgcgctacagaatcctggcgcacttccacaccaccgcagaagactacactgtgatcttcactgccgggagcacggctgctctcaaactggtggcagaggcctttccatgggtgtcccagggcccagagagcagtgggagtcgcttctgttacctcaccgacagccacacctccgtagtgggtatgaggaacgtgaccatggctataaatgtcatatccatcccggtcaggccagaggacctgtggtctgcagaggaacgtggtgcttcagccagcaacccagactgccagctgccgcatctcttctgctacccagctcagagtaacttttctggagtcagataccccctgtcctggatagaagaggtcaagtctgggcggttgcgccctgtgagcacgcctgggaagtggtttgtgctgctggatgcagcctcctacgtgagcacctcgcctttggacctgtcagctcaccaggccgactttgtccccatctccttctataagatcttcgggtttcctacaggcctgggcgctctgctggtccataatcgtgcggctcctctactgaggaagacctactttggaggagggacagcctctgcgtacctagcaggagaagacttctacatcccgaggcagtcggtagctcagaggtttgaagatggcaccatctcattccttgatgttatcgcgctaaaacatggatttgacaccctagagcgcctcacaggtggaatggagaatataaagcagcacaccttcaccttggctcagtatacctacatggccctgtcctctctccagtaccccaatggagcccctgtggtgcggatttacagcgattctgagttcagcagccctgaggttcagggcccgatcatcaattttaatgtgctggatgacaaagggaacatcattggttactcccaggtggacaaaatggccagtctttacaacatccacctgcgaactggctgcttctgtaacactggggcctgccagaggcacctgggcataagcaacgagatggtcaggaagcattttcaggctggtcatgtctgtggggacaatatggacctcatagatgggcagcccacaggatctgtgaggatttcatttggatacatgtcgacgctggatgatgtccaggcctttcttaggttcatcatagacactcgcctgcactcatcaggggactggcctgtccctcaggcccatgctgacaccggggagactggagccccatcagcagacagccaggctgatgttatacctgctgtcatgggcagacgtagcctctcgcctcaggaagatgccctcacaggctccagggtttggaacaactcgtctactgtgaatgctgtgcctgtggccccacctgtgtgtgatgtcgccagaacccagccgactccttcagagaaagctgcaggagtcctggagggggcccttgggccacatgttgtcactaacctttatctctatccaatcaaatcctgtgctgcatttgaggtgaccaggtggcctgtaggaaaccaagggctgctatatgaccggagctggatggttgtgaatcacaatggtgtttgcctgagtcagaagcaggaaccccggctctgcctgatccagcccttcatcgacttgcggcaaaggatcatggtcatcaaagccaaagggatggagcctatagaggtgcctcttgaggaaaatagtgaacggactcagattcgccaaagcagggtctgtgctgacagagtaagtacttatgattgtggagaaaaaatttcaagctggttgtcaacattttttggccgtccttgtaatttgatcaaacaaagttcaaactctcaaaggaatgcaaagaagaaacatggaaaagatcaacttcctggtacaatggccaccctttctctggtgaatgaggcacagtatctgctgatcaacacatccagtattttggaacttcaccggcaactaaacaccagtgatgagaatggaaaggaggaattattctcactgaaggatctcagcttgcgttttcgtgccaatattattatcaatggaaaaagggcttttgaagaagagaaatgggatgagatttcaattggctctttgcgtttccaggttttggggccttgtcacagatgccagatgatttgcatcgaccagcaaactgggcaacgaaaccagcatgttttccaaaaactttctgagagtcgtgaaacaaaggtgaactttggcatgtacctgatgcatgcatcattggatttatcctccccatgtttcctgtctgtaggatctcaggtgctccctgtgttgaaagagaatgtggaaggtcatgatttacctgcatctgagaaacaccaggatgttacctcctaaaaaaaatttttagcatacattaaagtttctcttttacagtg

SEQ ID NO: 12502 - DNA, 2746 bp, Homo sapiens
agttaggatccgctgtggcgtcctgagtggagtttgggaccccagggagggagggtgtgggcgttcgggtccagaggagctgtttagtatccaagatgaatgacagcctgtttgtcagtttggacagacttttgctagaatttgtcttccagtatgagcaagacataagtactaaagaagagatgattcaaagaattaataaatgctgtgaagatattaaggaaaacaaagtaactatttgtaggatacacgaaactataaatgcaacagatgaggaaattgatcattactgtaaacatagtgaggagattaaagacaactgtagaaactggaagccaacatgtgatgtttttcgtaaacatgaagattatatgcaggaccaatttactgtttatcaaggaactgttgaaaaagacaaagaaatgtatcatgattatatatgtcagtataaagaagttttgaagcagtaccaactaaaatactcagaaacacccttttcacgtgaatattatgagaagaaaagagaacatgaagaaattcaaagcagagtgttggcatgtactgaacaattaaaaatgaatgaaacaatttttatgaaatttcgagtgcctgctccctttccatcacttactaaatggactttaaacattgttaatttgagatgtgaaacacaagatattcttaaacatgccagcaatcttaccaaaagttcatccgaattgaagaaagaagtagatgaaatggaaatagaaattaattatttaaaccagcagatatctaggcataatgaaactaaggctctttcagaaactctggaagaaaagaacaaaaatacagaaaacagaaaagaactgaaagaaagaatttttggaaaagatgagcatgtacttacattgaataaaactcaaagcagtcaattatttcttccttatgaatctcagaaattagtaagaccaataaagatgcattcttcagaaccaagagttgcagatataaaagaagaaagttctgtgaagcagtcaaagcttgccaatattgactttagacaaaaagaaaatgatacacagatatttaatgactctgctgtggataaccattcaaaatgttcacatattacgactatcacaagttcacaaaagtttatgcaagtcagattgttaaccccacagaaacaatcaaattccaatcagtggtcggaaaaaggggataaagatgctgagtatggagataaagggacagtaagacaagtaagagaatcaaaatgtacttcacaagctatatatactgaacattttgggaagtcaatagaaaatgatagtgatgaagtagaagagagagctgagaattttccacgaacgtctgaaattcctatatttttaggaactcccaaagctgtgaaagcacctgagtcattggagaaaataaaattccctaaaacccccccgttcgaaattaacagaaatagaaatgcagtacctgaagttcaaacagaaaaggaatcccctggactttcttttcttatgagttatacttctagatcacctggattgaatttatttgattcttctgtatttgatacagaaatctcatcagatcagtttaatgaacattattctgcaagaaatctaaatcctctgtcatcagagcaagagattggaaacttatttgagaagccagaaggagaagatggctttacattttcttttccatcagacacttcaactcatacatttggagctggaaaagatgattttagttttccattttcatttggacagggtcaaaattcaataccttcttcttctttaaaaggtttttcatcttcctcacaaaatacaacacagtttacttttttttgagctagtcattaattccttaaattattttactgttctgtgttcatgagggcataaatttacattattgcttaaaacatgaagactgctttcttttattgataaagcagtaatgtttacattatttgattatatttattgaaatattgaaatactgaatattttgggttttgtgtgtgctattaactaatcattatttattttggttttgattttgcgagccgtggtcaggtagaacttttattaatcttaatagaatttgatgcttttttcattactctttatttaaatattaagcctgcttctccttggaacctaaggtttttttctggaagtattgttggtactttgataagaacaagaactgcagtagtaactccagagttagtgctgaagcgtactttagctactaaaaatttctattaaaattattgggtttcacttctgcttcactatgtagtatacagagtggtactgtaataataatttcaaataatttatgttaataacaaaatctgtgttattttcttctaatataacacatggtacaattctaattttatgagttatgctaatgctttcaatggctaaaaattaaatgtaaagggcaagagtaatttctgaaaattggattgttgtatcagtggtgatcctgttaatattcttttttgcttaaatattttttgaagaacatttacaattttgtctccttcaataacaaaaatttcttctttatgttttgtgttcagtatttgtcaattaattatatagcttaagtgaagatatttaagatttgatgaacttctgtaaacattttgctcaatatcattgtattttgtgctttgtaaattagctgtactgagttaccaagtaataaagggtttgactcc

SEQ ID NO: 12503 - DNA, 2341 bp, Homo sapiens
cagaaagtgaagtggaaagtttacagtatgataaggacaccaaaccaaatccaaaagccagttcttctgtacctgcttcactggcccagctagtgactacatccaatgcttcagaagtagcttcaggacagaagattgctgtaccagcaacatcacatcatttttgcttttcaatagacttaaggagtatacatgccttggagattggttttccaatcaactgtatattaaggtactcatatccattctttggaagtgcagctcctattatgactaatcctcctgtagaagttcggaaaaacatggaagtttttcttccccagtcttactgtgcatttgattttgcaactatgcctcatcagctgcaagacaccttcttaaggattccattactggttgaactatggcacaaggataaaatgagtaaagatttacttctgggaattgcgagaatccagctttctaacatcttgtcttcagaaaaaactcgttttttaggttctaatggtgaacagtgttggcgtcaaacttacagtgaaagtgtgcctgttatagcagcacaaggatcaaataacaggatagcagatctttcttacacagtgactctagaagattatggactagtaaaaatgcgtgagatttttatctctgattcatctcagggtgtatctgccgtacagcaaaagccgtcttctcttcctccagcaccttgtccttcagagatccagacagagcctcgtgaaacgttagaatacaaagcagcacttgagctagaaatgtggaaggagatgcaagaagatatatttgaaaatcagctgaagcagaaagaactggctcatatgcaggctcttgcagaggaatggaagaaaagggaccgagaaagagaatcactagtaaagaaaaaggtggctgaatatactattctagaaggaaaacttcaaaaaactctaattgacttggagaagcgagagcagcagcttgctagtgtggaatcagagcttcaaagagaaaaaaaggaactgcaatcagaacgtcagcggaacctgcaagaactgcaggactctatccgtagggccaaagaggactgtattcaccaagtagaactagaaaggttaaaaatcaaacagctcgaagaggataaacaccgccttcagcaacagcttaatgatgctgaaaataagtataagattttggaaaaagagttccaacagttcaaggaccagcaaaacaacaaaccagaaatccgtctacagtctgaaataaatcttctcaccttggaaaaggttgaacttgaaagaaagttggaatctgcaactaagtctaaactgcattacaagcagcagtggggacgagctttgaaagaacttgccagacttaaacagagggagcaagaaagtcaaatggctcgtcttaaaaaacagcaggaagaattggaacagatgagactacgttaccttgccgctgaggaaaaagatacagtaaaaaccgagcgacaagaattgttggatataagaaatgaattgaacaggttaaggcaacaagagcaaaaacaataccaggattccacagagattgcaagtggaaaaaaggatggcccccatggcagtgtattggaagaaggtttggatgattatttgactcgcctgatagaagaaagggatactttgatgagaacgggtgtgtataatcacgaggatcgaataataagtgaactcgaccgacagatcagagagattttggcaaaaagcaatgccagtaattaataacatttggaaaagctttatagagactctaagtctaaattttaatttctttgtaaaaacctcaaaagtgaggaaaatggatgttttaaaatggtattttcaattttttataagcaaaattttgtatgttattgtatagtatttatttgatcttatttactttatgctacctctcccacactggttttatttgtaatttgcatttatatactcattttaaatgacttttcagtgtttttcatagtttataatctgatggctaactaactttcaaaacagcttttaactaagtttgttgtaggagaaatgactgcggtaatttccagttctataatgtttcatgttgagccaaaagagtatatcttgcactttaaaaacgctgcgtcctattccatttgaatgtaaattcttaaaagttgagaccaattgtaaccagtttaactcattttagatgacctttttttcttataatatttgcaagtgacaagtttgaaaacaaagcaagatcagtgcagagaagccacatgacatgttgggtgacagattggtcatttatttaaataaagttaatacagatt

SEQ ID NO: 12504 - DNA, 2584 bp, Homo sapiens
atagggaggtcgggtagaggctcccgggacctgcgtgctgccgagagaggaagcgaagggcaccatctttgtattttgtgtcatgacttctcaagagaagacagaagagtatccttttgcagatatatttgatgaagatgaaactgaaaggaattttttgttgtccaaacctgtttgctttgttgtatttgggaaaccaggtgttgggaaaacaacattagcccgttacataacacaggcatggaaatgtattcgtgttgaagctttgccaattttagaagaacagattgctgctgaaaccgaatcaggagttatgttgcaatcaatgttgatcagcggtcaaagcattccagatgaacttgtcataaagctaatgttggagaagctcaactccccagaagtctgtcactttggttatattatcactgaaataccatcactttcacaggatgccatgactaccttacagcaaatagaattaattaaaaacttaaacctgaaacctgatgttataatcaatataaagtgtcctgactatgatttgtgccagagaatttctgggcaaagacagcacaataatacgggatacatatacagtagagaccagtgggatcctgaagtcattgagaatcataggaaaaagaagaaagaagcccaaaaggacggaaaaggagaagaggaagaagaggaagaagagcaagaagaagaagaggcatttattgccgaaatgcagatggtggctgaaattcttcatcatctagtccagaggcctgaagattatttggaaaatgttgaaaacattgttaagctttataaggaaacaattctccaaactttagaagaagtaatggctgaacacaatccccagtatctcattgagctaaatggaaataaaccagcagaggagctctttatgattgttatggatcgacttaaatatctgaacctaaaaagagcagctattctaaccaaacttcagggtgcagaggaagaaattaatgacacaatggaaaatgatgagctatttcgtactcttgcatcttataaacttattgcaccaagatacagatggcaaagaagtaaatggggacgtacatgtcctgtgaatttaaaagatggtaacatttattcaggattaccagattattctgtgagttttctaggtaaaatctactgtctttcatcagaagaagcattaaaaccatttttgttgaacccacgtccctatctgcttccacctatgccaggaccaccatgtaaagtattcatacttggacctcaatattcagggaaaacaacactttgcaatatgcttgcagaaaattacaaaggaaaggtgactaactaactatctgtctatctatctatctatctatctatctatctatctatctatctatgtctatctgtcatgtatctatactcgattataatttgtaggattttatttgtactcagtttttaaaatttcatgttttaattgaataattgttccactgggcttggggtagggtaggcattctttttgttgtttattgctgcttccagaccagagtccctccctgcttcccaaaagctcccacatgtgaatatcgtgtcattcagactctgccacctattagctttcttggttctactcatcttctgtcccctgggtttcacttctcctggctcactctcactctccccatataatcactcctgtcctaattcttggtgatttcagtattacaaagatgatcctcccaacaccttgacacctccctcagtaatcttgttctccactctcagtaaatgaaattatttttagcttagacaagagtgatagcagtaaaagtggtatgaaacaagcatatttgggatataatttgaagacaaagctgaaagatttgatgagggattggaatgtggaggaattctagaaggggcaatgtggcttgaggattgcctatgcaagaaggaatggcacaagatcatggctaaagacagagcaattcaggccacagaaaggtgttagaagttgttcaaagtgctgttgcattcttttaagcgccggagtatcattttctatttgcttttaactttttcattgtgaaacatgacaaacatacagaaaagtgaagcccactgagttaccgcaaaatgaacccccatgtaaccaccaaccaggtcaaatctggaatgttgccagcacccagacgccctctcatgtttcttctcaataccagtctcctcactctccacacaaaggtaaccactgcccagaattttatggcattcacttccatacttctcctatggttttgccgtggaagcatacatccaaataccataggctagttttgcatggtttttttgaattttatagacctaaacaatttatcttctttgtgcctggcttctttcacttaacattataattatgatatttgtccagactattgaatgtagctgtagtttattcatttttattgttttattgtattctgttgattgacttataccataatgtatttatccacatttgagcactaataaaacttggattgattccagattggagtaaacaaaaaaaaaaaaaaaa

SEQ ID NO: 12505 - DNA, 2580 bp, Homo sapiens
ggtgcggggaggtcgcccccgggcggcgaagcggccattatgcaggccttgcattgaaaggctctagttacagtggacttcttgaacgacatcatattcacaccaaaaatgtagaacatattatagatagtttacggaatgagggaattgaggttcgtctagtaaagaggagagaatatgatgaagagactgttcgatgggcagatgctgtcatagctgcaggaggtgatggcacaatgctgctggcagcgagtaaagtcttggacagacttaaaccagttataggggtaaacactgatccagaacggtctgagggtcatttatgcctgcccgttcgatatacacattcctttccagaagccttacagaagttctatcgtggtgagttcaggtggttgtggaggcagagaatcaggttataccttgaagggactggcataaaccctgtacctgtggaccttcacgagcagcagctaagcttgaatcagcacaatagagcccttaacattgaaagagctcatgatgaaaggtctgaggcttcaggaccccaacttctgccagtgagagcactaaatgaagtcttcattggggagagtctgtcatccagggcttcctactatgagatttcagttgatgatggtccatgggaaaaacagaagagttcagggctcaatttgtgtactggaacaggatcaaaggcctggtcattcaatattaacagggttgcaactcaggctgtagaagatgttttaaatattgcaaaacgacaaggaaatttgagtcttccattgaacagagaattggtagagaaagtaacaaatgaatataatgaatcactgctctacagtccggaagaaccaaaaatacttttcagtattcgagaaccaatagcaaatagagttttctcaagcagtcgtcagcgttgtttctcctcaaaggtttgtgttcgttctcgttgttgggatgcctgtatggttgtggatggaggaacttcttttgagtttaatgatggtgcaattgcttcgatgatgatcaataaagaagatgagcttcgaactgtgcttcttgaacagtgaaggatttcctcatgacaaattttgattactggcgagaatatttttacttcagaaacagactaccagtcgtaaagtgacattttttggttattgttgagactgcttgcccgtgggctcagaagtgagatttgcattattcttctgttggattctgatagaaaaaaagacattcactgtataagaaaatggatggactgaaccaattagaattgataccagtgaaatttttatattgcttacaattggtaaccaagagtgctgatacctttttaaatttagaggggcaggcttaaataaaggactaaatatttaggatttgaaacttaactgtataagtgtgttttccttccctttcctcctaattgtgggattgtcagaactgaacacatatcatttgattagtgcatattttttatagtacctgaaaaccaagattttgaaaaaattttcaagacagagaattttgataaatcctgacattgacctaattgacataggtaaatatgtttgtatatgtgctaataattttctaatttcggaacacgatgatgttatgactattgatttaaaaatttcaaataataatttttgaaattatagatgaatgctttcatttgagtttcattctgtaattcagcagttctgggtgaaatacagatagcaaaacaaatcatgatgctgttacaaatgtattagttatccaataagtgttttaagtcaatttttttaaaatgatatgagtcttacaggtttcttccatctttaaaatgctcaaacatggattcagggactaaaaggatgaactgattagacattttctattaggagtttggtaaaatattgtaaaaatatcttcacctgtgttaggagtattatcagaaagaatggattctttaataaatatgtaaaacacagtagttttggaattgccttccttagtattgtggttttcacctagcttatattccaagatttacagaatagcttttaggataagatgttaggactttttttttttccccatgagaattcctttatttttggaggaaattattatctaattattgatctacttataagtaatcctagaatttttgccaaaagatcctgtcgttgcataatcaaacagttggtattctcgtgccgttgttcaaagtcatgtgtttctttcatttggtgctgaaaatttctgttcaatcattgacaaatatttattgaacacccactctgtgccatgtaaaactatgtcaggtgctggatatgttgatgaatgaaacagactctatccttatacaatttgagtcttgtgggctcagaagtaaattctgtgaaagctggacggatagtcgaattgagtgctcttagttttgccaatatttaacatgttgttcttatcaattttttaaaataaatgttaatgtacaaagttaaaaaaaaaaaaaaaaaaaaaaaaaaaaaaaaaaaaaaaaaaaaaaaaaaaaaaaaaaaaaaaaaaaaaaaaaaa

SEQ ID NO: 12506 - DNA, 4371 bp, Homo sapiens
cccctgctgctctcaagtttcccgttggcggcgcggcccgggcgcttcaggtagcctctcggctctctctgctccgctccgcgcccaggtagggcaccgacgggggctgcacgcggctggccggcttcctccctgctgaggcggccctccctcctcccgcggggccctcctggccggggatccgcagcgctgcgccctctgaacgcccggcccccgcgcctgctgcggggcgcggcctggccgggccctggccccggctggcctcagtgcccagcagccccgctccgctctgcccagcgcgtcccctttgctccagccctgcggccgtccctttcggccggcggcatggccctgtcgtccgaacccgctgagatgccgcggcagtttcccaagctgaacatctctgaagtggatgagcaagtccggctcctggcggagaaggtgtttgctaaagtgctccgagaagaggacagcaaagatgccctgtccctgttcactgtcccagaggactgccccatcgggcaaaaggaagccaaggagagggagctgcagaaggagctggcagagcagaagtctgtggagaccgcaaaaagaaagaaaagtttcaagatgattcggtcccagtccctgtctctgcaaatgccgccacagcaagattggaagggccccccggcagccagtccggccatgtctcccacaacccctgtggtcactggagccacttccctgcccacgccagcaccctatgccatgcctgagttccagcgggtcaccatcagcggagattactgtgccgggatcactttggaggactatgagcaggcagccaagagtctggccaaggccctaatgatccgggagaagtatgcgcggctcgcctaccaccgcttcccgcggatcacatcccagtacctgggtcatccgcgggcggatactgcacctccggaagagggccttccagacttccaccctcctccactgccccaggaagacccctactgcctggatgatgcaccccccaacctggattacttggtccacatgcaggggggcatcctctttgtgtatgataacaagaagatgctggagcaccaggagccgcacagcctaccctaccccgacctggagacctacacggtggacatgagccacatcctggctctcatcaccgatggccccacgaaaacctattgtcaccggcgactgaactttctggaatccaagttcagccttcatgagatgttaaacgaaatgtccgagttcaaagagttgaagagtaacccccaccgggacttctataacgtgagaaaggtggacacacacatccatgcggccgcctgcatgaaccaaaagcatctgctgcgcttcatcaagcacacataccagacggagcctgacaggactgtggcagagaagcggggccggaagatcaccctgcggcaggtgtttgacggcctgcacatggacccctacgacctcactgtggactcactggatgtccacgcgggccggcagacattccaccgctttgacaagttcaactccaaatacaaccctgtgggggccagtgagctgcgtgacctgtatttgaaaactgaaaactatctgggaggagagtactttgctcggatggtcaaggaggttgcccgggagctggaggagagcaagtaccagtactcagagccacggctctccatctacggccgcagtcctgaggagtggcccaacctggcctactggttcatccagcacaaggtctactctcccaacatgcgctggatcatccaggtgccccggatttatgacatatttaggtcaaagaagctgctgccaaactttgggaagatgctggagaacatcttcctgccccttttcaaggccactatcaacccccaagatcatcgagagcttcacctcttccttaaatatgtgacggggtttgacagcgtggatgatgagtccaagcacagcgaccacatgttttccgacaagagcccaaacccggacgtctggaccagtgagcagaacccaccctacagctactacctgtactacatgtatgccaacatcatggtgctcaacaacctccgcagggagcgcggcctgagcacgttcctgttccggccgcactgtggggaagccggctccatcacccacctggtgtctgccttcctcactgctgacaacatttcccacgggctgctcctcaagaagagtccggtattgcagtatctctactaccttgctcagatccccattgccatgtctcctcttagcaacaacagtttgttcctcgaatattccaagaaccctctgagggaattcctacacaagggactgcatgtttctctttccaccgatgaccccatgcagttccactacacgaaggaagcacttatggaagaatatgccattgcagctcaagtgtggaagctgagcacctgcgacctgtgtgagatcgccaggaacagcgtgctgcagagcggcctctcgcatcaggaaaagcaaaagtttctgggacaaaattattataaagaaggacctgaaggaaatgatattcgaaagacaaatgtggctcagatccggatggcattccgatatgagaccttatgcaatgagctcagcttcctgtctgatgctatgaaatcagaagagatcaccgccttgaccaactaggtccagcatttgacatgcattttaactttttggttcaatttcaagtctgctgtggctaatagtggtcaagattccgaactaggactttcctctgtgaagaggatgcctctgaagaaattttaaactggtgattttggttgcactgctcactttaagagttaacatgctcacttgttagtatttctgagtaacaagatggtgacttctccttggggatctgggagctgagcacttgtctatacttgttcctaattttccaagtatttctcttgaaactgccagtgcctgaactgttggggccaggattttccctggtcagatgccaagtaacatgtggttttctgccatacttttctccattggcccaggtaggctaattggtagttgttcatttcagcctctggatggctggctgccttaaacacaatcaatttcaaagctccatttcataaaggggctactttgaaggagttaagatggaagacttccttcttgacaaattgtgtttttagtgaatttcttaaaccgttttatttagccctccttccctctttctagttggaagccaaatgtactcatgaaaacagccactcctattctgagtcttggtttcttcacctagaaagtgagggtttggactagatgagtggctttcagggtgttctgtgaatctcctcatgaatactttagggtaggggagggaagggagtgagtgatgctcaggggctgtcaaagtgactgcgttcatcagttttacactggggctgctacataatattttcatttgaacgaagaacttcaaaaagcacaggactagatgatctctgttccttttggctctaatatgctacaactgtaggccaattatcactttaccaattaagagttaggccagataagtgaaatttaacttaagggcacacagctaataagtaataggcctaaactggatttccttattccaaatcctgtcttttccccactattccattagaccccacaaatgttagttgtgtgtgtgtgtgtgtgtgtttttaatcactgtaaccggatgcatttttttaaggcaaaatttctcccttatctactatgatgacttcagaagatacaatggtcccaggggccaagtagaaagcatttttaaagattaatctgaattaagctttatcagtgtactctttatctgtgttactagtgcctggtatgtagtaggtgctcaataaatgcatattgaataactaagtgaatttcttttggcaactttttaaggacatgtgctcttagtacttaagaggctgctcaaggaccttcctatctatttctgtggtcaaattcagactacaggaggtctttttgaatcattatagttagaagaagaatccagtttctgcctgtgaacttatttgactttagattgtctcatcttgtgactttataatgcctgtcccctccactggtcaattcagcatatggaagtataaatgcagtctttttactaggcagatatatatgctatcttacagctaattatgaaattgaatgaaaatccattgttatcttagggattagttttgaaaagcccccgtttatatacatttgccctaacataggaagtattgtgtagtttctcattgtcattttatctgtatcaagtatctttttttaaattgttaaataaagtcagctaggactgtg

SEQ ID NO: 12507 - DNA, 4192 bp, Homo sapiens
gtggcgatcatggcaagttagaagttttctgactcctttcggaggagcctccgggaccccggggagtaacaggtgtctggaggctgaagggtggaggggttcctggatttgggttttgcttgtgaaactcccctccaccctcctctctcgcacccacccaccccctcacccccttctttttccgtccttggaaaatggtgtccaagctcacgtcgctccagcaagaactcctgagcgccctgctgagctccggggtcaccaaggaggtgctggttcaggccttggaggagttgctgccatccccgaacttcggggtgaagctggagacgctgcccctgtcccctggcagcggggccgagcccgacaccaagccggtcttccatactctcaccaacggccacgccaagggccgcttgtccggcgacgagggctccgaggacggcgacgactatgacacacctcccatcctcaaggagctgcaggcgctcaacaccgaggaggcggcggagcagcgggcggaggtggaccggatgctcagtgaggacccttggagggctgctaaaatgatcaagggttacatgcagcaacacaacatcccccagagggaggtggtcgatgtcaccggcctgaaccagtcgcacctctcccagcatctcaacaagggcacccctatgaagacccagaagcgtgccgctctgtacacctggtacgtcagaaagcaacgagagatcctccgacaattcaaccagacagtccagagttctggaaatatgacagacaaaagcagtcaggatcagctgctgtttctctttccagagttcagtcaacagagccatgggcctgggcagtccgatgatgcctgctctgagcccaccaacaagaagatgcgccgcaaccggttcaaatgggggcccgcgtcccagcaaatcttgtaccaggcctacgatcggcaaaagaaccccagcaaggaagagagagaggccttagtggaggaatgcaacagggcagaatgtttgcagcgaggggtgtccccctccaaagcccacggcctgggctccaacttggtcactgaggtccgtgtctacaactggtttgcaaaccgcaggaaggaggaggcattccggcaaaagctggccatggacgcctatagctccaaccagactcacagcctgaaccctctgctctcccacggctccccccaccaccagcccagctcctctcctccaaacaagctgtcaggtaagcaaaggttgggcctcactgcctcggcaacccaaccatcctggttcttgccacggatcttatctggtttaagggttttcagaggagcaaacgcttttgagatgatcctagggccgctctctcattgccagaatatactcccctggaaataatgtgtggctctgatcagtttcctccaactcctggttcagccattgccctgtgagggctcactcggcttccagggagccctttaccctatttgtctccttccctcttcttctccctgtgtggctgctgactcagcggtcattctacctgaggaggctgccttatgggtgggccagatccaaaccgcagcaaacgggtcgtgatggcgtggcaaccctcactgtgttggaggatggcactccggccacctcctccatctctggccatatcctgcccctcgctcggtccggctgcctcaggagaagctcagtagcctttggggacggccactctgttggtggcctctgcttgttggcttccgtgtgtcatcagggttggtgggggtcagtcacttgaaatctttgcagcaatgagttgggaaaaactgaccgagtacctgctccatcatgcttgattgagtgctcctgtgtgctggccctggcctggattagaatgcctctgctgtgggctttgggtttgtcaggatggaatcctacgacctcctcgggggaaagcacacctcatgctgagcgctctcttaggcacaggctgggatggagcacttcttctggtccttcattcttctggcaaagctggcttctagaatggatgtgctcactggggtctgtgtggtgcccatgaccacaaagtgtagcagcctcctgcctgctccaagaaaagggcttgtgaaaggaaagccaaacactgtttctaactcaggggtgattctgaaacctgttggctcccctcacctgtcggttgccttctgatgagaaaggcctgagggctgggggctgacccaagtgttgaggggaccaaagccaccaagacaggctcggagccatcagctgggtggtgtacaagcatttgttccatccctgctgtgccctcccatagcactgcctctttccaggggcctctgggagcctgacagtgcccagcatgaaggtggggccagtgctgggggtttctgtaggtccactcccacagaggagagaggctcagccacacaggaagaaagtcttggttacttaagaggcagagaagccctaggcaaagactggcctgattgcagagtaacttcgcccctttaggaaattcaaagcagggttctgaggcaaatggcacatggctggcactgagcagtaccagtgtgcttgcccaccacagcgatccacggagctgaagctgggagctacagggggcgtggttggggcaaggggcattactgggaagacaatggccattgtgttgggacctgtgatctccacaccaaagtcagggagcctggaagccaaacaaaggcccagcagccttctgacaagcaagggctgtgctgaggtcaccacggggtcgttggtttaggcatcctgtgtgctgacaggagacccagagagctagggctggagggacagggagcagggcagaaaacacagcctgtgtactcctctgactggagtctaggaagggcgtgtcatgggaagcggatactcgggtgctcaagtctgatctttctaaaatcttgtaatgttagaatttggaggaatttgaagaaggaactgaggcccagaaagaggcagtgatttgccaaagtgacacagagcaatggtacgaaaacaaggactagagctctggcctgctggttcccactccatactttcccacagcactacgatgtgttgaatgcttaccaagtcctgggatatgctagtgatgtacgagctgcgcgtcctgcctctgggaggttactgtctggtaggaaggatatcgggtcactgtcgagtccccagaaccagctgcagatggaggttttgtttgggggctttgtggatctttctgcggtgtaataagatcctatactgtttctggagcaacagttatgggacactgatattatcagtggctgcctttcttctgtcttttttttttttttttttttttgagagacaggtctacctctgtcacccgagctggagtgcagtggtgcagtcttggctcactacagcctcgaactcctggtctcttgcggtcctcctgtcttagcctccctttgtgcttgggattacagttgtgagattgtgcccgcccttctgctttaattttcactctgggctcctcaacatggtccttgtcccaagcccagggactggcttctctttctctgagtgtagttatgtatctgggttctaaccagtaaggttataactgtggctaattcacataacttctctgagtctgaatttcctgcctacaaaatggagaaataggaccttccacacagggtgcatgtgaggatgaaaggagtgaatgtataaagacacctttcccgataacccatactaccctcattatgactcttaacattagagagggctaaacaagggcagtgagaagactggcaggcagcagaaatcattttctttttgatctcacacaccagggcattccccgtaagaggcagtgagatgtagcctggccctggaactagaaacagaggtggctgctgtgctgtgcctagatgcacgatgctggggtcaaagacttgtgtccccgcctcaggctgccaggatggcggtgtgccgtgacagggctcccgagtcatcgactcaggcagacagcaggctggagcccagcattcaggggtggcttctgtctgtagagccgcatggcactcttcccacctcagtgcccacagccaaggtagggtcactaaccaagccagaaacgtaactgtgtgcagaataccgaaaaaaaaaaaaaa

SEQ ID NO: 12508 - DNA, 2816 bp, Homo sapiens
gtggcgatcatggcaagttagaagttttctgactcctttcggaggagcctccgggaccccggggagtaacaggtgtctggaggctgaagggtggaggggttcctggatttgggttttgcttgtgaaactcccctccaccctcctctctcgcacccacccaccccctcacccccttctttttccgtccttggaaaatggtgtccaagctcacgtcgctccagcaagaactcctgagcgccctgctgagctccggggtcaccaaggaggtgctggttcaggccttggaggagttgctgccatccccgaacttcggggtgaagctggagacgctgcccctgtcccctggcagcggggccgagcccgacaccaagccggtcttccatactctcaccaacggccacgccaagggccgcttgtccggcgacgagggctccgaggacggcgacgactatgacacacctcccatcctcaaggagctgcaggcgctcaacaccgaggaggcggcggagcagcgggcggaggtggaccggatgctcagtgaggacccttggagggctgctaaaatgatcaagggttacatgcagcaacacaacatcccccagagggaggtggtcgatgtcaccggcctgaaccagtcgcacctctcccagcatctcaacaagggcacccctatgaagacccagaagcgtgccgctctgtacacctggtacgtcagaaagcaacgagagatcctccgacaattcaaccagacagtccagagttctggaaatatgacagacaaaagcagtcaggatcagctgctgtttctctttccagagttcagtcaacagagccatgggcctgggcagtccgatgatgcctgctctgagcccaccaacaagaagatgcgccgcaaccggttcaaatgggggcccgcgtcccagcaaatcttgtaccaggcctacgatcggcaaaagaaccccagcaaggaagagagagaggccttagtggaggaatgcaacagggcagaatgtttgcagcgaggggtgtccccctccaaagcccacggcctgggctccaacttggtcactgaggtccgtgtctacaactggtttgcaaaccgcaggaaggaggaggcattccggcaaaagctggccatggacgcctatagctccaaccagactcacagcctgaaccctctgctctcccacggctccccccaccaccagcccagctcctctcctccaaacaagctgtcaggagtgcgctacagccagcagggaaacaatgagatcacttcctcctcaacaatcagtcaccatggcaacagcgccatggtgaccagccagtcggttttacagcaagtctccccagccagcctggacccaggccacaatctcctctcacctgatggtaaaatgatctcagtctcaggaggaggtttgcccccagtcagcaccttgacgaatatccacagcctctcccaccataatccccagcaatctcaaaacctcatcatgacacccctctctggagtcatggcaattgcacaaagcctcaacacctcccaagcacagagtgtccctgtcatcaacagtgtggccggcagcctggcagccctgcagcccgtccagttctcccagcagctgcacagccctcaccagcagcccctcatgcagcagagcccaggcagccacatggcccagcagcccttcatggcagctgtgactcagctgcagaactcacacatgtacgcacacaagcaggaacccccccagtattcccacacctcccggtttccatctgcaatggtggtcacagataccagcagcatcagtacactcaccaacatgtcttcaagtaaacagtgtcctctacaagcctggtgatgcccacacaccacttacttcgtgcgcaacaacaaggaccctgttttccacaccatcaccctctgggcagctgtcatggaaaagcccagtgacctgaccagcacctgcgagaggtccctgcttacctgacggacgtcctgctggcacctcagacaatccactctcaggagcgcagcccgaagcccagtttcccttctatgcagtattgccacaatgcctctcccacgatgtcaaggactcctgtctgtcctggaggtgggagacaaggaacctccgaagaggaagcaagaaagccgtactgtctatgttgtgatccttcatcgaacaaactgatgcgaaaacttgaatctgttactgaaatgaggagagaaggacatgtgctattgaactgagccaaacacactgtaaatatccacagactccctcccctgcccccatcccaaatgatcttgagatttcttttaaagaagtaaatttgtccaatggctgtaaactataaactactgtaattaagtgcaatttcccctctgtgtcctctcccctctgccctgtatataatactaaagtgtctattagttttctttgtaaaggtcagagtcaaaatttcaaaagtgatctgtcccctctcccctcatggagaaacatcctaagtgggaagtgaagccccttgtcctctcccgcgaggcctggacacttatggggacagcataccttggactgactaccagctaactccagtctcctgacattaagacacacctctggatccctggaggggctgaatgtagtgtgtcagagtaacatgccagcttcctgtgggccaggagctcagccgtgcactccctaagaaaccccagggcagggaaactggctgtttgatagcagaagaaaaagttgcagtctcagaaagccttccattaaaacaatttattttatcactaaaaaaaa

SEQ ID NO: 12509 - DNA, 13295 bp, Homo sapiens
tgcagcgctggtcgcagccctcagctgcgccgggcggttccggctcctccctctccttgtgcctcagcgccaccatggtgctggagtcggtggtcgcggacttgctgaaccgcttcctgggggactatgtggagaacctgaacaagtcccagctgaagctgggcatctggggcggaaatgtggctttagataatctacagataaaagaaaatgccctgagtgaattggatgttccttttaaagtcaaggctggccaaattgataaattaactttgaagattccttggaagaacctttatggagaagcagttgttgcgaccctggaaggattatacctgcttgttgtccctggagcaagtattaagtatgatgctgtaaaagaagaaaaatccttgcaggatgttaaacagaaagagctatcccgaattgaagaagcccttcaaaaagcagcagaaaaagataagccaaaagaagccaaaaaggatacatttgtggaaaaattggcaactcaagtaataaaaaatgtacaagtaaaaatcacagatattcacattaaatatgaagatgatgtcactgatccaaagcggcctctttcatttggtgtcacactgggagagcttagtctactgactgcaaatgaacactggactccatgcatattaaatgaagcagacaaaattatatacaagcttatacgacttgatagtcttagcgcctactggaatgtaaattgcagcatgtcttaccagagatcaagggaacagattttggatcagctgaaaaatgaaattcttacaagtggaaatatacccccaaattatcaatacattttccagccaatatcagcctctgcaaaactctacatgaatccttatgcagaatcagagctcaaaacgcccaaactggattgcaacatagaaatacaaaatattgccattgaactgaccaaacctcagtacttaagtatgattgaccttttggagtcagtggattatatggttaggaatgcgccttataggaaatacaagccttatttaccacttcataccaatggtcgacgatggtggaaatatgcaattgattctgttcttgaagttcatataagaaggtatacacagatgtggtcatggagtaacataaaaaagcacaggcagttactcaagagttataaaattgcctacaaaaacaagttaacacagtctaaagtctcagaagaaatacagaaagaaattcaggacttggagaagactctagatgtttttaacataattttagcaaggcaacaagcacaagttgaggtgattcggtctgggcaaaaattaaggaaaaagtctgctgacacaggcgagaaacgtggaggctggtttagtgggttgtggggtaagaaagagtctaagaaaaaggacgaagaatcattgattcctgaaactattgatgaccttatgactccagaggaaaaagataaactcttcactgccattggttatagtgagagtacccacaacctaactttacctaagcagtatgttgcccatattatgaccctgaagttagtaagcacctctgttacgataagagaaaacaagaatattccagaaatactaaaaattcagataattggcctgggcactcaagtatctcagcgaccaggagcacaagcacttaaggtagaagcgaaattagaacactggtatataacaggtttgagacagcaggatattgtgccatcacttgtggcttcaattggtgacactacatcatccttgcttaaaattaaatttgaaaccaatccggaggatagtcctgctgaccagactctgattgttcagtcccagcctgtggaggtcatctatgatgctaaaactgtcaatgcagtggttgaattctttcaatcaaataagggattggatcttgagcaaataacatcagcaacattgatgaagctggaagaaattaaggagagaacagctacaggacttacacatattattgaaactcgaaaagtccttgatttaaggataaatctgaagccttcttatctagtagttccacagacgggtttccaccatgaaaagtcagatcttctgattttagattttggtacatttcagctcaacagtaaagatcaaggtttacagaagactactaattcatctctggaagaaataatggataaggcatatgacaagtttgatgttgaaataaaaaatgtacaactactttttgcaagagcagaggaaacctggaaaaagtgtcgatttcagcatccatcaactatgcatatattgcaacccatggatattcatgttgagttggctaaggccatggtagaaaaagacattagaatggccagatttaaagtgtcaggaggacttcctttgatgcatgtgagaatttctgaccagaagatgaaagatgtgctatatttgatgaacagtatacctttgccacagaaatcatcagcccagtctccagagagacaggtatcctcaattcctattatttcaggtggtacaaaaggtctacttggtacttcactattgctagacactgtggaatcagagtctgatgatgagtattttgatgctgaagatggagaaccacagacttgtaaaagtatgaaaggatcagaacttaaaaaagctgcagaggtcccaaatgaggagctcatcaatcttctactcaagtttgaaattaaagaagtgattttggaatttactaaacagcagaaagaagaagatacaattctagtatttaatgttactcagttaggaacagaggccacaatgagaacatttgacttaactgtggtatcttatttaaagaaaatcagcttggattatcatgaaattgaaggatccaaaaggaagccccttcacttgattagctcttctgacaaacctggattagatcttttgaaagtggagtatattaaggctgataagaatggacctagttttcaaactgcttttggaaaaactgaacaaacagttaaggtggccttttcatctttaaatctgttgctgcaaacacaagctcttgtcgcttctattaattacctcacaaccattattccatctgatgatcaaagcataagtgttgctaaggaggtacaaatttcaactgaaaaacaacaaaaaaattcaactctgccaaaagcgattgtatcctccagagatagtgacattattgatttcaggctatttgccaagttgaatgctttctgtgtcattgtttgcaacgaaaagaacaatatcgccgaaatcaagattcaaggactggattcctccctttctctccagtcaagaaagcagtcactttttgcccgactagaaaatattattgtcacagatgttgatccaaagacagttcataagaaagctgtgtcaataatgggaaatgaagttttccgttttaatttggatttgtatccagatgctactgagggggatttgtatactgacatgtccaaagtggatggtgtgctgtctctgaatgttggctgtattcagattgtctatcttcataaattccttatgtcacttctgaacttcctgaataatttccagacagccaaagagtctctgagtgctgccactgcccaggctgcagaaagggctgccacaagtgtgaaagatcttgcccagaggagttttcgtgtttccatcaatattgatttgaaagcaccggttatagtcatcccacagtcttctatttccaccaatgcagtagtggtagatcttgggttaatcagagttcataatcagttcagtctggtgtctgatgaagactacttaaatcctccagtaattgatagaatggatgtgcagctaacaaagcttacactttataggacagtgatccagccaggcatctaccatcctgatattcagctgttgcacccaattaacttggaatttcttgtaaatcggaatctagctgcatcttggtaccacaaggtgcctgttgtggaaattaaaggacatcttgattcaatgaatgttagtctaaatcaagaagatcttaatcttttatttaggatactaacagaaaatctctgtgagggtactgaagacttggataaagtgaaaccaagagtacaagagacaggtgaaattaaagagccccttgaaatctctatatcacaagatgtacatgattcaaaaaatactttaacaactggagtggaagaaattaggtctgtagacatcattaatatgctgctgaattttgaaattaaagaggttgtggttactttgatgaaaaaatcagaaaagaaaggaaggcctttacatgagctaaatgtcctgcaacttggaatggaagctaaagttaaaacctatgacatgactgctaaagcttatctaaaaaaaattagtatgcagtgctttgatttcactgactctaaaggggaacctcttcacattattaactcttctaatgtgactgacgaaccccttctgaaaatgttactgacaaaggcagacagtgatggaccagaatttaaaactattcatgacagtaccaaacagagactgaaggtttcatttgcatccttagacttagtacttcatttggaagctttactttccttcatggattttttatcatctgctgctccattctctgagccttcctcttctgagaaggaatccgagctgaaaccacttgtgggggagtccagaagtatcgctgtcaaagctgtatccagcaacatttcccaaaaggatgtgtttgatttaaagatcacagctgaattaaatgcatttaatgtctttgtctgtgatcagaagtgtaacattgcagatattaaaatacatggaatggatgcctctatttctgtgaagcctaagcagactgatgtgtttgccagacttaaagatattatagttatgaatgtagatttgcagtccattcacaaaaaggctgtctctattttgggagatgaagtctttaggttccaactgactctttatccagatgccacagaaggagaggcctatgctgatatgtccaaagtagacggcaaacttagttttaaagtgggttgtattcagattgtttatgttcataaattcttcatgtctcttttgaacttcctcaacaatttccaaactgctaaagaagctttgagtacagccacagtccaggctgcagaaagagctgcttccagcatgaaagacttggctcaaaagagtttccgccttttgatggatattaatttgaaagcaccagttattattattcctcagtcttcagtatcacctaatgctgttatagcagatctgggtttaatcagagttgaaaacaagtttagcttggttcctatggaacattattctcttcctccagtcattgataaaatgaacatcgaactcactcagttgaagctgtcaagaactattttgcaggctagcttgccacaaaatgacattgaaattttaaaaccagtcaacatgcttttgtccatacagcgaaacttagcagcagcatggtatgtgcaaattccagggatggagataaaaggaaaactaaaacctatgcaggttgctctcagtgaagatgacttgacagttttaatgaaaattttgctagaaaatcttggagaagcttcctcacaaccaagccctacacagtctgtgcaggagactgtaagagtgagaaaagttgatgtttcaagtgtacctgaccatctcaaagaacaagaagattggacagactcaaagctctctatgaaccagattgtcagtctccaatttgactttcactttgaatctctttccattatcctttataacaatgatatcaaccaggaatctggagttgcatttcataatgacagtttccaacttggtgaactcagactacatcttatggcctcctcagggaagatgtttaaggatggctcaatgaatgtcagcgttaaacttaagacatgcacccttgatgatctcagagaaggaattgagagagcaacatcgagaatgattgacagaaagaatgaccaagataacaacagttctatgattgatataagttacaaacaagacaaaaatggaagtcaaattgatgctgttcttgacaagctgtatgtatgtgccagtgtggaatttctgatgactgtggcagatttctttatcaaagctgtgcctcagagtccagaaaatgtggcaaaagaaacacagattttaccaagacagactgccacagggaaggtcaagatagagaaagatgactctgttagaccaaatatgactttaaaggccatgatcacagatccagaagtggtatttgttgccagcctgacaaaggctgatgctcctgctctgacagcctcgtttcagtgcaacctttctctgtcaacatccaaactcgaacagatgatggaagcttctgtgagagatctgaaagtgctcgcttgcccttttctcagagaaaagagagggaaaaacattaccacagtcttgcagccctgttctttatttatggaaaaatgtacgtgggcttcaggaaagcaaaatataaatattatggttaaagaatttataattaagatttcacccataattcttaatactgtgttgacaatcatggctgcattgtctccaaaaacaaaagaagatggatccaaagatacgtctaaggaaatggaaaatctttggggtatcaaatcgattaatgattataacacttggtttcttggtgttgacacggcaacagaaataacggaaagcttcaaaggcattgaacattcactgatagaggaaaattgtggtgttgttgtagaatccattcaagttaccttagaatgtggccttggacatcgaactgtacctttattattggcagagtctaagttttcaggaaatattaaaaattggacttctctaatggctgctgttgctgacgtgacactacaggtgcactattacaatgagatccatgctgtctgggagccactgattgagagagtggaggggaagagacaatggaatttaaggcttgatgtaaagaagaacccagttcaggataaaagtttgctgccaggagatgattttattcctgagccacaaatggcaattcatatttcttcaggaaatacaatgaatataacaatatccaaaagttgtcttaatgttttcaacaatttagcaaaaggtttttcagagggcactgcttctacttttgactactctttaaaggacagagctccttttacggtaaaaaatgctgtaggtgttcccattaaggtgaagcccaattgtaatctcagagtaatgggcttccctgagaaaagtgatatttttgatgttgatgctggccagaatttggaactggagtatgccagcatggtaccttcaagtcaagggaacctatctatattgagccgtcaagaaagctccttcttcactctgaccattgtacctcatggatatacagaagttgcaaatatccctgtggccagacctggacggcgattgtataatgtacggaatcccaatgccagtcattctgactctgtcttggtacaaattgatgcaactgaagggaataaagtaattacccttcgctctcctctacagatcaaaaaccatttctccattgcatttatcatctataaatttgttaagaatgttaagctattggagcgcattgggatagccagacctgaagaggagttccatgttcctttagattcatatagatgtcaattgtttatccagccagctggaatcttagagcatcagtacaaagaatctaccacttatatttcctggaaggaagaacttcataggagcagggaagtcagatgcatgttgcagtgtccatcagtagaagtcagcttcttacctctcatagtgaatacagttgctctgcctgatgaattgagctacatatgtacacatggggaagactgggatgtagcttacattattcatctttatccttctctcactttgcggaatcttctcccatattccctaagatatttacttgagggaacagcagaaactcatgagctggcagaaggcagtactgctgatgttctgcattcgagaatcagtggtgaaataatggaattagtcctggtgaaataccagggcaaaaactggaatggacatttccgcatacgtgatacactaccagaattctttcctgtgtgtttttcttctgactccacagaagtgacgacagtcgacctgtcagtccacgtcaggagaattggcagccggatggtgctgtctgtctttagtccctattggttaatcaacaagactacccgggttctccagtatcgttcagaagatattcatgtgaaacatccagctgatttcagggatattattttattttctttcaagaagaagaacatttttactaaaaataaggtacaattaaaaatttcaaccagtgcctggtccagtagtttctcattggatacagtgggaagttatgggtgtgtgaagtgtcctgccaacaatatggagtacctggttggtgttagcatcaaaatgagcagtttcaacctttcacgaatagttaccctgactcccttttgtaccattgcaaacaagtcatcattagaactagaagttggcgagattgcatctgatggctcaatgccaactaataaatggaactatattgcttcttcagagtgccttccattttggccagaaagtttgtcaggcaaactttgtgtgagagtggtgggctgtgaaggatcttccaaaccattcttttataaccgacaggataatggcactttattgagcttagaagatctgaatgggggtatcttggtggatgtaaacactgccgaacattcaactgtcataactttttctgattaccatgagggatctgcacctgccttgataatgaaccatacaccatgggacatcctcacatacaaacagagtgggtcaccagaagaaatggtcttgctgccaagacaggctcgactttttgcctgggcagatcctactggtaccagaaaacttacatggacatatgcagcaaatgttggggaacatgatctgttaaaggatggatgtggacagtttccatatgatgcaaacatccagatacactgggtatcatttctggatgggcgccagagagttttgcttttcaccgatgatgttgccttggtttccaaagcactgcaggcagaagaaatggaacaggctgattatgaaataaccttgtctctccacagtcttgggctttcactggttaacaatgaaagcaagcaggaagtttcctatattgggataaccagttctggtgttgtttgggaggtgaaaccaaagcagaaatggaagccatttagtcaaaagcagataatcttattggaacaatcctatcagaaacatcaaatatcaagagaccatggctggattaagctagataataattttgaggtcaattttgataaagatccaatggaaatgcgcctccctattcgtagccctattaaacgagactttttatcaggaattcagattgaatttaagcagtcttctcaccagagaagtttaagggccaggttgtactggcttcaggttgataatcagttaccaggtgcaatgttccctgttgtatttcatcctgttgcccctccaaaatctattgctttagattcagagcccaagcctttcattgatgtgagtgtcatcacaagatttaatgagtacagtaaagtcttacagttcaagtattttatggtcctcattcaggaaatggccttaaaaattgatcaagggtttctaggagctattattgcactgtttaccccaacaacagaccctgaagctgaaagaagacggacaaagttaatccaacaagatattgatgctctaaatgcagaattaatggagacttcaatgactgatatgtcaattcttagtttctttgaacatttccatatttctcctgtgaagttgcatttgagtttgtctttgggttccggaggtgaagaatcagacaaagaaaaacaggaaatgtttgcagttcattctgtcaacttgctgttgaaaagcataggtgctactctgactgatgtggatgaccttatattcaaacttgcttattatgaaattcgatatcagttctacaagagagatcagcttatatggagtgttgttaggcattacagtgaacagttcttgaaacagatgtatgtccttgtattggggttagatgtacttggaaacccatttggattaattagaggtctgtctgaaggagttgaagctttattctatgaacccttccagggtgctgttcaaggccctgaagaatttgcagaggggttagtgattggagtgagaagcctctttggacacacagtaggtggtgcagcaggagttgtatctcgaatcaccggttctgttgggaaaggtttggcagcaattacaatggacaaggaatatcagcaaaaaagaagagaagagttgagtcgacagcccagagattttggagacagcctggccagaggaggaaagggctttctgcgaggagttgttggtggagtgactggaataataacaaaacctgtggaaggtgccaaaaaggaaggagctgctggattctttaaaggaattggaaaagggcttgtgggtgctgtggcccgtccaactggtggaatcgtagatatggccagtagtaccttccaaggcattcagagggcagcagaatcaactgaggaagtatctagcctccgtccccctcgcctgatccatgaagatggcatcattcgtccttatgacagacaggaatctgagggctctgacttacttgagaatcatatcaaaaagttggaaggagagacttaccgataccactgtgctattcctggaagcaagaagacaatccttatggttacaaataggcgagtgttgtgtataaaggaagttgaaatcctgggccttatgtgtgtagactggcaatgtccatttgaagattttgtatttcctcctagtgtcagtgaaaatgtgctaaaaatttcagttaaggaacagggtctgttccacaaaaaagacagtgccaatcaaggctgtgttcgaaaagtttacctgaaggacaccgccacagcagagagagcatgtaatgccattgaggatgcacagtcaacgagacagcagcaaaaattgatgaagcagtcatcagtgagacttctcagaccccaattgccatcttaatcacagacctcaggggctccaacagggagaaaaaacaatcactggtcttgtctataagtcactctgctttatcttgctaaagacaatttttcaagcaatcctttagttttagttttctggaatagctagtattgggttttctagttttttcaccttttagtttttactctaattttgtaaccatgtatatgctagcagtccacttctacgccaccacccaaatgggtcagacccttgaagaaacgtcacttcaaactcagaatgaaattttcattaatattaaaattgtgaagcaaaggtcaataggcttatatttaattaaagccttactgaagaataagaaatgagcttagaatgactagtgttctttgaaaggtttttttatttttgtttttttggggttttttttttttttgagaccgagtcttgctctgtcgcccaggctggaatgcagtggtgcgatcttggctcactgcaatctctgcctctcgggttcaagctgttctactgcctcagcctcctgagtagctgggattacaggtgtgtgccaccacgcctgggtaattttttttttttttgtatttttagtagagatgagtttcaccatgttggtcagtctagtctcgaactcctgaccttgtgatccgcatgcctcagcctcccaaagtgctgggattacaggcatgagccaccacggcccgccaaaaggctttaacccatgaacaaatgttggatcctgacattttgtttaagagtgatttgttcaataattgaactgagttaacattcttggtaaaccaggtaattgaatgaagaaaggtcactaaagggagaaatgacatgttttctattttcttttcatgaaaacactgtttttccccctaataaagcatattttactttggtgcttatttttcctccttgcagtctaataaaaaaatctggacaatcaaaccttaaaatagctacactctgccctctgtaatgtagcattcataaaaatttggaagtatttacatcctctttcaagatgagcttatatgacacaattattatttgctgatacatgaaaatactgcactttaagtttctcaagactctgaaatatgtaaaattcaatatttttatattcccagaaattgtttcttacaggttgaaagtcttttaagggcatcacaaattaacatttactcctaatgcacgcctagaatgtattttaaatacttactaagaagaatgaaaattctttggttgttttatatataaataaggcatatataatgacactgtgttctgtgagggagcaggccctgtgagaatcaattcaggacagtatttttttttgtcctttctccatccttgatcagagataaactattaaaactttaaaaaatactcaaaaatatgtaagttttttggttgaacctttagatttgctcataatgtttaacataacaacatttatttcaaatcactgaattcatggagatgtggacacgcttggtttgctctatttttgtttatgtgtgatagtggttctgtcatcatcattcatgttttttaaggcctggtcataaaactttaaattttactagtgttacttaatgtatattctaaaaagagaatgcagtaactaatgccctaaatgtttgatctctgtttgtcattactttttcaaaattatttttttctgtaaagtataatatataaaacttcttgcttaaattgaatttctatattagtggttaattgcagtttattaaagggatcattatcagtaatttcatagcaactgttctagtgttttgtgtttttaaaacagaattaggaatttgagatatctgattatatttttcatatgaatcacagctgttgacaatgtcccatatatttaagaaattatatcatactgatactatttgtaacattttgatttgatttaatctccagggacagaaataattcattggtaaagtgtaataatgcgttttttaaaaatgctttgagaggtaattacttgcatatgagagaaataaaacatttggcacattgtttacaggtgtgaaaaaaaaaaaaaaaaaaaaaaaa

SEQ ID NO: 12510 - DNA, 5807 bp, Homo sapiens
gcgcgcgcgagggcgttgggcgccgccgcgaggcggggaagcgcggggccgcggcggtgcgggttctagggcggcggccgtcgccgtcgcagcagcgccccgagcggggagggccgaggaggcccgacgagctggggatggagagtaccgggcccctcactgcctcagagcgcgtgtgcggctctgggcgcgcacagtgacggtgacggcacccctggcccggcagcgccgaggccgcttcgccagacagccagcggccggcggcaggccgggccatgagcggcaggggccgggccgggcctcgctgaccctggctccgcgcggcagcttccccagtttccgctccggtctctcggcatgagagtccgcccgggcccggggctgcggctgccccagacccgccgcacgctggcgcgctccgggcccgcggagccgcggtgctgatacctgcgccgcactgcgccgcccgcccgtccgctgtgtgccccgggggcgcggccatggaggtggtgggtgacttcgagtacagcaagagggatctcgtgggacacggggccttcgccgtggtcttccgggggcggcaccgccagaaaactgattgggaggtagctattaaaagtattaataaaaagaacttgtcaaaatcacaaatactgcttggaaaggaaattaaaatcttaaaggaacttcagcatgaaaatattgtagcactctatgatgttcaggaattacccaactctgtctttttggtgatggagtattgcaatggtggagacctcgcagattatttgcaagcgaaagggactctcagtgaagacacgatcagagtgtttctgcatcagattgctgctgccatgcgaatcctgcacagcaaaggaatcatccacagagatctcaaaccacagaacatcttgctgtcctatgccaatcgcagaaaatcaagtgtcagtggtattcgcatcaaaatagcggattttggttttgctcgttacctacatagtaacatgatggctgcaacactgtgtggatccccgatgtacatggctcctgaggttattatgtctcaacattatgatgctaaggctgacttgtggagcataggaacagtgatataccaatgcctagttggaaaaccaccttttcaggccaatagtcctcaagacttaaggatgttttatgaaaaaaacaggagcttaatgcctagtattcccagagaaacatcaccttatttggctaatctccttttgggtttgcttcagagaaaccaaaaagatagaatggactttgaagcgttttttagccatccttttcttgagcaaggtccagtaaaaaaatcttgcccagttccagtgcccatgtattctggttctgtctctggaagctcctgtggcagctctccatcttgtcgttttgcttctccaccatcccttccagatatgcagcatattcaggaagaaaacttatcttccccaccattgggtcctcccaactatctacaagtttccaaagattctgccagtactagtagcaagaactcttcttgtgacacggatgactttgttttggtgccacacaacatctcgtcagaccactcatgtgatatgccaatggggactgctggcagacgtgcttcaaatgaattcttggtgtgtggagggcagtgtcagcctactgtgtcacctcacagcgaaacagcaccaattccagttcctactcaaataaggaattatcagcgcatagagcagaatcttacatctactgccagctcaggcacaaatgtacatggttctccaagatctgcagtggtacgaaggtccaacaccagccccatgggcttcctccggccgggatcatgctccccagtaccagcagacacagcacagacagttggacgaaggctctccactgggtcttctaggccttactcaccttcccctttggttggtaccattcctgagcaattcagtcagtgctgctgtgggcatcctcagggccatgactccaggagtagaaactcctcaggttctccagtgccacaagctcagtccccacagtctctcttatcgggtgctagactgcagagcgcccccaccctcactgacatctatcagaacaagcagaagctcagaaaacagcactctgaccccgtgtgcccatcccatactggggctgggtacagctactcgcctcagcccagtcggcctggcagccttggaacttctcccaccaagcacttggggtcctctccacggagttctgactggttctttaaaactcctttgccaacaatcattggctctcctactaagaccacagctcctttcaaaatccctaaaactcaagcatcttccaacctgttagccttggttactcgtcatgggcctgctgaagaacagtcgaaagatgggaatgagccacgggaatgtgcccattgcctcttagtgcaaggaagtgagaggcagcgggccgagcagcagagcaaggcagtgtttggcagatctgtcagtaccgggaagttatcagatcaacaaggaaagactcctatatgtcgacatcagggcagcacagacagtttaaatacagaacgaccaatggatatagctccggcaggagcctgtggtggtgttctggcacctcctgcaggtacagcagcaagttccaaggctgtcctcttcactgtagggtctcctccacacagtgcggcagcccccacttgtacccacatgttccttcgaacaagaacaacctcagtggggcccagcaactccgggggctctctttgtgccatgagtggccgcgtgtgcgtggggtccccgcctggcccaggcttcggctcttcccctccaggagcagaggcagctcccagcctgagatacgtgccttacggtgcttcaccccccagcctagaggggctcatcacctttgaagcccctgaactgccggaggagacgctgatggagcgggaacacacagacaccttacgccatctgaatgtgatgctgatgttcactgagtgtgtgctggacctgacagccatgaggggaggaaaccctgagctgtgcacatctgctgtgtccttgtaccagatccaggagagtgtggtggtggaccagatcagtcagctgagcaaagactgggggtgggtggagcagctggtgttgtacatgaaagcagcacagctgcttgcggcttctctgcatcttgccaaagcccagatcaagtccgggaaactgagcccatccacagctgtgaaacaagttgtcaagaatctgaacgaacgatataaattctgcatcaccatgtgcaagaaacttacagaaaagctgaatcgattcttctctgacaaacagaggtttattgatgaaatcaacagtgtgactgcagagaaactcatctataattgtgctgtagaaatggttcagtctgcagccctggatgagatgtttcagcagaccgaagatattgtttatcgctatcataaggcagcccttcttttggaaggcctaagtaggattctacaggaccctgcagatattgaaaatgtgcataaatataaatgtagtattgagagaagactgtcggcgctctgccatagcaccgcaaccgtgtgagcagcaggctcatcccgtggaccggtggtgggaacgtgaggtgatgcctttgggattacagcttgagttctgtcaccccatccccaggaaactgtagcttcttaactggtgactaccaaagaacaagcagtgatttgaaaaaggaaaaacaatccaaaaactacatatttgtaggaaatctgccttattggagaaaatcaccctttccctttttctttgtagaagcaggagcaagagtgtttggctcccagtttggacttggtgaataaatgtaccttagaactaggataatcggtacagttattcttaaagataattaaaaatgaaacaaagtgagtgctcgtcactgggttcatcagagcagtgtgtgaaattccatgtgtttgctgaggtgtaaaggtaaatgtattcacccctcatccaggcagtttgatatttggagtaagtttgtttaaatctgagcatgcatctttaaacagctcaggaagaaatagcttaagaagaagtgaaacatggatcttggaagaaattttgaaatcttcaatttgatcctaatatggatacatgttaatcttccaaaatctttcatattgcactaatttattaaaacaactgtgtattggattttgtaatttaactaaggcacaatggacttgtttaaaatattttacttgattgtatacatagaccctttccagaattcacatgtaatctccagtgaacttttaagtggttaaaacttgtattcatgtgaacctttgcacattttttttttttacttctttatctacacctacagattttctcagtaatgtttttgttagcttttggttccattttttattgtgcatgcagaatgtacattgatgcctgtgaccttaggtttattaaaggctaggtttatttgggcagtattagaaacaaaatcatggatcaagagatactcttgataatttgaatagggccaaaacaaagttggtgacctaaaggcttgttagtgatgtggagttcctacatgcagtgagtggaaaatgaagttcgttttctcttaggaaaatgggcagctgtcttctgcctaatgtgtatttttcatgttaattctgacagttcaccaaatagctagtcatggagaatgcaggcagttaacttaatatccctccaggaatggttcctacgttgtgtattatttggtttcttttacttacctgcttgaatacttgaataaaccattcaccaattttaatccttttattttaatccttttacataaaataatctgaactctttgacaaattgcacagagctctttggcattaatctaattttaatgtactgataaaaacaaacatggttgtcctttactttgacaaagtaatgtaatttttaccttatttatctgtatgaaattccagtagttaatttgaacatttatttatatgacgtttgtatttttaggtctttaatacagtgtttctacctctcatttgtaactgcatgcattattcttgaaactaggtaaaactcactgaattgttgtgtaatagcctttttattattgcctgtacaaatgtatattaaggtaaaataaaactgacaaagtgtttctagggtgtagctgggtacatattaagtggcttgttgagccaggtacttccttagtgagtttagagacttggccatgaatatcctttgtcctgccccaggatttagatcttggctactgtcatgcaggcttccaggaacatagactgttttacctccacaaccctatttgttattagtgatactttattttatataatattttttattcacagtgaaatttcattcatgttctttcagttatcacctgtgttatctcagttgtaggtttattctatcctctcctcttcctctcccatttcttttttaacacaggatgaaacaggttcagagaggggaagtgattggcctaaagtcaggaactaggcaagtggtcaagccatgctttgtgactttcaagttaattcttcttgttcttgtatattaaaggtcttggggtagatggtgtgtgtgaaacagtgaagtctcaacagcagaaaagaacaaaatgtaaattcatgaataatggttctggttatacttccattatcaaggctaattaagagattttgccttgagtatagcaataataaacaaatgctttatgtttccctg

SEQ ID NO: 12511 - DNA, 4239 bp, Homo sapiens
aattcggcacgagaacagctgtcacctagtgcggaacaagtctcccaaatttcccaaatctccctgggccggaggccactgtcttctcttcctcctccaccgagtcgtgctctcgccccaacccgcgcgccagacactgccctaaccatcatggaggtggccgaggtggaaagtcctctgaaccccagctgtaagataatgaccttcagaccctccatggaggagttccgggagttcaacaaataccttgcatacatggagtctaaaggagcccatcgtgcgggtcttgcaaaggtgattcctcctaaggagtggaagccaagacagtgctatgatgacattgataatttgctcattccagcaccaattcagcagatggtcacagggcagtcaggactgttcactcagtacaacatccagaaaaaagcgatgactgtgaaggagttcaggcagctggccaacagtggcaaatattgtactccaagatacttggattacgaagatttggagcgcaagtactggaagaacttaacttttgtggcacctatctatggtgcagatattaatgggagcatatatgatgagggtgtggatgaatggaacatagctcgcatcaatacagtcttggatgtggttgaagaagagtgtggcatttctattgagggtgtaaataccccatatctctattttggcatgtggaagaccacgtttgcatggcacaccgaagacatggacctctatagcattaattatctccactttggagagcccaagtcttggtatgctatacctccggagcatggaaaacgacttgaaagactagctcaaggttttttcccaagcagctcccaagggtgtgatgcatttcttcgccacaagatgacattgatttctccatcagtattgaagaaatatggtattccctttgacaagataacccaggaggctggagaattcatgatcactttcccatatggctaccatgctggttttaatcatggtttcaactgtgcagaatctacaaattttgctactgtcagatggattgactatggaaaagttgccaaattgtgcacttgcaggaaagacatggtgaagatttcaatggatatctttgtgaggaaatttcagccagacagatatcagctttggaaacaaggaaaggatatatacaccattgatcacacgaagcctactccagcatccacccctgaagtaaaagcatggctgcagaggaggaggaaagtaagaaaagcatcccgaagcttccagtgtgctaggtctacctctaaaaggcctaaggctgatgaggaagaggaagtgtcagatgaagtcgatggggcagaggtccctaaccccgactcagtcacagatgacctcaaggtcagtgaaaagtcagaagcagcagtgaagctgaggaacacagaagcatcttcagaagaagagtcatctgctagcaggatgcaggtggagcagaatttatcagatcatatcaaactctcaggaaacagctgcttaagtacatctgtaacagaagacataaaaactgaggatgacaaagcttatgcatatagaagtgtaccttctatatccagtgaggctgatgattccattccattgtctactggctatgagaagcccgagaaatcagacccatccgagctttcatggccaaagtcacctgagtcatgctcatcagtggcagagagtaatggtgtgttaacagagggagaagagagtgatgtggagagccatgggaatggccttgaacctggggaaatcccagcggtccccagtggagagagaaatagcttcaaagtccccagtatagcagagggagagaacaaaacctctaagagttggcgccatccacttagcaggcctccagcaagatctccgatgactcttgtgaagcagcaggcgccaagtgatgaagaattgcctgaggttctgtccattgaggaggaagtggaagaaacagagtcttgggcgaaacctctcatccacctttggcagacgaagtcccctaacttcgcagctgagcaagagtataatgcaacagtggccaggatgaagccacactgtgccatctgcactctgctcatgccgtaccacaagccagatagcagcaatgaagaaaatgatgctagatgggagacaaaattagatgaagtcgttacatcggagggaaagactaagcccctcataccagagatgtgttttatttatagtgaagaaaatatagaatattctccacccaatgccttccttgaagaggatggaacaagtctccttatttcctgtgcaaagtgctgcgtacgggttcatgcaagttgttatggtattccttctcatgagatctgtgatggatggctgtgtgcccggtgcaaaagaaatgcgtggacagcagaatgctgtctctgcaatttgagaggaggtgctcttaagcaaacgaagaacaataggtgggcccatgtcatgtgcgccgttgcggtcccagaagttcgattcactaatgtcccagaaaggacacaaatagatgtaggcagaatacctttacagaggttaaaattgaaatgcatcttctgcagacaccgggttaagagggtctctggagcctgcatccagtgttcctacggtcgctgcccggcctccttccatgtcacttgtgcccatgctgctggggtactgatggagcctgatgattggccttatgtggtgaacattacatgctttcgacataaggtcaaccccaacgtgaagtccaaggcttgcgagaaggtcatttccgtgggtcaaacggtcatcacgaagcatcggaacacccggtattacagttgcagagtgatggctgtgacatcgcagaccttctatgaggtcatgtttgatgatggctcctttagcagagacacatttcctgaggatatcgtgagccgagactgtctgaagctgggcccacctgctgagggagaagtcgtccaagtcaagtggcccgatggcaaactctatggagcaaaatattttggatcaaatattgcccacatgtaccaggttgagtttgaagatggatcccagatagcaatgaagagagaggacatctacactttagatgaagagttacccaagagagtgaaagctcgattttccacagcctctgacatgcgatttgaagacacgttttatggagcagacattatccaaggggagagaaagagacaaagagtgctgagctccaggtttaagaatgaatatgtggccgaccctgtataccgcacttttttgaagagctctttccagaagaagtgccagaagagacagtagtctgcatacatcgctgcaggccacagagcagcttgggttggaaaagagaagatgaagggacatccttggggctgtgccgtgagatttgctggcataggtgacagggtgtgtctctgacagtggtaaatcgggtttccagagtttggtcaccaaaaatacaaaatacacacaatgaattggacgcagcaatctgaaatcatctctagtcttgctttcacttgtgagcagttgtcttctatgatcccaaagaagttttctaagtgaaaggaaatactagtgaatcacccacaaggaaaagccactgccacagaggaggcgggtccccttgtgcggcttagggccctgtcaggaaacacacggggacctctctctctagctccagcaggtggcacctcggtacccagcgggtagggcgataatttatatattttccacagtcagggaaggactctcacttatttgtttcaaattgcagtttttataaaacatttttaaaacacaaatggcatgtatgctaatgagatttacccgtgtgctatctgtatttcccttgtacagaacttttacatttttgaatattcctattacttttgattgtgtctgatgggaactgagttgttggcctttgtgaaatgaaatttttggctcttgagaaagaattcttatgaattgttatgcgaattttatatatttaaagagggagatctggggctgttatttttaaacactttttttcataatacatattccgagtagatatttataaaatatatgtttctttcattatgtgtttgtaaaattagagtttaaataaatatgctttgatgcatagttttgaactaatgtaacatgatttttcttttttaaaacagcctgaaaatgtactagtgtttaaaaataaagatttccattttctcc

SEQ ID NO: 12512 - DNA, 3811 bp, Homo sapiens
atgggagtcactgaaggtttcagtcagatattggtggaggcttcagtgggagatggcttcactggagatattgcgattgatgatctgtcatttatggactgcaccctctaccctggtaatttgccagcagacctcccaactccaccagaaacgtcagttcctgtaacattacctccacacaactgcacagacaatgaatttatctgcaggtctgatggtcactgcattgaaaaaatgcagaaatgtgattttaaatatgactgccctgacaaatcagatgaagcatcctgtgttatggaagtttgcagctttgagaaaagaagcctgtgtaaatggtatcaaccaatcccagtacatttgcttcaagattcaaacacattcaggtgggggcttgggaacgggatcagcattcatcatggggaagaaaaccacaggccatcagtggatcatacacaaaataccactgatggctggtacctgtatgctgacagttctaatgggaaatttggtgacacggctgacattctcactcctatcatttcactcacgggaccaaaatgtaccttggtgttctggacacatatgaatggggccaccgttggttctctccaggtgctcatcaagaaagataacgttacttctaaattgtgggctcaaactggacagcaaggtgcacagtggaagagagcagaagtgtttttaggcattcgttcacatacacagattgtcttcagagccaaacgtggtatcagttacataggagatgtagcagtggatgatatttccttccaagattgctcccctttgcttagcccagagagaaagtgtactgatcatgaattcatgtgtgctaataagcactgcattgccaaagacaagctgtgtgattttgtgaatgattgtgctgataattcagatgagactactttcatttgccgtacctccagtgggcgctgtgatttcgaatttgatctttgttcctggaagcaggagaaagatgaggactttgactggaacctgaaagctagcagcatccctgcagcaggcacagagccagcagcagatcacactttgggaaattcatctggtcattacatctttataaagagtttgtttcctcagcagcccatgagagctgccagaatttcaagtccagttataagtaagagaagcaaaaactgcaagattatttttcattatcacatgtatggaaatggcattggggcactcaccttaatgcaggtgtcagtcacaaaccaaacgaaggttctacttaacctcactgtagaacaaggcaatttctggcggagagaagaactgtcactgtttggtgatgaagacttccaactcaaatttgaaggtagagttgggaaaggtcagcgtggagacattgcacttgatgacattgtgcttacagaaaattgtctatcactccatgattccgtgcaagaagaactggcagtgcctcttccaacaggtttctgcccacttggctatagggaatgtcataatggaaaatgctataggctggaacaaagctgtaacttcgtagataactgtggagataatactgatgaaaatgagtgtggtagctcctgtacttttgaaaaaggctggtgtggctggcaaaactcccaggctgacaactttgattgggttttaggggttggctctcatcaaagcttaagacctcccaaagaccacacacttggaaatgaaaatgctatcttgttgatgcgacggcataaatatcccatcagatcagttaatctgcatactgtgaagcacgtgctaaaagcacagacagttggaaattgttctgtcagcaagctagaggcgaggctattagattttctttctgttccaaatgaaaatacttttggcagctcagatcatacgaattggcacttcatgtatctggaagctactgcagtgggccttcggggtgacaaagcacacttcaggagtaccatgtggcgagaatccagtgcagcctgcaccatgagcttctggtatttcgtatctgcaaaggccacaggatccattcagattctcatcaagcgggggcggaggagaaggcgggctcccaatccggttctatccggttctcccaccatcccccgccaggggtctcagcagctcggagggtggaggggcggcagcgccaggcaccgcgcacgcgcctttccggagccagaatgcccaagaggaaggtcagctctgctgaaggggccgccacaggaaaagcctaacaggaggtcagcgctgttgtcagtgggagagatctctgagctttgtccggaaatcactgattttttgtgccgggacaagaagtgcattgcatcccaccttctttgtgactataagccagactgctctgataggtctgatgaagctcactgtgcacattatacaagcacaacaggaagctgcaattttgaaacaagttcaggaaactggaccacagcctgcagtcttactcaagactctgaggatgacttggactgggccattggcagcagaattcctgccaaagcattaattccagactctgatcacacgccaggtagtggtcagcacttcctgtacgtcaactcatctggctccaaggaaggatccgttgccagaattactacttccaaatccttcccagcaagccttggaatgtgtactgttcggttctggttctacatgattgatcccaggagtatgggaatattaaaggtgtataccattgaagaatcggggctaaacatcctggtgtggtcagtgattggaaataaaagaacgggatggacatatggctctgtgcctctctccagtaacagtccgtttaaggtggcatttgaagctgatttggatggaaatgaggacatctttattgctcttgatgacatctcttttaccccagagtgtgtgactggaggtcctgtcccagtgcagccatcaccctgtgaagctgatcagttttcttgtatctacacactccaatgtgtccctctctcagggaaatgtgatggacatgaagactgcatagatggatctgatgaaatggattgtcctctcagccccacccctccactctgtagtaacatggagttcccgtgctctacagacgagtgtataccttccctcctgctatgcgatggagtgcccgactgccactttaatgaagatgagctcatctgctccaacaaaagctgttctaatggagctctggtgtgtgcctcctccaacagctgtatcccagcccaccagcgctgtgatggttttgccgactgcatggatttccagcttgatgagtccagctgctccgatacatggactctcctgggtattggattagcattcctgatgactcacatcacagttgcagtcttgtgttttcttgcaaacagaaaggtaccaataaggaaaaccgagggaagtggtaactgtgcctttgtcaatccagtttacgggaactggagcaacccagagaaaacagagagttctgtctattccttctcaaacccattatatggcacaacatcaggaagcctggagaccctgtcacatcatctcaaatagcagcatcgagaccaagtctgatccaacatgtgtagtttctagaaaattgaagtctccacaatctgatagaaactcatcttctacaatggtaaaaagagaaaggattgtaaatgccagtgtaattataacatttatgaatgaattttcttgcagaatatagagaatgtttatatggaatcagaatcagtaccttatcttcactgaacatctgaatattttaataaaatttctatttaatcaa

SEQ ID NO: 12513 - DNA, 8694 bp, Homo sapiens
tgaggaatcaacagccgccatcttgtcgcggacccgaccggggcttcgagcgcgatctactcggccccgccggtcccgggccccacaaccgcccgcgctcgctcctctccctcgcagccggcagggcccccgacccccgtccgggccctcgccggcccggccgcccgtgcccggggctgttttcgcgagcaggtgaaaatggctgagaacttgctggacggaccgcccaaccccaaaagagccaaactcagctcgcccggtttctcggcgaatgacagcacagattttggatcattgtttgacttggaaaatgatcttcctgatgagctgatacccaatggaggagaattaggccttttaaacagtgggaaccttgttccagatgctgcttccaaacataaacaactgtcggagcttctacgaggaggcagcggctctagtatcaacccaggaataggaaatgtgagcgccagcagccccgtgcagcagggcctgggtggccaggctcaagggcagccgaacagtgctaacatggccagcctcagtgccatgggcaagagccctctgagccagggagattcttcagcccccagcctgcctaaacaggcagccagcacctctgggcccacccccgctgcctcccaagcactgaatccgcaagcacaaaagcaagtggggctggcgactagcagccctgccacgtcacagactggacctggtatctgcatgaatgctaactttaaccagacccacccaggcctcctcaatagtaactctggccatagcttaattaatcaggcttcacaagggcaggcgcaagtcatgaatggatctcttggggctgctggcagaggaaggggagctggaatgccgtaccctactccagccatgcagggcgcctcgagcagcgtgctggctgagaccctaacgcaggtttccccgcaaatgactggtcacgcgggactgaacaccgcacaggcaggaggcatggccaagatgggaataactgggaacacaagtccatttggacagccctttagtcaagctggagggcagccaatgggagccactggagtgaacccccagttagccagcaaacagagcatggtcaacagtttgcccaccttccctacagatatcaagaatacttcagtcaccaacgtgccaaatatgtctcagatgcaaacatcagtgggaattgtacccacacaagcaattgcaacaggccccactgcagatcctgaaaaacgcaaactgatacagcagcagctggttctactgcttcatgctcataagtgtcagagacgagagcaagcaaacggagaggttcgggcctgctcgctcccgcattgtcgaaccatgaaaaacgttttgaatcacatgacgcattgtcaggctgggaaagcctgccaagttgcccattgtgcatcttcacgacaaatcatctctcattggaagaactgcacacgacatgactgtcctgtttgcctccctttgaaaaatgccagtgacaagcgaaaccaacaaaccatcctggggtctccagctagtggaattcaaaacacaattggttctgttggcacagggcaacagaatgccacttctttaagtaacccaaatcccatagaccccagctccatgcagcgagcctatgctgctctcggactcccctacatgaaccagccccagacgcagctgcagcctcaggttcctggccagcaaccagcacagcctcaaacccaccagcagatgaggactctcaaccccctgggaaataatccaatgaacattccagcaggaggaataacaacagatcagcagcccccaaacttgatttcagaatcagctcttccgacttccctgggggccacaaacccactgatgaacgatggctccaactctggtaacattggaaccctcagcactataccaacagcagctcctccttctagcaccggtgtaaggaaaggctggcacgaacatgtcactcaggacctgcggagccatctagtgcataaactcgtccaagccatcttcccaacacctgatcccgcagctctaaaggatcgccgcatggaaaacctggtagcctatgctaagaaagtggaaggggacatgtacgagtctgccaacagcagggatgaatattatcacttattagcagagaaaatctacaagatacaaaaagaactagaagaaaaacggaggtcgcgtttacataaacaaggcatcttggggaaccagccagccttaccagccccgggggctcagccccctgtgattccacaggcacaacctgtgagacctccaaatggacccctgtccctgccagtgaatcgcatgcaagtttctcaagggatgaattcatttaaccccatgtccttggggaacgtccagttgccacaagcacccatgggacctcgtgcagcctccccaatgaaccactctgtccagatgaacagcatgggctcagtgccagggatggccatttctccttcccgaatgcctcagcctccgaacatgatgggtgcacacaccaacaacatgatggcccaggcgcccgctcagagccagtttctgccacagaaccagttcccgtcatccagcggggcgatgagtgtgggcatggggcagccgccagcccaaacaggcgtgtcacagggacaggtgcctggtgctgctcttcctaaccctctcaacatgctggggcctcaggccagccagctaccttgccctccagtgacacagtcaccactgcacccaacaccgcctcctgcttccacggctgctggcatgccatctctccagcacacgacaccacctgggatgactcctccccagccagcagctcccactcagccatcaactcctgtgtcgtcttccgggcagactcccaccccgactcctggctcagtgcccagtgctacccaaacccagagcacccctacagtccaggcagcagcccaggcccaggtgaccccgcagcctcaaaccccagttcagcccccgtctgtggctacccctcagtcatcgcagcaacagccgacgcctgtgcacgcccagcctcctggcacaccgctttcccaggcagcagccagcattgataacagagtccctaccccctcctcggtggccagcgcagaaaccaattcccagcagccaggacctgacgtacctgtgctggaaatgaagacggagacccaagcagaggacactgagcccgatcctggtgaatccaaaggggagcccaggtctgagatgatggaggaggatttgcaaggagcttcccaagttaaagaagaaacagacatagcagagcagaaatcagaaccaatggaagtggatgaaaagaaacctgaagtgaaagtagaagttaaagaggaagaagagagtagcagtaacggcacagcctctcagtcaacatctccttcgcagccgcgcaaaaaaatctttaaaccagaggagttacgccaggccctcatgccaaccctagaagcactgtatcgacaggacccagagtcattacctttccggcagcctgtagatccccagctcctcggaattccagactattttgacatcgtaaagaatcccatggacctctccaccatcaagcggaagctggacacagggcaataccaagagccctggcagtacgtggacgacgtctggctcatgttcaacaatgcctggctctataatcgcaagacatcccgagtctataagttttgcagtaagcttgcagaggtctttgagcaggaaattgaccctgtcatgcagtcccttggatattgctgtggacgcaagtatgagttttccccacagactttgtgctgctatgggaagcagctgtgtaccattcctcgcgatgctgcctactacagctatcagaataggtatcatttctgtgagaagtgtttcacagagatccagggcgagaatgtgaccctgggtgacgacccttcacagccccagacgacaatttcaaaggatcagtttgaaaagaagaaaaatgataccttagaccccgaacctttcgttgattgcaaggagtgtggccggaagatgcatcagatttgcgttctgcactatgacatcatttggccttcaggttttgtgtgcgacaactgcttgaagaaaactggcagacctcgaaaagaaaacaaattcagtgctaagaggctgcagaccacaagactgggaaaccacttggaagaccgagtgaacaaatttttgcggcgccagaatcaccctgaagccggggaggtttttgtccgagtggtggccagctcagacaagacggtggaggtcaagcccgggatgaagtcacggtttgtggattctggggaaatgtctgaatctttcccatatcgaaccaaagctctgtttgcttttgaggaaattgacggcgtggatgtctgcttttttggaatgcacgtccaagaatacggctctgattgcccccctccaaacacgaggcgtgtgtacatttcttatctggatagtattcatttcttccggccacgttgcctccgcacagccgtttaccatgagatccttattggatatttagagtatgtgaagaaattagggtatgtgacagggcacatctgggcctgtcctccaagtgaaggagatgattacatcttccattgccacccacctgatcaaaaaatacccaagccaaaacgactgcaggagtggtacaaaaagatgctggacaaggcgtttgcagagcggatcatccatgactacaaggatattttcaaacaagcaactgaagacaggctcaccagtgccaaggaactgccctattttgaaggtgatttctggcccaatgtgttagaagagagcattaaggaactagaacaagaagaagaggagaggaaaaaggaagagagcactgcagccagtgaaaccactgagggcagtcagggcgacagcaagaatgccaagaagaagaacaacaagaaaaccaacaagaacaaaagcagcatcagccgcgccaacaagaagaagcccagcatgcccaacgtgtccaatgacctgtcccagaagctgtatgccaccatggagaagcacaaggaggtcttcttcgtgatccacctgcacgctgggcctgtcatcaacaccctgccccccatcgtcgaccccgaccccctgctcagctgtgacctcatggatgggcgcgacgccttcctcaccctcgccagagacaagcactgggagttctcctccttgcgccgctccaagtggtccacgctctgcatgctggtggagctgcacacccagggccaggaccgctttgtctacacctgcaacgagtgcaagcaccacgtggagacgcgctggcactgcactgtgtgcgaggactacgacctctgcatcaactgctataacacgaagagccatgcccataagatggtgaagtgggggctgggcctggatgacgagggcagcagccagggcgagccacagtcaaagagcccccaggagtcacgccgggtgagcatccagcgctgcatccagtcgctggtgcacgcgtgccagtgccgcaacgccaactgctcgctgccatcctgccagaagatgaagcgggtggtgcagcacaccaagggctgcaaacgcaagaccaacgggggctgcccggtgtgcaagcagctcatcgccctctgctgctaccacgccaagcactgccaagaaaacaaatgccccgtgcccttctgcctcaacatcaaacacaagctccgccagcagcagatccagcaccgcctgcagcaggcccagctcatgcgccggcggatggccaccatgaacacccgcaacgtgcctcagcagagtctgccttctcctacctcagcaccgcccgggacccccacacagcagcccagcacaccccagacgccgcagccccctgcccagccccaaccctcacccgtgagcatgtcaccagctggcttccccagcgtggcccggactcagccccccaccacggtgtccacagggaagcctaccagccaggtgccggcccccccacccccggcccagccccctcctgcagcggtggaagcggctcggcagatcgagcgtgaggcccagcagcagcagcacctgtaccgggtgaacatcaacaacagcatgcccccaggacgcacgggcatggggaccccggggagccagatggcccccgtgagcctgaatgtgccccgacccaaccaggtgagcgggcccgtcatgcccagcatgcctcccgggcagtggcagcaggcgccccttccccagcagcagcccatgccaggcttgcccaggcctgtgatatccatgcaggcccaggcggccgtggctgggccccggatgcccagcgtgcagccacccaggagcatctcacccagcgctctgcaagacctgctgcggaccctgaagtcgcccagctcccctcagcagcaacagcaggtgctgaacattctcaaatcaaacccgcagctaatggcagctttcatcaaacagcgcacagccaagtacgtggccaatcagcccggcatgcagccccagcctggcctccagtcccagcccggcatgcaaccccagcctggcatgcaccagcagcccagcctgcagaacctgaatgccatgcaggctggcgtgccgcggcccggtgtgcctccacagcagcaggcgatgggaggcctgaacccccagggccaggccttgaacatcatgaacccaggacacaaccccaacatggcgagtatgaatccacagtaccgagaaatgttacggaggcagctgctgcagcagcagcagcaacagcagcagcaacaacagcagcaacagcagcagcagcaagggagtgccggcatggctgggggcatggcggggcacggccagttccagcagcctcaaggacccggaggctacccaccggccatgcagcagcagcagcgcatgcagcagcatctccccctccagggcagctccatgggccagatggcggctcagatgggacagcttggccagatggggcagccggggctgggggcagacagcacccccaacatccagcaagccctgcagcagcggattctgcagcaacagcagatgaagcagcagattgggtccccaggccagccgaaccccatgagcccccagcaacacatgctctcaggacagccacaggcctcgcatctccctggccagcagatcgccacgtcccttagtaaccaggtgcggtctccagcccctgtccagtctccacggccccagtcccagcctccacattccagcccgtcaccacggatacagccccagccttcgccacaccacgtctcaccccagactggttccccccaccccggactcgcagtcaccatggccagctccatagatcagggacacttggggaaccccgaacagagtgcaatgctcccccagctgaacacccccagcaggagtgcgctgtccagcgaactgtccctggtcggggacaccacgggggacacgctagagaagtttgtggagggcttgtagcattgtgagagcatcaccttttccctttcatgttcttggaccttttgtactgaaaatccaggcatctaggttctttttattcctagatggaactgcgacttccgagccatggaagggtggattgatgtttaaagaaacaatacaaagaatatatttttttgttaaaaaccagttgatttaaatatctggtctctctctttggtttttttttggcgggggggtggggggggttcttttttttccgttttgtttttgtttggggggaggggggttttgtttggattctttttgtcgtcattgctggtgactcatgcctttttttaacgggaaaaacaagttcattatattcatattttttatttgtattttcaagactttaaacatttatgtttaaaagtaagaagaaaaataatattcagaactgattcctgaaataatgcaagcttataatgtatcccgataactttgtgatgtttcgggaagatttttttctatagtgaactctgtgggcgtctcccagtattaccctggatgataggaattgactccggcgtgcacacacgtacacacccacacacatctatctatacataatggctgaagccaaacttgtcttgcagatgtagaaattgttgctttgtttctctgataaaactggttttagacaaaaaatagggatgatcactcttagaccatgctaatgttactagagaagaagccttcttttctttcttctatgtgaaacttgaaatgaggaaaagcaattctagtgtaaatcatgcaagcgctctaattcctataaatacgaaactcgagaagattcaatcactgtatagaatggtaaaataccaactcatttcttatatcatattgttaaataaactgtgtgcaacagacaaaaagggtggtccttcttgaattcatgtacatggtattaacacttagtgttcggggttttttgttatgaaaatgctgttttcaacattgtatttggactatgcatgtgttttttccccattgtatataaagtaccgcttaaaattgatataaattactgaggtttttaacatgtattctgttctttaagatcccctgtaagaatgtttaaggtttttatttatttatatatattttttggtctgttctttgtaaaaaaaaaaaaaaaaa

SEQ ID NO: 12514 - DNA, 9669 bp, Homo sapiens
atggtaacaacggtagtggcagtgggtgataccttagctcaaccattagctgcagctgaagtgtttattgtagaaataacacttcaggatatcaatgacaatccaccagtatttccaacggacatgctggatctcacggtagaggagaacattggagatggctctaagattatgcagctgacagccatggatgctgatgagggtgcaaatgctctcgtcacatacactatcattagtggagctgatgatagttttcgcatcgacccagaatccggagatctgatagcaaccaggcggttggacagggaacgccgctccaaatattcactgctagttcgtgctgatgatggtcttcagtcctcggatatgagaattaatatcactgtcagtgatgtgaatgaccatacacccaaattttccagacccgtgtactcttttgacattcctgaggacacaatccctggttctttggtagcagccattttagccacggatgatgactctggtgtgaatggagaaattacatatattgtgaatgaagatgatgaagatggcatctttttcctgaatcctattactggggtctttaatttgactcgattattagattatgaagtacagcaatattatatcctcactgttcgagcagaagatggtgggggacaatttactaccatcagagtttatttcaatattctagatgtaaatgataatccacctattttcagcttgaattcatacagcacatctttaatggagaatctacctgtgggatctactgttcttgtgtttaatgttactgatgcagatgatggcatcaactctcaattgacttatagcattgcttcaggtgatagccttgggcagtttactgttgacaagaatggtgtactcaaagtcctaaaagctttggatcgggaaagtcagtccttctacaacttggttgttcaagtgcatgacctgccacagattccagcctccagattcacaagcactgctcaagtctccattattttgttggatgtaaatgataacccaccgacatttctttcccctaaattgacatacattccagaaaatacacctattgatactgttgttttcaaagctcaagcaactgacccagatagtggcccaaacagctatattgagtacactctgctgaaccctttgggaaacaagttcagtattgggaccattgatggtgaagtgaggctcactggagaactggacagagaagaagtttctaattatactctaacagtggtggctacagacaaaggtcaaccatctctctcttcatctacagaggttgtagttatggtacttgacatcaatgataacaaccccatctttgcacaagctttgtataaagtggagattaatgaaaacacacttactggaacagatataatacaagtgttcgcagcagatggagatgaaggcacaaatggacaggttcgctatggcattgttaatggtaataccaatcaggaatttcggatagactctgtcacaggtgccatcactgtcgctaaacctttggatagagaaaagacccctacctaccatttaactgttcaggcaacagatcgaggcagcacacccagaactgatacctccacggtcagcattgttctactggatattaatgactttgttcctgtatttgagctatctccatattctgtaaatgtccctgagaatttagggacactacccagaacaattcttcaggtggtggcaagagatgatgatcgaggatctaacagcaaactctcatatgttctgtttggtggtaatgaagacaatgcttttactctctcagccagtggagaacttggagtaacacagagtctggatcgggaaacaaaagagcgctttgtcttaatgattacagctacagattcaggatcccctgccttgactggaactggaacaatcaacgtcatagtagatgatgtcaatgacaatgtccccacatttgccagtaaagcgtatttcacaacaattcctgaggatgcaccaactggaacagatgttttattggtaaatgcctcagatgctgatgcttcaaagaatgcagttataaggatcatcggtggaaactctcagttcacgatcaacccatcgacaggacaaatcatcaccagcgcattgttagatagggaaacaaaagataattatactttggtagtggtctgcagtgatgcgggatccccagagcctctttccagttccaccagtgtgcttgtcactgtgactgatgtcaatgacaatccaccaagatttcagcatcacccatatgtcactcacatcccatctcctactcttccaggttcctttgtctttgcggttacagtcacagatgctgatattggaccaaattctgaactgcattattctctttcgggtagaaattctgaaaaatttcacattgacccactgaggggagccattatggccgccggaccactaaacggagcttcagaagtgacattttctgtgcatgtaaaagatggtggctcatttccaaagacagattctacaacagtgactgttagattcgtgaataaggccgatttccctaaagtgagagccaaagaacaaacgttcatgtttcctgaaaaccaaccagtcagctctcttgtcaccaccatcacaggatcctctttaagaggagaacctatgtcatattatatcgcaagtgggaatcttggcaatactttccagattgatcagttaacagggcaggtgtctattagtcaacctctggattttgaaaagatacaaaaatatgttgtatggatagaggccagagacggtggtttccctcctttctcctcttacgagaaacttgatataacagtattagatgtcaatgataatgccccaatttttaaggaagacccatttatatctgaaatattggaaaacctttcccctcgaaaaatacttactgtttcggcaatggacaaggacagtggacccaatggacagttagattatgaaattgttaatggcaacatggaaaatagtttcagtatcaatcatgctactggtgaaattagaagcgttagacctttggacagggaaaaagtatctcattatgtcctaaccataaaatcatcagacaaagggtccccgtctcagagtacttcagtaaaagtcatgattaacattttagatgaaaatgataatgcccctaggttttctcagatatttagtgcccatgttcctgaaaattcccccttaggatacacagttacccgtgtcacaacttctgatgaagacattgggatcaatgcaattagtagatattctataatggatgcaagtcttccatttacaattaatcccagcacaggggatattgtcataagcagacctttaaatagggaagatacagaccgttacagaattcgagtttccgcacatgattctgggtggactgtaagtacagatgtcacaatatttgtgacagacatcaatgacaatgctccaagatttagcagaacttcctattatttagattgccctgaacttactgagattggctccaaagtaactcaggtatttgcaacagatcctgatgagggatcaaatggacaagtgttttatttcataaaatcccaatcagaatatttcaggattaatgccaccactggagagattttcaataaacagatcttaaaataccaaaatgtcactggcttcagtaatgtgaatatcaacaggcatagttttatagtgacatcttcagatcgaggtaaaccttccttaattagtgagacaacagttaccatcaatatagtggacagtaatgacaatgcacctcaatttcttaaaagtaaatatttcactccagtcaccaaaaatgttaaggttggtacgaagttaatcagagttacagcaatagatgacaaagattttggactgaattcagaagtggagtatttcatttctaatgataaccatttaggaaaatttaagttggacaatgatacggggtggatttcagtagcatcctccctgatttctgacttgaaccaaaacttttttatcacagtcactgcaaaggataagggaaaccctccactttcttcccaagcaactgttcacataactgtcactgaggaaaactaccatacacctgaattctctcaaagccacatgagtgcaaccatccctgagagccatagcattgggtccattgtcagaactgtttctgcaagagatagagatgcagcgatgaatggcttgattaagtacagcatttcttcaggaaatgaagaaggcatttttgcaatcaattcttctacaggtatattaacactagccaaagctcttgattatgagctatgccagaaacacgaaatgacgattagtgctatagatggaggatgggttgcaagaactggttactgcagtgtgaccgtaaatgtgattgatgtgaatgataattctccagtattcctctctgatgactatttccctactgttttggaaaatgccccaagtggaacaacagttatccacctaaatgcaacagatgctgactctggaacaaatgctgtgattgcgtatactgtacagtcatctgacagtgacctctttgtcattgaccctaacacaggagtcataaccactcaaggcttcttggattttgaaaccaagcagagctaccatcttactgtgaaagccttcaatgtccccgatgaggaaaggtgtagctttgccactgttaatatacaattaaaagggacaaatgaatatgtgccccgttttgtttccaaactttactattttgaaatctcagaagcagctcctaaaggtactattgttggagaagtgtttgctagcgaccgtgatttgggcactgatggggaggtacactatttgatttttggtaatagtcgaaagaagggtttccagatcaataagaagactggacagatttatgtttctggaattcttgatcgagaaaaagaagaaagggtgtctttgaaggtattggccaagaactttggcagcattagaggtgcagatatagatgaggtcactgtaaatgtcaccgtgcttgatgcaaatgacccacccatttttactctaaacatctacagtgtgcagatcagtgaaggggtcccaataggaactcatgtgacctttgtcagtgcctttgactcagactccatccccagctggagcaggttttcttacttcatcggatcagggaatgaaaatggtgccttttctattaatccgcagacaggacagatcaccgttactgcagaattagatcgagaaacccttcccatctataatctctcagttttggctgttgattcagggaccccctcagctacaggtagtgcctctttattagtcaccctggaagatataaatgataacgggcccatgctgactgtcagtgaaggagaagtcatggaaaacaaacggccaggcactttggtgatgacccttcagtccactgaccctgatctccctccaaatcaaggtccctttacttattacttgctgagcacaggtcctgccaccagttatttcagtctgagcactgctggagttctgagcacaaccagagagattgacagagagcagattgcagacttctatctgtctgtggttaccaaggattctggtgttcctcaaatgtcttccacaggaactgtgcatatcacagttatagaccaaaatgacaatccttcacagtctcggacggtggagatatttgttaattattatggtaacttgtttcccggtgggattttaggctctgtgaagccacaggatccagatgtgttagacagcttccactgctcccttacttcaggagttaccagcctcttcagtattccagggggtacttgtgatctgaattcccagccaaggtccacagatggcacgtttgatctgactgtccttagcaatgatggagttcacagcacagtcacgagcaacatccgagttttctttgctggattttccaatgccacagtggataacagcatcttacttcgtctcggcgtaccaacagtaaaggacttcttgaccaaccactatcttcattttttacgcattgccagctcacagctgacaggcttagggactgctgtgcaactgtacagtgcatatgaagagaacaatagaacgtttcttttggcagctgtgaagcgaaatcataatcagtatgtgaatcccagtggcgtagccaccttctttgaaagcatcaaagagatccttctccggcagagtggagtaaaggtggaatctgtggatcatgactcctgtgtgcatggcccatgtcagaatggagggagctgtctacgaagattggctgtgagctccgtattaaaaagccgtgagagtcttccagtcatcatcgtggcaaatgaacctctgcagcctttcttatgcaagtgtctgccaggatatgcgggtagctggtgtgaaatagatatagatgaatgtcttccatcaccttgccacagtggtggaacctgtcacaatttagtgggaggattttcatgcagctgcccagatggcttcactggtagggcgtgtgagagagatatcaatgagtgcctgcagagtccttgcaagaatggtgccatctgccagaattttccaggaagcttcaactgtgtttgcaaaactggatacacaggtgtctttggaaaacactgcgagttgaacagttatggatttgaggagttatcatacatggaatttccaagcttggaccccaataacaactatatttatgtcaaatttgccacgattaaaagtcatgccttattgctttacaactatgacaaccagacaggcgaccgggctgagtttttggcccttgaaattgccgaagaaagactaagattctcttataatttaggcagtggtacatataagctcaccaccatgaagaaggtgtcagatggacattttcacactgtgattgccaggagagcaggaatggcagcctccttaactgtggactcctgttctgagaaccaagagccaggatattgtactgtcagtaatgtggcagtttcagatgactggactcttgatgttcagccaaatagagttacagttggaggtatcagatctctagaaccaatccttcagagaagaggacacgtggaaagccatgattttgttgggtgtataatggagtttgcagtcaatggaaggcctctggaacccagccaagctttggcagcacaaggcatcctagatcagtatggcgattttatttcttactgttttaaagaaaaaaaatgcaaaaaagtatgcttcactgttactcctgacactgccttatcattagaaggcaaagggcgcttggactaccacatgagtcagaatgagaagcgggaatatttgttaaggcaaagcttacgaggtgccatgttggagccttttggtgtgaacagtctggaagtaaaatttaggaccagaagcgagaatggcgttttaatccatatccaagaaagcagcaattacactactgtgaagattaagaatggcaaagtatattttacatccgatgcaggaattgctgggaaagtggagagaaatattcctgaagtatatgttgcagacggccactggcacacttttctaattgggaaaaatggaacagcaacagtattgtctgttgacagaatatataacagagatattatccaccctactcaggacttcggtggccttgatgtgcttactatatcacttggaggaattccacccaatcaagcacatcgagatgcccaaacagcaggttttgatggctgcattgcttctatgtggtatggtggagaaagtcttcctttcagcgggaagcatagcttggcctccatctcaaaaacagatccctcagtgaagattggctgccgtggcccgaacatttgtgccagcaacccctgctggggtgatttgctgtgcattaatcagtggtatgcctacaggtgtgtccctcctggggactgtgcctcccacccgtgccagaatggtggcagctgtgagccaggcctgcactccggcttcacctgtagctgcccagactcgcacacgggaaggacctgtgagatggtggtggcctgtcttggcgtcctctgtcctcaggggaaggtgtgcaaagctggaagtcctgcggggcatgtctgtgttctgagtcagggccctgaagagatctctctgcctttgtgggctgtgcctgccatcgtgggcagctgcgcaaccgtcttggccctcctggtccttagcctgatcctgtgtaaccagtgcagggggaagaaggccaaaaatcccaaagaggagaagaaaccgaaggagaagaagaaaaagggaagtgagaacgttgcttttgatgaccctgacaatatccctccctatggggatgacatgactgtgaggaagcagcctgaagggaacccaaaaccagatatcattgaaagggaaaacccctaccttatctatgatgaaactgatattcctcacaactcagaaaccatccccagcgcccctttggcatctccagagcaggagatagagcactatgacattgacaacgccagcagcatcgccccttcggatgcagacatcattcaacactacaagcagttccgcagccacacaccaaaattttcaatccagaggcacagtcccctaggctttgcaaggcaatcccccatgcccttaggagcaagcagtttgacttaccagccttcatatggtcaaggtttgagaaccagctccctaagccactcagcatgcccaactcccaaccctctgtctcgacacagtccagcccctttctccaaatcttctacgttctatagaaacagcccagcaagggaattgcatcttcctataagggatggtaatactttggaaatgcatggtgacacctgccaacctggcattttcaactatgccacaaggctgggaaggagaagcaagagtcctcaggccatggcatcacatggttctagaccagggagtcgcctaaagcagccgattgggcagattccactggaatcttctcctccagtcggactttctattgaagaagtggagaggctcaacacacctcgccctagaaacccaagtatctgcagtgcagaccatgggaggtcttcttcagaggaggactgcagaaggccactgtctagaacaaggaatccagcggatggcattccagctccagaatcctcttctgatagtgactcccatgaatctttcacttgctcagaaatggaatatgacagggagaagccaatggtatatacttccagaatgcccaaattatctcaagtcaatgaatctgatgcagatgatgaagataattatggagccagactgaagcctcgaaggtaccacggtcgcagggccgagggaggacctgtgggcacccaggcagcagcaccaggcactgctgacaacacactgcccatgaagctagggcagcaagcagggactttcaactgggacaaccttttgaactggggccctggctttggccattatgtagatgtttttaaagatttggcatctcttccagaaaaagcagcagcaaatgaagaaggcaaagctgggacaactaaaccagtccccaaagatggggaagcagaacagtatgtgtga

SEQ ID NO: 12515 - DNA, 2323 bp, Homo sapiens
agctgtttccctgtgggtcgggttggactgacttttgacagtcagccttcggctgcggagggggctcggcggcggccggcggagaaagttgctccgatttgaagaccttgcttctcatcacccactggattatgccccaggcttccctacccaatgatcctcttgcaacacgccgtgcttcctccacctaagcagccctcaccctcgcctcctatgtcagtggccaccaggtctacaggaaccttgcagcttccaccacagaagccttttgggcaggaggcttccttgcctcttgcaggggaagaagagttatcgaagggaggggagcaagactgtgccctggaggagctatgtaagcccctgtactgcaaactctgcaatgtcaccttgaactctgcacagcaagcccaggctcattatcagggtaaaaatcatggtaagaaactccgaaattactatgcagcaaatagctgtcctcctcctgctagaatgagcaatgtggtcgagcctgcagctactccagttgttccagtccctccgcagatgggctcctttaagccaggaggccgagtgatcctggccacggagaatgattactgtaagctctgtgatgcctccttcagttccccagctgtggctcaggctcactatcaagggaagaatcatgccaagaggctgcggctggcggaagctcagagtaactcattctcggaatcctcagagctgggtcaacggcgggccaggaaagaagggaatgagtttaagatgatgcctaacaggagaaatatgtatacagtacagaataattcaggtccttacttcaatccccgctctcggcagagaattccacgtgatctggccatgtgtgttactccaagtggccagttttactgctcaatgtgtaatgttggagctggcgaagagatggaattccggcagcatttagagagcaagcaacataagagcaaggtgtctgaacagcggtacaggaatgagatggagaatctgggatatgtatagtgattatcatattaagatagagcagcttttcctgcctgttgtttgccttttgtcaacttgccctgctttgtggtctttttgatatgagtacattcctctgcttaatgttaatacatgtaacccacagtggtaccatgagatgtcaaaacctgggggcccgggggcggggcggggggaggtgggtgtgaagaacgtgcttcttaggtcataacgcttttgcagggtcaatggtgttgagccgctcatagcatgtgacctacctaccccatcagaaataactttttatcttgctcaagttctggtcaactagtagcctgacggcttagaactttgactatttaaaagtttcattttcttttgcaattttagttttatgtactgttaaagaattgtactgaattctttttagatcacagtaaaaataggttggcagagatttcagtttcccagggcttaaccagaaccgccacctcaatgcattgtcagtagaatacattattagaaactgttaaggtctttcccgggacatttttttctgccattttcttttgcaattgtagttttatgtactgttaaagaattgtattgaattctttttagatcaaagtaaaaataggtcagcagagatttcagtttcccagggcttaaccagaaccgccacctcaatgcattgtcagtaggatacattattagaaactgttagggtctttcccaggacatttttttttctgtatcatgtctccccatcattgaagcgcaaattttcttgaattcaaatactcccaatgagcttgtatacttccaaacagctaaacttgatttccagttgtggatttcacacatataattgccgccttcttccctcctcttttttcccccctagttgaatcagcttgtctaacaagcccattttcatgccccagctgtgctgtgggttttccaagcctcatatttgaatattcaatgagtttaagatggatatgatttcaaaaaatagggccgggcgcggtggctcacgcctgtaatcccagcactttgggaggccgaagcaggcggatcacgaggtcaggaggtcgagatcatcctggctaacacagtgaaaccccatctctactaaaaatacaaaacattagccgggcgtggtggtgggtgcctgtagtcccagctactctggaggctgaggcaggagaatggcgtgaacccgggaggcggagcttgcagtgagccgagatcgcgccactgcactccagcctgggtgacagagcgagactccgtctcaaaaaaaaaaaaaaaaaaaaaaaaa

SEQ ID NO: 12516 - DNA, 3341 bp, Homo sapiens
tgagtttcacgcgcgtatgctttgcccgccatggccgcagtcaaggagcctttggagttccatgccaagcggccttggcgccccgaggaggcagtagaagatccggacgaggaggatgaggataatactagtgaagccgagaatgggttctccctggaggaagtgttacggctcggaggcaccaagcaagattaccttatgctggctactttggatgagaatgaggaagtgatagatggaggcaaaaaaggagcaatcgatgaccttcagcaaggtgaattggaagcatttattcaaaatcttaatttggcgaagtatacaaaagcttccttagttgaagaagatgaaccagctgaaaaagaaaattccagcaaaaaagaagtaaaaatacctaaaataaataataaaaatacagcagaaagtcaaaggacatcagttaataaggtgaaaaataagaataggccagaaccacattctgatgagaatggcagtaccacaccgaaagtaaagaaagataaacagaacatctttgaattttttgagagacagactttgttacttaggcctggaggcaaatggtatgatctggagtacagcaatgaatattctttgaaaccccagcctcaggatgttgtatctaagtacaaaacccttgctcagaagctgtatcagcatgaaatcaacttattcaaaagtaagacgaatagtcaaaagggagcctcttctacctggatgaaggcaattgtgtcatcggggacactaggtgacaggatggcagccatgattcttcttattcaggatgatgccgttcacacacttcagtttgtagaaactcttgtgaaccttgttaaaaagaagggcagcaaacagcagtgccttatggccttggatactttcaaagagttgcttatcacagaccttttgccagacaatcggaagctgaggattttcagccagcgtccttttgacaaactggaacagttgtccagtggcaacaaggactcaagagatagaagactgatattatggtattttgaacaccagctgaaacacttagtggctgaatttgtgcaggtcttagaaactttaagtcatgatacattagtaaccactaaaactcgagcccttaccgtggctcatgagctgctttgtaacaagcctgaggaagaaaaggctcttcttgtgcaagtggtaaataaactgggagatcctcagaacagaattgccacaaaagcatcccatctgttagagacattactttgtaaacatcccaatatgaaaggagttgtgtctggtgaagtagaaaggctactcttccgctcaaatatcagctccaaagctcaatattatgcaatttgctttttaaatcaaatggctctgtcccatgaagaaagtgaattggctaacaaattaataactgtttacttttgcttttttcggacttgtgtcaaaaaaaaagatgttgaatcaaaaatgcttagcgcccttttaacaggtgtgaatagggcatacccttattcccagactggtgatgacaaagtaagggagcagattgacacactgtttaaagtgttgcatattgtgaattttaataccagtgtccaggctttaatgttgcttttccaagtaatgaattctcagcagacaatatcggatcgatattacacagcattatacaggaagatgttggatccagggttgatgacgtgttccaagcaagctatgtttcttaaccttgtctacaaatctctgaaagctgacattgtgttgcgccgggtgaaggcttttgtgaagaggttacttcaagttacttgtcaacagatgccaccatttatatgtggagctttatatcttgtgtctgagatccttaaagcaaaaccaggtttaagaagccaactagatgatcatccggagtctgatgatgaagaaaattttattgatgcaaatgatgatgaagacatggaaaaattcactgatgcagacaaagaaacagagatagtgaaaaaacttgagacagaggaaacagttcctgaaactgatgtagaaaccaaaaaaccagaggttgcttcctgggtgcactttgataatttgaaaggtgggaaacagttaaataaatacgatccattcagtagaaaccctctgttctgtggagctgaaaatacaagtctttgggaactcaaaaagttatctgtgcattttcatccctccgtggccctttttgcaaagaccatccttcagggaaactatattcagtattcaggggacccactgcaggatttcactctaatgagatttttggatcgatttgtataccgaaatccaaagccccataaaggcaaagaaaacacagatagtgttgtgatgcagccgaaaagaaaacattttattaaggatattcgtcatcttcctgtgaacagtaaggagttccttgcaaaagaagaaagccaaataccagtggatgaagtgtttttccacaggtattataaaaaagttgctgttaaagagaaacaaaaacgggatgcagatgaagaaagtatagaagacgtggatgatgaagaatttgaagagctgattgacacatttgaagatgataactgtttcagctctggaaaggatgatatggattttgctggaaacgtgaaaaagagaacaaaaggagctaaggataacacattagatgaagattcagaaggtagtgatgatgaacttggtaacctggatgacgatgaagtttctttaggaagtatggatgatgaagaatttgctgaagttgatgaagatggaggaacattcatggatgtgttagatgatgaaagtgagagcgttccagaacttgaagtccactccaaagtcagtactaagaaaagcaagagaaaaggtacagatgattttgactttgctggctcatttcaagggccaagaaaaaagaaaagaaacttaaatgattccagcctatttgtatctgctgaagagtttggccatctattggatgaaaatatgggatccaagtttgataacattggcatgaatgccatggctaacaaagataatgcaagtctcaaacagcttagatgggaggctgaacgtgatgactggctacacaacagagatgcaaaaagtatcatcaagaaaaagaaacattttaaaaagaagaggattaaaaccactcaaaaaactaaaaaacaaaggaaatgagttattaatgtaaattatagattaaaattctacttacatctaatttttgctgttcaaccatgttttttgatctagctctctgattccatacattccagacttctcagtggatttgtaataaactataaataaaaaaaaaaaaaaaa

SEQ ID NO: 12517 - DNA, 2881 bp, Homo sapiens
ccagctggcagtcaaggctgtaggagggcatggagagttgaagaaaaaagcagtatcttgaggcagactggaagagtcatcacagcatccaaatcaacaagaaaacatcattccagggtcctacatgatggcgtactctgatactacaatgatgtctgatgatattgactggttacgcagccacaggggtgtgtgcaaggtagatctctacaacccagaaggacagcaagatcaggaccggaaagtgatatgctttgtcgatgtgtccaccctgaatgtagaagataaagattacaaggatgctgctagttccagctcagaaggcaacttaaacctgggaagtctggaagaaaaagagattatcgtgatcaaggacactgagaagaaagaccagtctaagacagagggatctgtatgccttttcaaacaagctccctctgatcctgtaagtgtcctcaactggcttctcagtgatctccagaagtatgccttgggtttccaacatgcactgagcccctcaacctctacctgtaaacataaagtaggagacacagagggcgaatatcacagagcatcctctgagaactgctacagtgtctatgccgatcaagtgaacatagattatttgatgaacagacctcaaaacctacgtctagaaatgacagcagctaaaaacaccaacaataatcaaagtccttcagctcctccagccaaacctcctagcactcagagagcagtcatttcccctgatggagaatgttctatagatgacctttccttctacgtcaaccgactatcttctctggtaatccagatggcccataaggaaatcaaggagaagttggaaggtaaaagcaaatgccttcatcattcaatctgtccatcccctgggaacaaagagagaatcagtccccgaactcctgcgagcaagattgcttctgaaatggcctatgaagctgtggaactgacagctgcagaaatgcgtggcactggagaggagtccagggaaggtggccagaaaagctttctatatagcgaattatccaacaagagcaaaagtggagacaaacagatgtcccagagagagagcaaagaatttgcagattccatcagcaaggggctcatggtttatgcaaatcaggtggcatctgacatgatggtctctctcatgaagaccttgaaagtgcacagctctgggaagccaattccagcatctgtggtcctgaagagggtgttgctaaggcacaccaaggagattgtgtccgatttgattgattcttgcatgaagaacctgcataatattactggggtcctgatgactgactcagactttgtctcagctgtcaagagaaatctgttcaaccagtggaaacaaaatgctacagacatcatggaggccatgctgaagcgcttggtcagtgcccttataggtgaggagaaggagactaagtctcagagtctgtcatatgcatctttaaaagctgggtcccatgatcccaaatgcaggaatcagagtcttgaattctccaccatgaaagctgaaatgaaagagagggacaaaggcaaaatgaaatcagacccatgcaagtcactgactagtgctgagaaagtcggtgaacacattctcaaagagggcctaaccatctggaaccaaaagcaaggaaactcatgcaaggtggctaccaaagcatgcagcaataaagatgagaaaggagaaaagatcaatgcttccacagattcactggccaaggacctgattgtctctgcccttaagctgatccagtaccatctgacccagcagactaagggcaaagatacatgtgaagaagactgtcctggttccaccatgggctatatggctcagagtactcaatatgaaaagtgtggaggtggccaaagtgccaaagcactttcagtgaaacaactagaatctcacagagcccctggaccatccacctgtcaaaaggagaaccaacacctggactcccagaaaatggatatgtcaaacatcgttctaatgctgattcagaaactgcttaatgagaaccccttcaaatgtgaggatccatgcgaaggtgagaacaagtgttctgagcccagggcaagcaaagcagcttccatgtccaacagatctgacaaagcggaagaacaatgccaggagcatcaagaacttgactgtaccagtgggatgaagcaagcgaacgggcaatttatagataaactagtagaatctgtgatgaagctctgccttatcatggctaagtatagcaacgatggggcagcccttgctgagttggaagaacaagcagcctcggcaaataagcccaatttcaggggcaccagatgcattcacagtggtgcaatgccacagaactatcaagactctcttggacatgaagtaattgtcaataatcagtgctctacaaatagcttgcagaagcagctccaggctgtcctgcagtggattgcagcctcccagtttaacgtgcccatgctctacttcatgggagataaggatggacaactggaaaagcttcctcaggtttcagctaaagcagcagagaaggggtacagtgtaggaggtcttcttcaagaggtcatgaagtttgccaaggaacggcaaccagatgaagctgtgggaaaggtggccaggaaacagttgctggactggctgctcgctaacctgtgagctgatccttgactcctcttcatcttagcccccctagcagcattccatcccagccagagcacccccaccatcaggccagtcaactgcacaatacacaactgtatttcccaatacacttgagcagttgcctgtgaatgtaagaggtgtcaacaaactgggaaataaaataaaaaaaaataataataaatgtgt

SEQ ID NO: 12518 - DNA, 1949 bp, Homo sapiens
gggagagcagtttacgacagcgccggtcgtgtttacggcggcgcccgctgcgcgcgcatgtttcctcttttcctggtttctcaagagtgctgctgctaacgcggtccccggcacgcaccatctgttgccatcccggccggccgaggccattgcagattttggaagatggcaaagttcatgacacccgtgatccaggacaacccctcaggctggggtccctgtgcggttcccgagcagtttcgggatatgccctaccagccgttcagcaaaggagatcggctaggaaaggttgcagactggacaggagccacataccaagataagaggtacacaaataagtactcctctcagtttggtggtggaagtcaatatgcttatttccatgaggaggatgaaagtagcttccagctggtggatacagcgcgcacacagaagacggcctaccagcggaatcgaatgagatttgcccagaggaacctccgcagagacaaagatcgtcggaacatgttgcagttcaacctgcagatcctgcctaagagtgccaaacagaaagagagagaacgcattcgactgcagaaaaagttccagaaacaatttggggttaggcagaaatgggatcagaaatcacagaaaccccgagactcttcagttgaagttcgtagtgattgggaagtgaaagaggaaatggattttcctcagttgatgaagatgcgctacttggaagtatcagagccacaggacattgagtgttgtggggccctagaatactacgacaaagcctttgaccgcatcaccacgaggagtgagaagccactgcggagcatcaagcgcatcttccacactgtcaccaccacagacgaccctgtcatccgcaagctggcaaaaactcaggggaatgtgtttgccactgatgccatcctggccacgctgatgagctgtacccgctcagtgtattcctgggatattgtcgtccagagagttgggtccaaactcttctttgacaagagagacaactctgactttgacctcctgacagtgagtgagactgccaatgagccccctcaagatgaaggtaattccttcaattcaccccgcaacctggccatggaggcaacctacatcaaccacaatttctcccagcagtgcttgagaatggggaaggaaagatacaacttccccaacccaaacccgtttgtggaggacgacatggataagaatgaaatcgcctctgttgcgtaccgttaccgcaggtggaagcttggagatgatattgaccttattgtccgttgtgagcacgatggcgtcatgactggagccaacggggaagtgtccttcatcaacatcaagacactcaatgagtgggattccaggcactgtaatggcgttgactggcgtcagaagctggactctcagcgaggggctgtcattgccacggagctgaagaacaacagctacaagttggcccggtggacctgctgtgctttgctggctggatctgagtacctcaagcttggttatgtgtctcggtaccacgtgaaagactcctcacgccacgtcatcctaggcacccagcagttcaagcctaatgagtttgccagccagatcaacctgagcgtggagaatgcctggggcattttacgctgcgtcattgacatctgcatgaagctggaggagggcaaatacctcatcctcaaggaccccaacaagcaggtcatccgtgtctacagcctccctgatggcaccttcagctctgatgaagatgaggaggaagaggaggaggaagaagaggaagaagaagaggaagaaacttaaaccagtgatgtggagctggagtttgtccttccaccgagactacgagggcctttgatgcttagtggaatgtgtgtctaacttgctctctgacatttagcagatgaaataaaatatatatctgtttagtctttccctca

SEQ ID NO: 12519 - DNA, 3949 bp, Homo sapiens
ctcgcgcgcacgaatggttaaaaaaagggtgtgaggctcgagcccgccagccaggccgctagcacctcgcgcgcgccctcagcgaggacccgcacgagctgcccggctctgtgcctgcgttgtttgaaactgtggaacccgttaggcttttggggaactacagtcccagctggctccggagcccgtgcgtgccaggggcgagtggccgtcgcgagacggctcctgcctttcgtgtctctgcagcgtggagactggaaccggcaatttcaaaggacgccacgttcaatcgcagcgctggcgcgggcggaggctaaaacacgggggtcctgagactgaggaaaacgcgccaagttcccctcggtggcggagtgctaaagaccctagcggttcaggcgttcggcgagcggggccgctgcttgttgcgctcctggctctcccggggcgggcgcagatgggcgccgctcccgggatgtagttggtgttggtgcaagacgggagcgagcggcggtcggggttcccgctcttgggagcggatggtcactcccccgcggggagggcgagccgaccagattttcctggggccggggacccggcgggctcggggcagggactcacctgtcgcacccacactcattcgggttggacttgccggcgtcaccgccgcggacttcgctttgggccatgaccagatataattggtgattacaactttcctctataaattaactcttgacactccttgggatttgaagaaaaaaatgcctggtgtcatacctagtgaaagtaatggactttcaagaggtagcccttcaaagaaaaacagactttccttaaagttttttcagaaaaaggaaactaagagagctttggatttcacagattctcaagaaaatgaagaaaaagcttctgaatatagagcatctgaaattgatcaagttgttcctgcagcacagtcttcacctataaactgtgagaagagagaaaacttgttaccatttgtgggactgaataatctcggcaatacttgctatcttaatagtatacttcaggtattatatttttgtcccggttttaaatctggagtaaagcacttatttaatattatttcaaggaagaaagaagctctaaaggatgaagccaatcaaaaagacaagggaaattgcaaagaagattctttggcaagttatgaattgatatgcagtttacagtccttaatcatttcggttgaacagctccaggctagttttctcttaaatccagagaaatatactgatgaacttgccactcagccaaggcgactgcttaacacactgagggaactcaaccctatgtatgaaggatatctacagcatgatgcacaggaagtattacaatgtattttgggaaacattcaagaaacatgccaactcctaaaaaaagaagaagtaaaaaatgtggcagaattacctactaaggtagaagaaatacctcatccgaaagaggaaatgaatggtattaacagcatagagatggacagtatgaggcattctgaagactttaaagagaaactcccaaaaggaaatgggaaaagaaaaagtgacactgaatttggtaacatgaagaaaaaagttaaattatccaaggaacaccagtcattggaagagaaccagagacaaactagatcaaaaagaaaagctacaagtgatacattagagagtcctcctaaaataattcccaagtatatttctgaaaatgagagtccaagaccctcacaaaagaaatcaagagttaaaataaattggttaaagtctgcaactaagcaacccagcattctttctaaattttgtagtctgggaaaaataacaacaaaccaaggagtcaaaggacaatctaaagaaaatgaatgtgatcctgaagaggacttggggaagtgtgaaagtgataacacaactaatggttgtggacttgaatctccaggaaatactgttacacctgtaaatgttaatgaagttaaacccataaacaaaggtgaagaacaaattggttttgagctagtggagaaattatttcaaggtcagctggtattaaggacgcgttgcttggaatgtgaaagtttaacagaaagaagagaagattttcaagacatcagtgtgccagtacaagaagatgagctttccaaagtagaggagagttctgaaatttctccagagccaaaaacagaaatgaagaccctgagatgggcaatttcacaatttgcttcagtagaaaggattgtaggagaagataaatatttctgtgaaaactgccatcattatactgaagctgaacgaagtcttttgtttgacaaaatgcctgaagttataactattcatttgaagtgctttgctgctagtggtttggagtttgattgttatggtggtggactttccaagatcaacactcctttattgacacctcttaaattgtcactagaagaatggagcacaaagccaactaacgacagctatggattatttgcggttgtgatgcatagtggcattacaattagtagtgggcattacactgcttctgttaaagtcactgaccttaacagtttagaactagataaaggaaattttgtggttgaccaaatgtgtgaaataggtaagccagaaccattgaatgaggaggaagcaaggggtgtggttgagaattataatgatgaagaagtgtcaattagagttggtggaaatacacagccaagtaaagttttgaacaaaaaaaatgtagaagctattggacttcttggaggacaaaagagcaaagcagattatgagctatacaacaaagcctctaatcctgataaggttgctagtacagcgtttgctgaaaatagaaattctgagactagtgatactactgggacccatgaatctgatagaaacaaggaatccagtgaccaaacaggcattaatattagtggatttgagaacaaaatttcatacgtagtgcaaagcttaaaggagtatgaggggaagtggttgctttttgatgattctgaagtcaaagttactgaagagaaggactttctgaattctctttccccttctacatctcctacttctactccttacttgctattttataagaaattatagagtgagtgtattttccttgtgtatatattaaacacacccatacaaacattggtaaagttgattacatcaaagaatctttagcttatcttttgaagctactggatattattggtctctctaggtttttatataaatagtgaaatttgaattactgaaaaccatgttaatttttagaactcattttcctcagtagagactagtgatgcattagcttctgggaacaaacttgtatcggttcttaattaaattatccaaaacggaggcatttaaacacttggatttacaccagtcttttgtgtttgctttttaaaataaagtgctcgtatttgtattctccatattttggagtaattatctacatgatgtttatagttcctgtggtttttcacccaagaagcagaatctcattcagtacatttagttttataagagtcatgaagctaaatccttgggctatgtcagaggcacaaagtctagaatgtgtgtattcacaatggtgtatgtacattttgtgccttgattcacttagaagtgtctcagaaaacctggacagttcgcttctacacaagaattttatatgtatttatgaagatgattctgtaccctagtatatctttttgggcatggactaatttgtatctgtttaactcatattctgcacgatctgtatatagtacatcaaacttagaggtgtgaccttaaatttaactttttttaaaaactgggaggtcaataaaatttaaactgcttaactatgtatatgaatatttgaattttttacttgtatatttttataaatacagctgagttttcttaaagcgaaaaaaaaaaaa

SEQ ID NO: 12520 - DNA, 1705 bp, Homo sapiens
aagtttgagtttgtgtgcttactagcaaccactttcagcgtttctgcaaagctagagaagggttcccagtgccgattccgacactgtgaagaggcccttggcagtgacactgtgtgctcattatggagagagaggaaatgtttagatccactttgcagatttagacacatggaaatgcagcaaaactgcagcatttcatgcttctgggaaactcagcctcttggttgtgtgaagatcagctgtatcttttatcacagcaaacctcgaaatatcaatggattatttttgccaccaagtagcaatatcacactacagaaagaaattcaggaaggaattccactccagtcccagagtcaagaacctctgaaacctcaggaaaatatatcacgacccatccaccatcctttagttttaaaaactaattttgaggaagaagaggaagtagatgaacaaaatgatgcttctagtttatggacaaagacccctgaagaaattgaagaaaaaagagcaataaaggagatgtgttataaatctggggaatactacagatttcatactcctccagatattttgtcatcaaaaagcatgacacctacagcagaaaaacagttagaaaagcctttggaaaatggcagtgaattgcaagaaggagatagtcttacagttccgacaaaacttagccaatatgaaaggcaaggtgaaataaaaacatcattgcatgggaaaccaaagactgacattgctgcttttgaaaatggaggaggtgactgttatgttccacagagggtcatatttcttggagtcgatgaaagtgaagctttaactgaagagaaagaaatcaccatatcaaaatgttcaaatactaaagataacaaggacagtcctcatccaaagcattccctaactacccgactagtacctacaacgcatgtattaaatgctactgagaatatcagtatgaagtgcagagaggacccctcttcaatgaatgatgtccagccagtgaagaagcctcattttaaaggtgtgaagaaaagaaaatggatttatgatgaaccacagaactttcctaactctggaatgcagagagcagtacaggccccaagaccccaaaataaaatgagttatcaccgcaataataaaaatcgaaatgcggagaatgcatcctatatccacgttcaaagagatgctgtcaggactgtcgcgttgaatgcaccttcccgcagcaggcccacgcatgggtcctacaataaagtccatgctaacagggaacccaaacccaacctcagtccagacaaatatacgtcaacatcatataatgattcagcctggcgaaaacgaattcctttttcaaaaacatattcaaaaagtgaaaagatatatccagagccaagaagaaatgggagcaagtaaacctggaggttgagagagagaaaaatgagaaaaaattgccagacatcatctgatttacaatcaaaaatgaaaattcaaagaatgagatactcaagtactccatgttatgtagtggatagccaaagatgataaaaatgcaaattctgaaaataagatgcaggaagtacattgtgctctttcaaaactgataaaaatgcaaattaccaacagctgccagtgtatttatgtaggtctggaattcattccgtgcattactccaaacattttaataaaatttaaaagtttgacaatt

SEQ ID NO: 12521 - DNA, 4210 bp, Homo sapiens
atggcggccggcaagagcggcggtagcgcaggggagattacttttctggaagctttggctagatcagagtctaagagagatggaggttttaaaaataattggagctttgatcatgaagaagaaagtgaaggagatacagataaagatgggacaaatctgctcagtgtggatgaagatgaggattctgaaacctcaaaaggaaaaaagttaaatcgtcgatctgaaattgttgctaatagctctggtgaattcatcttgaagacatatgtaagacgaaacaagtctgaaagttttaaaactttgaaaggcaacccaattggacttaacatgttgagcaacaataagaaattgagtgaaaatatgcaaaatacgtcattatgttctggaactgtagttcatggtagacgttttcatcatgctcatgcacagataccagtagtaaaaacagcagcccaaagcagtctggaccgaaaagaaaggaaagaatacccacctcatgtccaaaaagttgaaattaatcctgtaaggttaagtcggctccaaggtgttgaacgtataatgaagaaaacagaagagtccgaatcacaagtggagcctgaaattaagaggaaagtacaacagaaacggcactgtagtacctatcagcctactcctcctctatctcctgcttcaaaaaaatgtttaacccatttagaggatttgcaaagaaattgcagacaagctattactttgaatgagtctactggaccattattaagaacgtcaattcatcagaattctggaggacagaagtcacaaaacacaggattaacaaccaagaagttttatggcaacaatgtggaaaaggttccaattgatattattgtgaattgtgatgacagtaaacacacttatttacagactaatggaaaagtcattttacctggggcaaaaatacccaaaatcacaaacttgaaagaaaggaaaacaagtttgtcagacctaaatgatccaatcattttgtccagtgatgatgatgatgacaacgacagaactaacagaagagaaagcatatctcctcagcctgctgattcagcatgttcttcccctgcaccatccactggaaaagtagaagcagcactaaatgaaaatacttgcagagcagagcgtgaactacgaagcattccagaagactcagagttaaatacagttacattgccaagaaaagcaagaatgaaagaccagtttggcaattctattatcaacacacctctgaaacgtcgtaaagtgttttctcaagaacctccagatgctttagctttaagctgccaaagttcctttgacagtgtcattttaaactgtcgaagtatacgagtaggaacactcttccggctgttaatagagcctgtaattttttgtttagattttatcaagatacagctagacgaaccagaccatgatcctgtagagattatattaaatacctctgatctaactaaatgtgaatggtgtaatgtccgaaaattacctgtagtgtttcttcaagcaattccagcagtttatcaaaagctgagcatccaactgcaaatgaataaggaggataaagtttggaatgattgtaaaggagtaaataaattaacaaatttagaagaacaatatataattttaatttttcaaaatggccttgatcctccggcaaatatggtatttgaaagtatcattaatgaaattggtataaagaataacatctccaatttttttgcgaaaattccctttgaagaagctaatggcagacttgttgcctgtacaagaacctatgaagagagcatcaaaggaagttgtgggcaaaaggaaaacaaaattaaaactgtatcatttgaatctaaaatacaacttagaagcaaacaagaatttcagttttttgatgaagaagaagaaactggagaaaaccacaccatcttcattggcccagtagaaaagttgatagtatatccaccacctccagctaagggaggcatctctgttaccaatgaggacctgcactgtctaaatgaaggagaatttttaaatgatgttattatagacttttatttgaaatacttggtgcttgaaaaactgaagaaggaagacgctgaccgaattcatatattcagttcttttttctataaacgccttaatcagagagagaggagaaatcatgaaacaactaatctgtcaatacagcaaaaacggcatgggagagtaaaaacatggacccggcacgtagatatttttgagaaggattttatttttgtaccccttaatgaagctgcacactggtttttggctgttgtttgtttccccggtttggaaaaaccaaagtatgaacctaatcctcattaccatgaaaatgctgtcatacagaaatgttcaactgtagaggacagttgtatttcttcttcagccagtgaaatggagagttgttcacaaaactcttctgccaagcctgtaattaagaagatgctaaacaaaaaacattgcatagctgtaattgattccaatcctgggcaggaagaaagtgaccctcgttataagagaaacatatgcagtgtaaaatacagtgtgaaaaaaataaatcatactgcgagtgaaaatgaagaattcaataaaggagaatctacatcccagaaagttgctgataggactaaaagtgagaatggcctacagaatgaaagtttaagttccacacatcatacagatggcttaagcaaaatcagactaaactatagcgatgaatcacctgaagctggtaaaatgcttgaagatgaactcgtcgacttctcagaagatcaggataaccaggatgatagcagtgacgatggattcctcgctgatgacaactgcagttcagaaataggacagtggcatttaaagcctactatctgtaaacaaccttgtatcctacttatggactcactccgaggcccttctcggtcaaatgttgtcaaaattttaagagagtatttagaagtggaatgggaagttaaaaaaggaagcaaaagaagtttttccaaagatgttatgaagggctctaatccaaaagtaccacagcaaaacaacttcagtgactgtggtgtatatgtattgcagtatgtagagagcttttttgagaatccaattctcagttttgaactacctatgaatttggcaaactggtttcctccaccaagaatgagaacaaaaagagaagaaatccgaaacataattctgaagctacaggaagatcagagcaaagagaaaagaaagcataaggacacttactcaacagaagcacctttaggcgaaggaacagaacaatgtgtcaatagtatctcagattgaccatttctgttacttgtcatttctactttcagaaactaaatgactttcaaatttgggtatagacaataaagaactgaagtgctcactactcagtgatttggaaattttgatgcttgtataaatgtcagataattaatttccaaaggcgtatgtattaagtaaaagtctgtaaatatgttaatgaggccaatttttccagcatttataattatttttttcacttgttaggaagcttttgttatgtattttctgttaatagtacctaaaattgcaacttctaaacccaaataaaaagaaaatatttataggaggaaatgattaatttgatattctttagtgaacttgtttaattcctcagtgggtgtgacatatttcatgggaatattcaaatatctatggtaatattttgaccctttatatttgttctaaaataagtcaaaatgtgaaaataatattaaatctaagatattttgaactaagcatctttatatgcttgtgtaacaggaacaaagtaacagcctttcaattcatatactgccttgtgttcagtgaacccaagaaatgtaataaatatttgtaattttacacaaatatttaagaggaaagagtattaagagcaattcaaaaaaagtaaccttatactactaaaaaaaaaattcttgcatatattatcatcaaatgcatttttgaagacatcaaagactcaggttaaaactattttggtaagtgcagcttgaatttcaaatatcccgtgttacctttctctattacagcttaaagtatgctacaatctgtgtcatatagttaattgataagcatttttaatctgtgtaaacacaggaatttaaataggaatttactatttttttat

SEQ ID NO: 12522 - DNA, 1554 bp, Homo sapiens
gcggaccccagagagccctgagcagccccaccgccgccgccggcctagttaccatcacaccccgggaggagccgcagctgccgcagccggccccagtcaccatcaccgcaaccatgagcagcgaggccgagacccagcagccgcccgccgccccccccgccgcccccgccctcagcgccgccgacaccaagcccggcactacgggcagcggcgcagggagcggtggcccgggcggcctcacatcggcggcgcctgccggcggggacaagaaggtcatcgcaacgaaggttttgggaacagtaaaatggttcaatgtaaggaacggatatggtttcatcaacaggaatgacaccaaggaagatgtatttgtacaccagactgccataaagaagaataaccccaggaagtaccttcgcagtgtaggagatggagagactgtggagtttgatgttgttgaaggagaaaagggtgcggaggcagcaaatgttacaggtcctggtggtgttccagttcaaggcagtaaatatgcagcagaccgtaaccattatagacgctatccacgtcgtaggggtcctccacgcaattaccagcaaaattaccagaatagtgagagtggggaaaagaacgagggatcggagagtgctcccgaaggccaggcccaacaacgccggccctaccgcaggcgaaggttcccaccttactacatgcggagaccctatgggcgtcgaccacagtattccaaccctcctgtgcagggagaagtgatggagggtgctgacaaccagggtgcaggagaacaaggtagaccagtgaggcagaatatgtatcggggatatagaccacgattccgcaggggccctcctcgccaaagacagcctagagaggacggcaatgaagaagataaagaaaatcaaggagatgagacccaaggtcagcagccacctcaacgtcggtaccgccgcaacttcaattaccgacgcagacgcccagaaaaccctaaaccacaagatggcaaagagacaaaagcagccgatccaccagctgagaattcgtccgctcccgaggctgagcagggcggggctgagtaaatgccggcttaccatctctaccatcatccggtttagtcatccaacaagaagaaatatgaaattccagcaataagaaatgaacaaaagattggagctgaagacctaaagtgcttgctttttgcccgttgaccagataaaataactatctgcattatctatgcagcatggggtttttattatttttacctaaagacgtctctttttggtaataacaaacgtgttttttaaaaaagcctggtttttctcaatacgcctttaaaggtttttaaattgtttcatatctggtcaagttgagatttttaagaacttcatttttaatttgtaataaaagtttacaacttgattttttcaaaaaagtcaacaaactgcaagcacctgttaataaaggtcttaaataataaaaaaaaaaaaaaaaaaaaaaaaaaaaaaaaaaaaaaaaaaaaaaaaaaaaaaaaaaaaccctgag

SEQ ID NO: 12523 - DNA, 1931 bp, Homo sapiens
gcccaagagcgagcgcgcagcacgaagctcgagccgcctccgccgcgcgaccccacctcggccgccgccgcctgcgccgcgagatccgccccggcctccccgagagcgagccccggccgccgcgaccaccagccgcgctaaccgccgaccaaccgccaccgaggcgcctgagcgagagcagaggaggaggaggcatgagtgaggcgggcgaggccaccaccaccaccaccaccaccctcccgcaggctccgacggaggcggccgccgcggctccccaggaccccgcgcccaagagcccggtgggcagcggtgcgccccaggccgcggccccggcgcccgccgcccacgtcgcaggaaaccccggtggggacgcggcccccgcagccacgggcaccgcggccgccgcctctttagccgccgccgccggcagcgaagacgcggagaaaaaagttctcgccaccaaagtccttggcactgtcaaatggttcaacgtcagaaatggatatggatttataaatcgaaatgacaccaaagaagatgtatttgtacatcagactgccatcaagaagaataacccacggaaatatctgcgcagtgtaggagatggagaaactgtagagtttgatgtggttgaaggagagaagggtgcagaagctgccaatgtgactggcccggatggagttcctgtggaagggagtcgttacgctgcagatcggcgccgttacagacgtggctactatggaaggcgccgtggccctccccggaattacgctggggaggaggaggaggaagggagcggcagcagtgaaggatttgacccccctgccactgataggcagttctctggggcccggaatcagctgcgccgcccccagtatcgccctcagtaccggcagcggcggttcccgccttaccacgtgggacagacctttgaccgtcgctcacgggtcttaccccatcccaacagaatacaggctggtgagattggagagatgaaggatggagtcccagagggagcacaacttcagggaccggttcatcgaaatccaacttaccgcccaaggtaccgtagcaggggacctcctcgcccacgacctgccccagcagttggagaggctgaagataaagaaaatcagcaagccaccagtggtccaaaccagccgtctgttcgccgtggatatcggcgtccctacaattaccggcgtcgcccgcgtcctcctaacgctccttcacaagatggcaaagaggccaaggcaggtgaagcaccaactgagaaccctgctccacccacccagcagagcagtgctgagtaacaccaggctcctcaggcaccttcaccatcggcaggtgacctaaagaattaatgaccattcagaaataaagcaaaaagcaggccacaaccttaaccaacaccaaagaaacatccaagcaataaagtggaagactaaccaagatttggacattggaatgtttactgttattctttaagaaacatctacaaaaagaaaatgtcaacaaatttttccagcaagctgagaacctgggaattcctgcacggaagacaagagagtagcctctccagtttcagcaaccgctaggtttctattttttttcctggtttttactgttttggtaatatatatattgaaacaagaaatattaataccacatggggagaaccccaaccaaagaaatctgaaatatatagtaaatgcttttttttccgtttttgttcattttggatgctggtgctaaacctccaagtgtcatgatttaaaaaaaaaaaaaatttatgtccttcttatttatttctaggatgaggggaggataacatttttgctttcttatgtgactctctttgaaaatgtgcagtaagaaattcctcaaaaataaaatttttacccttcagaggaaaaaaaaaaaaaaaaaaa

SEQ ID NO: 12524 - DNA, 3782 bp, Homo sapiens
ttctgcccttcccccgcttaggggggcgggggtaggggaaaggaaaataatacaatttcaggggaagtcgccttcaggtctgctgcttttttattttttttttttaattaaaaaaaaaaaggacatagaaaacatcagtcttgaacttctcttcaagaacccgggctgcaaaggaaatctcctttgtttttgttatttatgtgctgtcaagttttgaagtggtgatctttagacagtgactgagtatggatcatttgaacgaggcaactcaggggaaagaacattcagaaatgtctaacaatgtgagtgatccgaagggtccaccagccaagattgcccgcctggagcagaacgggagcccgctaggaagaggaaggcttgggagtacaggtgcaaaaatgcagggagtgcctttaaaacactcgggccatctgatgaaaaccaaccttaggaaaggaaccatgctgccagttttctgtgtggtggaacattatgaaaacgccattgaatatgattgcaaggaggagcatgcagaatttgtgctggtgagaaaggatatgcttttcaaccagctgatcgaaatggcattgctgtctctaggttattcacatagctctgctgcccaggccaaagggctaatccaggttggaaagtggaatccagttccactgtcttacgtgacagatgcccctgatgctacagtagcagatatgcttcaagatgtgtatcatgtggtcacattgaaaattcagttacacagttgccccaaactagaagacttgcctcccgaacaatggtcgcacaccacagtgaggaatgctctgaaggacttactgaaagatatgaatcagagttcattggccaaggagtgccccctttcacagagtatgatttcttccattgtgaacagtacttactatgcaaatgtctcagcagcaaaatgtcaagaatttggaaggtggtacaaacatttcaagaagacaaaagatatgatggttgaaatggatagtctttctgagctatcccagcaaggcgccaatcatgtcaattttggccagcaaccagttccagggaacacagccgagcagcctccatcccctgcgcagctctcccatggcagccagccctctgtccggacacctcttccaaacctgcaccctgggctcgtatcaacacctatcagtcctcaattggtcaaccagcagctggtgatggctcagctgctgaaccagcagtatgcagtgaatagacttttagcccagcagtccttaaaccaacaatacttgaaccaccctccccctgtcagtagatctatgaataagcctttggagcaacaggtttcgaccaacacagaggtgtcttccgaaatctaccagtgggtacgcgatgaactgaaacgagcaggaatctcccaggcggtatttgcacgtgtggcttttaacagaactcagggcttgctttcagaaatcctccgaaaggaagaggaccccaagactgcatcccagtctttgctggtaaaccttcgggctatgcagaatttcttgcagttaccggaagctgaaagagaccgaatataccaggacgaaagggaaaggagcttgaatgctgcctcggccatgggtcctgcccccctcatcagcacaccacccagccgtcctccccaggtgaaaacagctactattgccactgaaaggaatgggaaaccagagaacaataccatgaacattaatgcttccatttatgatgagattcagcaggaaatgaagcgtgctaaagtgtctcaagcactgtttgcaaaggttgcagcaaccaaaagccagggatggttgtgcgagctgttacgctggaaagaagatccttctccagaaaacagaaccctgtgggagaacctctccatgatccgaaggttcctcagtcttcctcagccagaacgtgatgccatttatgaacaggagagcaacgcggtgcatcaccatggcgacaggccgccccacattatccatgttccagcagagcagattcagcaacagcagcagcaacagcaacagcagcagcagcagcagcaggcaccgccgcctccacagccacagcagcagccacagacaggccctcggctccccccacggcaacccacggtggcctctccagcagagtcagatgaggaaaaccgacagaagacccggccacgaacaaaaatttcagtggaagccttgggaatcctccagagtttcatacaagacgtgggcctgtaccctgacgaagaggccatccagactctgtctgcccagctcgaccttcccaagtacaccatcatcaagttctttcagaaccagcggtactatctcaagcaccacggcaaactgaaggacaattccggtttagaggtcgatgtggcagaatataaagaagaggagctgctgaaggatttggaagagagtgtccaagataaaaatactaacacccttttttcagtgaaactagaagaagagctgtcagtggaaggaaacacagacattaatactgatttgaaagactgagataaaagtatttgtttcgttcaacagtgccactggtatttactaacaaaatgaaaagtccaccttgtcttctctcagaaaacctttgttgttcattgtttggccaatgaatcttcaaaaacttgcacaaacagaaaagttggaaaaggataatacagactgcactaaatgttttcctctgttttacaaactgcttggcagccccaggtgaagcatcaaggattgtttggtattaaaatttgtgttcacgggatgcaccaaagtgtgtaccccgtaagcatgaaaccagtgttttttgttttttttttagttcttattccggagcctcaaacaagcattataccttctgtgattatgatttcctctcctataattatttctgtagcactccacactgatctttggaaacttgccccttatttaaaaaaaaaaaagaaaaaaaagagtttgttactctattgtatgttacaaaagaactatagactgtggaatgcagtttaaagatgacatatgccaacaaatgccttgtattatatggcactgccgtaattcaaatttgtttttattttggaaataaaagttcactgtacttttttttcattctcattgttacatgattttttaaaaaaaggaaaagaaaatgtgaaacacaatttagtcctcattatttatttgtagatcctgcagcatcatgttgtaattaattttttggaagtttccgttaaatgtaatattgcttctcttgttaccatactgattcttttctatttataaatgtattttgatgggcagtaaaacaaagtgtcttaaaagttttaaatagagaaaatgtgctttacacagttgcctataaaaagtgctctatgttatccaagcaattcatactataagcttcactcttattgttgtatgcaatttttactatcatgcaaataagcttaggtaaataaaactaatagatcaccttagaaaattatgcaattaatgtgaaaataattgatgtttgcaatgtgtcttcctttggtttacaatcaattttaaagctacatctgtataaaatttctgtataaaggtgtatttcttttttatgagtttatggctatgaaaacagctattttgttacagctggctgtttttataagtgtatcacaattttctttatgcagaaatgttctgactaggagtggttattgactgtaactacacaattaaaattgtttgtatcgtaaaaaaaaaaaaaaaaaa

SEQ ID NO: 12525 - DNA, 3798 bp, Homo sapiens
tgggagaccggacgcgcgcggcctccgccgctcccagtcccgccagacccgatgccgggctggagaagcgcgggggccgacgcacctcggataggcgggggcaggggcaggggcagctctcctttaccctagagcggcgacagaagctcttcgggggatcagtggccaagggggcggacagatttgcacggcggattcctccgaagcaacccgtgtgaaagaagccaagcggaggctgcagcccgggccgcgatgggggtgacaccgcccgtggtcccgccccttcccgtggcccctcggagccacttccggcggcagcgtccgggctagttcctggcgcgagcggccgcgggccagtttctatctcctcatccagggcttgcgggcgaggcctgttttaagtctccagtaaccgagcggaggcccggcaggcgcgacccgggctgcgtacgtcagagctgcctccgaagtggtaaaatgtgctgcgagaagtggagccgcgtggcggaaatgtttctcttcactgaggagcgggaggattgtaagatactgtgcctttgctccagggcatttgtggaggatcgaaaattgtacaatttgggattaaaaggctattacatcagagacagtggcaacaattcaggagaccaggcgacagaagaagaggaaggtggttattcctgtggtactgcagaatcacatgacagcaaaggcataggcctggatgaaagtgaacttgattctgaggctgaactcatgagaagtatgggattgccacttcaatttggtaggataactgcacataaggattttgaggtatctatgaatactagaaataaagttaaaataaaaaagaaaaaacatcaaaagaaatacttagatgaaattgtgcaagaatcttggagaaaagaatatgaagaagacgacattttggcttcagatgatccatcttcaattgaacagtatgagaacaccagaacatatgaacttcaaagcaaaaaagatactgagacagaaaatcctccagttgaaaacacattatctccaaagctagaaattacagagaaatgggaaaagtattggaatgaatatggaggaggactattgtggcaaagttggcaagaaaaacatccgggtcaagcactatcttctgaaccttggaactttcctgatacaaaggaagaatgggagcaacattatagtcaactttattggtattatttggaacaatttcagtattgggaagctcagggttggacttttgatgcctcgcaaagctgtgatacagatacttacacatctaaaacagaagctgatgacaagaacgatgaaaaatgcatgaaagttgacttagtatcttttccatcttcacctattatggttgataatgatagctctggtacaagtgataaggatcatagtgaaatacttgatggaattagtaacataaaactgaattcagaggaagtaacacagagccaattagattcctgtacaagtcatgatggtcatcaacagctaagtgaagttagtagcaaaagagagtgccctgcttccggccaaagtgaaccacgtaatggaggaaccaatgaggaaagcaactcatcggggaatacaaacacagacccaccagctgaggattcacagaagtcttcaggagcaaacacaagcaaagacagaccacatgccagtggtactgatggagatgaaagtgaggaagacccacctgagcataagccaagcaaactgaagaggagccatgaactggacattgatgaaaacccagcttcagactttgatgacagtggttcccttctaggattcaagtatggctcaggacaaaaatatggtggaatcccaaatttcagtcatcggcaggtcaggtatttagagaagaatgtgaagcttaagtctaagtacctagacatgcgcagacaaataaagatgaaaaacaaacacatcttctttaccaaagagtcagaaaaaccatttttcaagaaaagcaaaattctgagtaaggtagaaaaattcctcacatgggttaataaaccaatggatgaagaagcatcacaggaatcatcttctcatgacaatgtgcacgacgcttccacaagtagtgattcagaggaacaagacatgtctgttaaaaaaggtgatgacctactggagactaataatccagaacctgaaaagtgtcagagcgtatcttcagctggtgaacttgaaacagaaaactatgaaagagacagcttgctagcaactgttccagatgagcaggattgtgttactcaagaagtgccagactcccgccaggcagaaactgaagctgaagtgaaaaagaagaagaccaagaagaagaccaaaaaggtgaatggtctgcctcctgaaatagctgctgttcctgagctggcaaaatactgggcccagaggtacaggctcttctcccgttttgatgatgggattaagttggacagagagggctggttttcagttacacccgagaagattgctgaacacattgctggccgtgttagtcagtccttcaagtgtgacgttgtagtagacgcattctgtggagttggaggaaataccattcagtttgccttaacaggaatgagagtgattgccattgatatcgatcctgttaagattgcccttgctcgcaataatgcagaagtttatgggatagcagataagatagagttcatctgtggagatttcttgctgctggcttcttttttaaaggctgatgttgtgttcctcagcccaccttggggagggccagactatgccactgcagagacctttgacattagaacaatgatgtctcctgatggctttgaaattttcagactttctaagaagatcactaataatattgtttattttcttccaagaaatgctgatattgaccaggtggcatccttagctgggcctggagggcaagtggaaatagaacagaacttccttaacaacaaattgaagacaatcactgcatattttggtgacctaattcgaagaccagcctctgaaacctaactatgcagcagtgcgaggacaaaagatcatggagtggtcaaaatattcagatgagacatttggcatgtcttcctttattcactgatattttctacccatggtcttatatcaccgtatgaaatggaaacttacaggacttaaatatcagtgaaatattttgagatctttgaataattcctttagaggaattatacaaaattaatatatatgagtcctttgtaatttatttttttttgagacaggatctcacttttaccgcccaggctggagtgcagtgccatgatcacagctcactgcaggttcagccttctgagttcaagcaatccttctgtctcagtctcctcagtagctggggctttaggtgggcactgccacaccgtactaatttttgtattttttgtagagacgaggtcccaccatgttgcccaggctggtgtcaaactcctgggctcagtcagtccccccatctcaccctccccaagtgctggaattacaggcgtgagctactgtgcccagccttacggacatccttttgaattatctttttcactcatagaatatgaatacatttatttagactttttctagaactttcctgttttcatgtctttgcttcatctggaattggcttaacacccttttataaagtttgtgtttgtaaaatttccattgtgacatcaatacgcaatatattttgtaatataggagtttctatttttttattaaaatggcaatgaaagcaaaaaaaaaaaaaaaaaa

SEQ ID NO: 12526 - DNA, 6481 bp, Homo sapiens
tgcgagcccagcgtcaagtgattccggcctcctcgagtcagcggtggtgggatgaggctctgccgaggggactggctgtgaaggatgagttcagggtgggatgacggaccgcttctgggaccagtggtatctctggtatctccgcttgctccggctgctggatcgagggtcttttcggaatgatggtttgaaagcttctgatgtccttcctatcctaaaggaaaaggtggccttcgtgtctgggggtcgtgataagcgaggcggacccatcctgaccttccctgctcgcagcaatcatgacagaataagacaggaagacctgcggaaactcgtgacgtatttggccagcgtgccaagtgaggacgtgtgcaaacgtggcttcactgtcatcatcgacatgcggggctccaagtgggacctcatcaagcccctcctcaaaacgctgcaggaagcctttccagctgagatccatgtggccctcatcattaaacccgacaacttctggcagaaacagaagaccaactttggcagctccaaattcatctttgagacgagcatggtatctgtggagggcctcacaaagctggtggacccctcccagctgacggaggagtttgatggctccctggactacaaccatgaggagtggatcgaactgcggctctccctggaggagttcttcaacagcgccgtgcacctgctctcgcgcctcgaggacctccaggagatgctagcccggaaggagtttcctgtggatgtggagggctctcggcggctcattgacgaacacacacagctcaagaaaaaggtgctgaaggcccctgtggaggagctggaccgggaggggcagcggctgctgcagtgcatccgctgcagcgacggcttctcaggacgcaactgcatcccgggcagtgctgacttccagagcctggtgcccaagatcaccagtctcctggacaagctgcactccacccggcagcacctgcaccagatgtggcatgtgcgcaagctcaagctggaccagtgctttcagctgcggctcttcgagcaggatgctgagaagatgtttgactggataagccacaacaaggagttattcctccagagccacacggagatcggagtcagctaccagtacgcccttgacctccagacgcagcacaatcactttgccatgaactccatgaatgcctatgtcaacatcaaccgcatcatgtccgtggcttcccgcctctctgaggccggtcattatgcctcacaacaaatcaagcagatctccacccagctggaccaggagtggaagagcttcgctgctgccctggatgaacgcagcaccatcctcgccatgtctgctgtgttccaccagaaggctgagcagttcctgtcgggagtggatgcctggtgcaagatgtgcagtgaaggtggtctgccatccgagatgcaagacctagagctggcaatccaccaccaccagaccttgtatgagcaggtgacccaagcctacacagaggtcagccaggatggcaaagcactacttgatgtgctgcagcggcccctgagccctgggaactccgaatccctcacggccacagccaactactccaaggcagtgcaccaggtgctggacgtggtgcatgaggtgttacatcaccagcgacggctggagagcatctggcagcaccgcaaggtgcggctccaccagcggctgcagctctgcgtcttccagcaggatgtacagcaggtgttggactggattgaaaaccatggtgaggcctttctcagcaaacacactggagttgggaagtccctacatcgagcccgggccctgcagaagaggcatgatgactttgaagaggtggctcagaatacgtacaccaatgcggacaagctcctagaagcagcagagcagttggctcagacgggggaatgtgaccccgaggagatctacaaggcagctcgacacctggaggtgcgcatccaagacttcgtgcgcagggtggagcagcggaagcttctcctggacatgtctgtttccttccacacacacaccaaagagttgtggacatggatggaagaccttcagaaggagatgttggaggatgtctgtgcagattctgtggatgcagtccaggaactgatcaagcagttccagcagcagcagaccgccactctagatgccacactcaatgtcatcaaggaaggcgaagaccttatccagcagctcaggtcagcgcctccctccctcggggagcccagcgaggccagggactcggctgtgtccaacaacaaaacaccccacagcagctccatcagccacatcgagtcggtcctgcagcagcttgatgatgcccaggtgcagatggaggagctgttccacgagcggaagatcaagctggacatcttcctgcaactgcgcatctttgagcagtacaccatcgaggtgacagcagagctagacgcctggaatgaagacttgcttcggcagatgaatgacttcaacacagaggacctaaccctggcagaacagcggctgcagcgccacacagaacggaagctagccatgaacaacatgacctttgaggttatccagcagggacaggatctgcaccagtacatcacggaggtccaggcatcaggaattgagttgatctgtgaaaaagacattgatctggcagcccaggtgcaagagttattggaatttctccatgagaagcagcatgaattggagctcaatgcagagcagactcataagcggctagagcagtgcctccaattacgtcacctccaggctgaagtcaaacaggttctgggatggatccgcaatggagagtcaatgctcaacgccagcctggtcaatgccagctctttgtcggaagcagagcagctgcagcgggagcacgagcagttccaactggccatcgagtccctctttcatgccacttccttgcagaagacgcaccagagtgccctgcaggtacagcagaaagccgaggtgctgctccaggccggccactacgatgccgatgccatccgggaatgtgctgagaaggtggccctccactggcagcagctcatgctgaagatggaagaccggctaaaattggtcaatgcctctgtggccttttacaaaacttctgaacaggtgtgtagtgtcctggagagcttagagcaagaataccggagagatgaggactggtgtggtggacgagataagctggggccagcagcagagatcgaccatgtcattcccctcatcagcaaacatttggaacaaaaggaggcctttcttaaggcctgcaccctggctcggcggaatgctgaggtgtttctcaagtacatccacaggaacaacgtcagcatgcccagtgtcgccagccacactcggggacccgagcaacaagtgaaagccatcctgagtgagctcctgcagagggagaatcgcgtgctgcatttctggaccttgaagaagcggcggttagaccaatgccagcaatatgtggtgttcgagcgcagcgctaagcaggcgcttgactggatccaagaaacaggtgaattttacctctcaacacatacctccactggagagaccacagaggagactcaggaactgctgaaagaatatggggaattcagggtgcctgccaagcaaacaaaggagaaggtgaagcttctgattcagctggccgatagctttgtggaaaaaggccacattcatgccacggagataaggaaatgggtgaccacggtggacaagcactacagagatttctccctgaggatgggaaagtaccgatactcactggagaaagccctaggagtcaacacagaggataataaggacctggagctggatattatcccagcaagcctttcggatcgggaggtcaagctgcgggacgccaaccacgaagtcaatgaagagaagcggaagtcagcccggaagaaagaatttattatggctgaactactccagacagagaaggcttatgtaagggatttgcatgagtgcttagagacctacctgtgggaaatgaccagtggtgtggaggagatcccccctgggatcctcaataaagagcatatcatctttggcaacatccaagagatctacgatttccataacaacatcttcctcaaagagctggagaagtacgagcaactgcctgaggatgtgggacactgctttgttacctgggcagacaaatttcagatgtatgtcacctactgtaaaaacaagcctgattccaaccagcttatcctggagcatgcgggcaccttctttgatgagatacaacagcggcatggtctggccaactccatctcttcctacctaattaagcctgtccaaaggatcaccaaatatcaactgctcctgaaggaacttttaacttgctgtgaagaagggaaaggggagctcaaggatggcctggaggtgatgctcagtgtcccaaagaaagccaatgatgccatgcatgtcagcatgctggaagggttcgacgagaacctggatgtgcagggggagttgattctccaggatgcctttcaagtgtgggacccgaagtcgctgatccggaaggggcgggagcggcacttgttcctctttgagatctccttggtttttagcaaggagatcaaagattcttcaggacacacgaaatatgtttacaagaacaagctactgacctcagagctgggtgtgaccgagcacgtggagggcgatccctgcaaattcgccttgtggtctgggcgcaccccatcctcagacaataaaacagtgctgaaagcctccaacattgaaaccaagcaggagtggatcaagaacattcgagaagtgattcaagaaaggatcattcacctgaaaggagctttaaaggagccacttcagctccccaaaacaccagccaaacagaggaacaatagtaagagggatggagtggaggatattgacagccagggggatgggagcagccaaccagacaccatctccattgcttctaggacctctcagaacacagtggacagtgacaaggatggcaaccttgttcctcggtggcacctgggacctggagatcctttctccacttacgtttagcgcgcatcctgggacttgtccctgcagctcaccgggttagccgtggcaccgttgggacctcccaccaggactccaatcacccacctctcttgagacttctctggcagggctggtgtggggtgcagcctttgctcagagggcaacatgttccaagcaaaatctccccgcctgggccatgggctcaccctcggggctcccttcttctctactgggtgcaattcgaggttgctgagcttctctccaaagtctaaaatggtggggcagtagggacctgtgagaggcccaatggcccaatgtacttcccccagatcccactcagaacagcaggtacgcccaggctcctgctgccctagaggtctgcaacatgagtgaagaggttaattagagggacacacttatctctgaagtttttctccaggctgaacatttctattatcagtggcccctaatctggaaaaacccatcattctaatctagcttgtatccccacatcatgagaaagagggaagaagaagaagggatgatgtgtggtagagaagatgagggttaactttagcctttcccaaacactggcaacaaccacttcctcaacaatttttctatttgcttcagcctactcagattttttcaggtttttctagctcctccataacctcactccctcccgaggtctctggttcaaagaccaccctaccagcccctatttgcttcaggttatcctgttgagggtgggtgggaagagtgagaagatataaatgaaaaactggccacatgttgataattgttgaaactagatgatggtacgtggacattcattataccattctccccacttctgtatttgtttgcaatttttcataataaaaaagttttaaaagtcctccagtttccaacacactcaagagagagccccaaccccaaacacagagtttcatggaaaccccacaccaaggcaagaggcagagatgatgattccatttcatatatacactcattttctaactttttttaaaggcccactgctttattttcaatagattaaacctgatttctgagaggtcctgaagttgggcttatttccctggctgggttatgggggagggcagggtaaagggatccttaaaaaagtttacacttctatgtatctcacaatcttattgtgaggatgtgacttgttcagtgttctgaacttttcgaaggaatcgtgctctcaatgcaaagtgtcattctctggaattgcacctggctcaggaaaggactgtctttgtacttgaatttaaatccaatggagaactttaacacgggcatttgcatgactgagaattgctgctgtcttttttccgtatgtcactttcttgaatgtgttctaataaaatgattctaaagcag

SEQ ID NO: 12527 - DNA, 6740 bp, Homo sapiens
tgagccctcccttcttcctctcagttcctagagtccgaccgccgccgccgccgagagagaggagaaggagggggagtggccacagcaggtcctatctggtggtgagtggctgtcatgatctctacagcaccgctctacagcggcgtgcacaactggaccagttctgaccggattcgcatgtgtggcatcaacgaggagagaagagcacctctttctgatgaggagtcaacgacaggcgactgccagcactttggatctcaggagttttgtgtcagcagcagtttttccaaggtggagctcacggcagttggaagtggcagcaatgcccggggggcagacccagatggcagtgctacagaaaaacttgggcacaagtcagaagacaagcctgacgatccccagccaaaaatggactacgctgggaacgtggcagaggctgagggcttcttggtgcccctgagcagcccaggagacgggctcaagcttcccgcatctgacagcgccgaggccagcaacagcagggccgactgctcctggactccactcaacacccaaatgagcaaacaggttgactgctcacccgccggagtaaaggctttggactctcggcaaggtgttggagagaagaatactttcattttggcaactctgggaactggagtccctgtggaggggaccctgcccctggttaccactaacttcagtcctctgccagcccctatctgtccccctgctcccggttcggcctctgtgccccactctgttccagatgcattccaggttcccctctccgtccctgccccagtcccccattcagggcttgttccagtccaagttgccacttcggttccagctccttcccctcccttagcacctgtcccggctctggctccagcgccaccgtcagtgcccacgctcatctctgactcgaaccccctttctgtttcggcctcagtcttggtgcctgtgccagcttctgctcccccttcaggcccggttcccttgtcggctccagctcctgccccgctttcagtcccagtttcagctcctcccttggctctcatccaggctcctgtgcccccttcagctccgaccttggttctcgctcccgtccccactccggttctggctcccatgccagcatccacgcctccagcggcccctgcccctccgtctgtgcccatgcccactccaaccccatcttccggcccaccttctacccccaccctcatccccgcctttgctcctacaccggtgcctgcacccaccccagcccccatctttactccagcccctacacccatgcctgctgccacgccagctgccattcccacctctgcacccatcccggcctccttcagtttgagtagagtgtgctttcctgcagctcaggcaccagctatgcaaaaagtccccctgtcctttcagccagggacagtgctgaccccgagccagccgctggtatatatcccgcctccaagctgtgggcagccactcagtgtggccacactgccaaccactctaggggtttcctccactcttacgctccctgtcctgccgtcctacctgcaggacaggtgtctcccaggcgtgctagcctcccccgagctccgttcttacccgtatgcattttctgtggcccggcctctgacttcggattccaagctggtatctctggaggtgaacaggctcccctgcacttccccatccggtagcaccaccacccagcctgcacccgatggggtccctgggcctttggcagatacctcccttgttactgcttctgccaaggtgcttccaactccacagcctctgctgccagcccccagtgggagctcagccccaccgcaccccgccaagatgcccagtggcaccgagcagcaaacagaagggacttccgttaccttctctcctcttaagtcaccgccacagctggaacgagagatggcctctccacctgagtgcagcgagatgccccttgatctgtcctccaagtccaaccgccagaagcttccattgccgaaccagcgcaagacaccccccatgcctgtgttgacccccgtgcacaccagcagcaaggccctcctctccacagtcctgtctaggtctcagcgcacaacccaggctgccggtggcaatgtcacctcctgcctgggctccacttcctcgccctttgtcatctttcccgagatcgtgaggaatggggacccgagcacctgggtgaagaactcaactgcactgatcagcaccattcctggcacctacgtgggagtggccaacccagtgcctgcatccctgctgctgaacaaagaccccaacctgggcctcaaccgtgacccccgccatctccccaagcaggagcccatctccatcattgatcaaggagagcctaagggcactggtgccacgtgtggcaaaaagggcagccaggctggtgctgagggacagccaagcacagtgaaacgatatactccagcccgcattgcccctgggctgccagggtgccaaaccaaggaactctctttgtggaaacccacggggccggcaaatatttatccccggtgttcagtcaatgggaaacctaccagcacccaggtcctgcctgttggctggtccccgtaccaccaggcgtctctgctttccattggcatttccagtgccgggcagctgacccccagtcagggggcgcccatcaggcccaccagcgttgtttcggagttttctggtgtgccatctctcagctccagcgaagccgtgcacggacttcctgaggggcaaccacggcctgggggctccttcgttccagagcaggaccctgttacaaagaacaaaacttgccggattgctgccaagccttatgaagaacaagtcaatcctgtcctcttgaccctcagccctcagactgggaccctggcactgtctgttcagcctagcggtggggacattcgaatgaatcaggggcctgaggaatcagagagccacctctgctctgacagcactcctaagatggaaggcccccagggggcttgtggcctgaagctggcaggagacacgaagcctaagaaccaagtgctggccacctacatgtcccatgagctggtcctggccaccccccagaacctgcctaagatgcctgagctgcctttgctacctcacgacagccaccccaaggaacttatattggacgtggttccgagcagcaggaggggctccagcacagagcgcccacagcttggaagccaggtggatctggggcgagtgaaaatggagaaggtggatggtgatgtggtcttcaatttagccacctgcttccgggctgatggcctcccagtggctccccagaggggccaagctgaagttcgggctaaggccgggcaggctcgagtgaaacaggaaagcgtaggggtctttgcttgcaagaacaagtggcagccagatgatgtgacggaatctctgccgcccaagaagatgaagtgcggcaaagagaaggacagtgaagagcagcagctccagccacaagccaaggccgtggtccggagttcccacagacccaagtgccggaagctgcccagtgacccccaggaatccaccaagaaaagccccaggggggcttcagattcaggaaaagagcacaatggagtcaggggaaagcacaagcaccggaagccgacaaagccggagtcccagtctccaggaaaacgagccgacagccacgaggaaggttccttggaaaagaaagcaaagagcagtttccgtgactttattcctgtggttctgagcacccgcacgcgcagtcagtctggaagcatctgtagctcctttgctggcatggcagacagtgacatgggaagccaggaagtcttccccacagaagaagaagaggaggtaacccccaccccagctaagcgtcgaaaggtgagaaagacccaacgggacacccagtatcgcagccaccatgcccaggacaagtctctgctgagccagggccgaaggcacctgtggcgagcccgagaaatgccctggaggacagaggctgcccggcaaatgtgggacaccaatgaggaggaggaggaagaagaggaggagggcctgctgaagaggaagaaacgaagacggcagaagagccgaaaatatcagactggggagtacctgacagagcaagaagacgagcagcggcggaaagggagagcagatttaaaggcccgtaagcagaagacttcctcctcccaaagtttggagcaccgcctcaggaacaggaaccttctcttgcccaacaaagtccaggggatctcggattcaccaaacggtttcctcccaaataacctggaagagccagcctgccttgaaaattcagaaaagccatcaggaaaacgaaagtgcaagaccaagcacatggcaaccgtctcagaagaggcaaaggatgttgttctctactgcctccagaaagacagtgaagatgtgaatcaccgtgacaatgctggctacacagccctgcatgaggcttgttcccggggctggaccgacatcctgaacatcctgctggagcacggggccaacgtgaactgcagtgcgcaggacggcacgaggccagttcatgatgcggtggtcaatgacaacctggagaccatctggctcctgctgtcctatggggccgatcccacactggctacctactcgggtcagacagccatgaagctggccagcagcgacaccatgaagcgctttctcagtgatcacctctcggatcttcagggccgggcagagggtgatcccggtgtatcctgggatttttacagcagttctgtgttggaggaaaaagacgggtttgcctgtgacctcctacataatcctcctgggagctcagatcaagaaggagacgatccgatggaggaggatgatttcatgtttgaactctcagacaagcctcttctcccttgctacaacctccaagtgtcagtgtcccgcgggccctgcaactggttcctcttttccgatgtcttgaagaggctgaagctttcctcgaggatctttcaggcccggttcccgcactttgaaatcaccaccatgcccaaggccgagttctacaggcaggtggcctccagtcagctgctgacccctgccgagaggcctggaggcttggacgacagatcccccccaggctcctctgagactgtggagctggtgcggtacgagccagacctacttcggctcctagggtccgaggtggaattccagtcttgcaacagttgaccgggaaaacagcccctcctcttctttctccttccgagttcgcccttcccccacctccttgtctttccccgaccgagcaccagactgcagaatgaggcaataatacggaccaacaagaagccgccttatcaatgccagcattagcgactggactgtttttgtttttttggttacaattagttctcatctccctgtcgtcgtcattgttatcgtggttgctgatgggggtggaaagttgaactccatgtctgaggacaagaggtcccgggggtggtgggaggtggcgccggggtcccttggactggcctccttgttcatgaccaagaccaaacctgggccctggatggccttggcctgtcccgaggagaaatgagaaaatcccagatctctgagcgccccccaactccattcccctgtgttcttctgtcttctgtagtatttattttattagtatttaatttgtattgtttcattggtttctgataagtctgtatcactgtgacgatttgagacaacttgttgtattgagggactttctgtacctccttttctttttctttgttgatgagctctgacaaagctattccctggtgtttttttcccccactggggagggggtgaggtggaatggggtgggggaacatggacttgtgactaacgaagctggttgctgctggcccagggctgggggcttgggggtaaatcctgaggctttggtgctcccccacccacccattcccgccctttgcagcagccccgctatcttgagattagtgttgacagggaggggaggattgtgaggtgaggggttaataagttactctaataaaggagcgtggagaagggatctgaggggtgagggtggcccccctcctcacgccttcttcactgcccccctcagagtgcacaatacgagtttgttcctgcctccactctcccaccccgttctggcctccctgtctcaagatactgagcctctcacctcccagccctcagccacccccatccctgccccttctgagactcacagcacccctttccttcctctcctcccacctcctccctcagcccctcattctccttgggaatctgcagagggctctgggactcactgccggatgtgaaatccaggcgtcagctgtttcctaggcaagggcaggaaagtggtctccagcccttgctccactcatgcctgggggcctggggctgagtggtatccctacctggcctccccctggcctctgggcctccagcgctgggtttgtcgagtgagagagagagaggagcttgggttgcttccctgtccccgccccctctgtggcattgtccctcccactcttatttttctaccaattgctatttttccgaacaatccttgtagagtatgtaccatccaaaggcaggagggcctcgccgtggccggctctggttggagatggtacagttttattgtacaggtgctaaaacaacaacaacaaaaaagaaaatgg

SEQ ID NO: 12528 - DNA, 2286 bp, Homo sapiens
gttcctcacccccgcttcgccctcacactttcgggatgtctgcgattcctgctgaggagagcgaccagctgctgatccgaccccttggagctgggcaagaagtaggaagatcatgtattattctcgagttcaaaggaagaaaaataatgctcgactgtgggatccaccctggcctagaaggaatggatgctcttccttatattgatttaattgacccagctgagattgatctcctattaattagtcatttccatttggatcactgtggagctctgccctggtttctacagaagacaagtttcaaaggaagaacatttatgactcatgccacaaaagctatttatagatggcttctttctgattatgtcaaagttagtaacatatcagcagacgacatgctgtataccgagacagatttggaagaaagcatggacaaaattgaaactatcaactttcatgaagttaaggaagttgcgggaatcaagttttggtgttaccatgcaggtcacgtcctaggagccgccatgttcatgattgagatcgcaggcgtgaagcttttgtacactggtgatttctcaagacaagaagataggcacttaatggcagctgaaattcctaatattaagcctgatattcttatcattgaatctacttatgggacccatatccatgagaaacgtgaagagcgagaagcaagattctgtaacactgtccacgatattgtaaacagaggaggcaggggtctcattcctgtctttgctcttggaagggctcaggagctgctcttgattctagatgagtactggcagaatcacccagaactacatgacattccaatatactatgcatcatctttggccaagaagtgtatggcagtgtaccagacatatgtaaatgccatgaatgacaaaatccgcaaacagatcaacatcaataatccctttgttttcaaacacattagtaacctcaagagcatggatcattttgatgacattggtcccagtgttgtaatggcctccccaggcatgatgcaaagtggcttatccagagaattatttgaaagctggtgtactgataagaggaatggtgtcattatagcgggatactgtgtagaagggacacttgccaagcacatcatgtctgaacctgaagaaatcactactatgtctggacagaagttaccactgaaaatgtctgttgattacatttctttctcagctcacacggattaccagcaaaccagtgaatttattcgtgctttgaaaccgcctcatgtgattttagtccatggagaacagaatgaaatggccagattgaaagcagcactgattcgagaatatgaagataacgatgaagttcacatagaggttcataatcctcggaatacagaagcagtgaccttaaacttcagaggagaaaaactagccaaggttatgggatttttagcagacaaaaaaccagaacaaggccagcgggtctcaggaatacttgttaaaagaaactttaattatcacatactttctccttgcgacctgtccaattatactgacctggccatgagcacggtgaagcagacccaagccattccatatactggtccctttaatttgctctgttaccagctgcagaaattgacaggtgatgtggaagaattagaaattcaagaaaaacctgctctgaaagtgttcaaaaatattactgtaatacaagaaccaggcatggtggtattagaatggctggcaaacccttctaatgatatgtatgcagatacagtaacaactgtgatattggaagttcagtcaaatcccaaaataagaaaaggtgcagtacagaaggtttctaaaaaattagaaatgcacgtttacagcaagaggttggagatcatgctccaggacatatttggagaagactgtgtaagtgtaaaggatgactctattcttagcgtcacagtggacgggaaaactgccaaccttaacttggagacacggactgtagaatgtgaagagggaagtgaagacgatgaatccctccgagaaatggtggagctggctgcacagagactgtacgaggccctgacgccagttcactgagactgtgcctgtatatgaactttgaaaaaatacttgactctacttttgttacctaaaataaaatgcattcgtttctctgggaaaaaaaaaaaaaaaaaaaaaaaaaaaaaaaaaaaaaaaaaaaaaaaaaaaaaaaaaaaaaaaaaaaaaaaaaaaaaaaaaaaaaaaaaaaaaaaaaaaaaaaaaaaaaaaaaaa

SEQ ID NO: 12529 - DNA, 2812 bp, Homo sapiens
ctaaaagagtggatcatgacccatgaagagcaccatgcagccaaaaccctggggattggcaaagccattgctgtcttaacctctggtggagatgcccaaggtatgaatgctgctgtcagggctgtggttcgagttggtatcttcaccggtgcccgtgtcttctttgtccatgagggttatcaaggcctggtggatggtggagatcacatcaaggaagccacctgggagagcgtttcgatgatgcttcagctgggaggcacggtgattggaagtgcccggtgcaaggactttcgggaacgagaaggacgactccgagctgcctacaacctggtgaagcgtgggatcaccaatctctgtgtcattgggggtgatggcagcctcactggggctgacaccttccgttctgagtggagtgacttgttgagtgacctccagaaagcaggtaagatcacagatgaggaggctacgaagtccagctacctgaacattgtgggcctggttgggtcaattgacaatgacttctgtggcaccgatatgaccattggcactgactctgccctgcatcggatcatggaaattgtagatgccatcactaccactgcccagagccaccagaggacatttgtgttagaagtaatgggccgccactgtggatacctggcccttgtcacctctctgtcctgtggggccgactgggtttttattcctgaatgtccaccagatgacgactgggaggaacacctttgtcgccgactcagcgagacaaggacccgtggttctcgtctcaacatcatcattgtggctgagggtgcaattgacaagaatggaaaaccaatcacctcagaagacatcaagaatctggtggttaagcgtctgggatatgacacccgggttactgtcttggggcatgtgcagaggggtgggacgccatcagcctttgacagaattctgggcagcaggatgggtgtggaagcagtgatggcacttttggaggggaccccagataccccagcctgtgtagtgagcctctctggtaaccaggctgtgcgcctgcccctcatggaatgtgtccaggtgaccaaagatgtgaccaaggccatggatgagaagaaatttgacgaagccctgaagctgagaggccggagcttcatgaacaactgggaggtgtacaagcttctagctcatgtcagacccccggtatctaagagtggttcgcacacagtggctgtgatgaacgtgggggctccggctgcaggcatgaatgctgctgttcgctccactgtgaggattggccttatccagggcaaccgagtgctcgttgtccatgatggtttcgagggcctggccaaggggcagatagaggaagctggctggagctatgttgggggctggactggccaaggtggctctaaacttgggactaaaaggactctacccaagaagagctttgaacagatcagtgccaatataactaagtttaacattcagggccttgtcatcattgggggctttgaggcttacacagggggcctggaactgatggagggcaggaagcagtttgatgagctctgcatcccatttgtggtcattcctgctacagtctccaacaatgtccctggctcagacttcagcgttggggctgacacagcactcaatactatctgcacaacctgtgaccgcatcaagcagtcagcagctggcaccaagcgtcgggtgtttatcattgagactatgggtggctactgtggctacctggctaccatggctggactggcagctggggccgatgctgcctacatttttgaggagcccttcaccattcgagacctgcaggcaaatgttgaacatctggtgcaaaagatgaaaacaactgtgaaaaggggcttggtgttaaggaatgaaaagtgcaatgagaactataccactgacttcattttcaacctgtactctgaggaggggaagggcatcttcgacagcaggaagaatgtgcttggtcacatgcagcagggtgggagcccaaccccatttgataggaattttgccactaagatgggcgccaaggctatgaactggatgtctgggaaaatcaaagagagttaccgtaatgggcggatctttgccaatactccagattcgggctgtgttctggggatgcgtaagagggctctggtcttccaaccagtggctgagctgaaggaccagacagattttgagcatcgaatccccaaggaacagtggtggctgaaactgaggcccatcctcaaaatcctagccaagtacgagattgacttggacacttcagaccatgcccacctggagcacatcacccggaagcggtccggggaagctgccgtctaaacctctctggagtgaggggaatagattacctgatcatggtcagctcacaccctaataagtccacatcttctcagtgttttagctgtttttttcattaggtttccttttattctgtaccttgcagccatgaccagttctggccaggagctggaggagcaggcagtgggtgggagctccttttaggtagaatttaacatgacttctgccccagctttatctgtcacacaaggctgggcacctctagtgctactgctagatatcacttactcagttagaattttcctaaaaataagctttatttatttctttgtgataacaaagagtcttggttcctctactacttttactacagtgacaaattgtaactacactaataaatgccaactggtcactgtgaaaaaaaaaaaaaaaaaaaaaaaaaaaaaaaaaaaaaaaaaaaaaaaaaaaaaaaaaa

SEQ ID NO: 12530 - DNA, 8595 bp, Homo sapiens
aaagcggagagtcacagcggggccaggccctggggagcggagcctccaccgcccccctcattcccaggcaagggcttggggggaatgagccgggagagccgggtcccgagcctacagagccgggagcagctgagccgccggcgcctcggccgccgccgccgcctcctcctcctccgccgccgccagcccggagcctgagccggcggggcgggggggagaggagcgagcgcagcgcagcagcggagccccgcgaggcccgcccgggcgggtggggagggcagcccgggggactgggccccggggcggggtgggagggggggagaagacgaagacagggccgggtctctccgcggacgagacagcggggatcatggccgcgcaggtcgcccccgccgccgccagcagcctgggcaacccgccgccgccgccgccctcggagctgaagaaagccgagcagcagcagcgggaggaggcggggggcgaggcggcggcggcggcagcggccgagcgcggggaaatgaaggcagccgccgggcaggaaagcgagggccccgccgtggggccgccgcagccgctgggaaaggagctgcaggacggggccgagagcaatgggggtggcggcggcggcggagccggcagcggcggcgggcccggcgcggagccggacctgaagaactcgaacgggaacgcgggccctaggcccgccctgaacaataacctcacggagccgcccggcggcggcggtggcggcagcagcgatggggtgggggcgcctcctcactcagccgcggccgccttgccgcccccagcctacggcttcgggcaaccctacggccggagcccgtctgccgtcgccgccgccgcggccgccgtcttccaccaacaacatggcggacaacaaagccctggcctggcagcgctgcagagcggcggcggcgggggcctggagccctacgcggggccccagcagaactctcacgaccacggcttccccaaccaccagtacaactcctactaccccaaccgcagcgcctaccccccgcccgccccggcctacgcgctgagctccccgagaggtggcactccgggctccggcgcggcggcggctgccggctccaagccgcctccctcctccagcgcctccgcctcctcgtcgtcttcgtccttcgctcagcagcgcttcggggccatggggggaggcggcccctccgcggccggcgggggaactccccagcccaccgccacccccaccctcaaccaactgctcacgtcgcccagctcggcccggggctaccagggctaccccgggggcgactacagtggcgggccccaggacgggggcgccggcaagggcccggcggacatggcctcgcagtgttggggggctgcggcggcggcagctgcggcggcggccgcctcgggaggggcccaacaaaggagccaccacgcgcccatgagccccgggagcagcggcggcggggggcagccgctcgcccggacccctcagccatccagtccaatggatcagatgggcaagatgagacctcagccatatggcgggactaacccatactcgcagcaacagggacctccgtcaggaccgcagcaaggacatgggtacccagggcagccatacgggtcccagaccccgcagcggtacccgatgaccatgcagggccgggcgcagagtgccatgggcggcctctcttatacacagcagattcctccttatggacaacaaggccccagcgggtatggtcaacagggccagactccatattacaaccagcaaagtcctcaccctcagcagcagcagccaccctactcccagcaaccaccgtcccagacccctcatgcccaaccttcgtatcagcagcagccacagtctcaaccaccacagctccagtcctctcagcctccatactcccagcagccatcccagcctccacatcagcagtccccggctccatacccctcccagcagtcgacgacacagcagcacccccagagccagcccccctactcacagccacaggctcagtctccttaccagcagcagcaacctcagcagccagcaccctcgacgctctcccagcaggctgcgtatcctcagccccagtctcagcagtcccagcaaactgcctattcccagcagcgcttccctccaccgcaggagctatctcaagattcatttgggtctcaggcatcctcagccccctcaatgacctccagtaagggagggcaagaagatatgaacctgagccttcagtcaagaccctccagcttgcctgatctatctggttcaatagatgacctccccatggggacagaaggagctctgagtcctggagtgagcacatcagggatttccagcagccaaggagagcagagtaatccagctcagtctcctttctctcctcatacctcccctcacctgcctggcatccgaggcccttccccgtcccctgttggctctcccgccagtgttgctcagtctcgctcaggaccactctcgcctgctgcagtgccaggcaaccagatgccacctcggccacccagtggccagtcggacagcatcatgcatccttccatgaaccaatcaagcattgcccaagatcgaggttatatgcagaggaacccccagatgccccagtacagttccccccagcccggctcagccttatctccgcgtcagccttccggaggacagatacacacaggcatgggctcctaccagcagaactccatggggagctatggtccccaggggggtcagtatggcccacaaggtggctaccccaggcagccaaactataatgccttgcccaatgccaactaccccagtgcaggcatggctggaggcataaaccccatgggtgccggaggtcaaatgcatggacagcctggcatcccaccttatggcacactccctccagggaggatgagtcacgcctccatgggcaaccggccttatggccctaacatggccaatatgccacctcaggttgggtcagggatgtgtcccccaccagggggcatgaaccggaaaacccaagaaactgctgtcgccatgcatgttgctgccaactctatccaaaacaggccgccaggctaccccaatatgaatcaagggggcatgatgggaactggacctccttatggacaagggattaatagtatggctggcatgatcaaccctcagggacccccatattccatgggtggaaccatggccaacaattctgcagggatggcagccagcccagagatgatgggccttggggatgtaaagttaactccagccaccaaaatgaacaacaaggcagatgggacacccaagacagaatccaaatccaagaaatccagttcttctactacaaccaatgagaagatcaccaagttgtatgagctgggtggtgagcctgagaggaagatgtgggtggaccgttatctggccttcactgaggagaaggccatgggcatgacaaatctgcctgctgtgggtaggaaacctctggacctctatcgcctctatgtgtctgtgaaggagattggtggattgactcaggtcaacaagaacaaaaaatggcgggaacttgcaaccaacctcaatgtgggcacatcaagcagtgctgccagctccttgaaaaagcagtatatccagtgtctctatgcctttgaatgcaagattgaacggggagaagaccctcccccagacatctttgcagctgctgattccaagaagtcccagcccaagatccagcctccctctcctgcgggatcaggatctatgcaggggccccagactccccagtcaaccagcagttccatggcagaaggaggagacttaaagccaccaactccagcatccacaccacacagtcagatccccccattgccaggcatgagcaggagcaattcagttgggatccaggatgcctttaatgatggaagtgactccacattccagaagcggaattccatgactccaaaccctgggtatcagcccagtatgaatacctctgacatgatggggcgcatgtcctatgagccaaataaggatccttatggcagcatgaggaaagctccagggagtgatcccttcatgtcctcagggcagggccccaacggcgggatgggtgacccctacagtcgtgctgccggccctgggctaggaaatgtggcgatgggaccacgacagcactatccctatggaggtccttatgacagagtgaggacggagcctggaatagggcctgagggaaacatgagcactggggccccacagccgaatctcatgccttccaacccagactcggggatgtattctcctagccgctaccccccgcagcagcagcagcagcagcagcaacgacatgattcctatggcaatcagttctccacccaaggcaccccttctggcagccccttccccagccagcagactacaatgtatcaacagcaacagcagaattacaagcggccaatggatggcacatatggccctcctgccaagcggcacgaaggggagatgtacagcgtgccatacagcactgggcaggggcagcctcagcagcagcagttgcccccagcccagccccagcctgccagccagcaacaagctgcccagccttcccctcagcaagatgtatacaaccagtatggcaatgcctatcctgccactgccacagctgctactgagcgccgaccagcaggcggcccccagaaccaatttccattccagtttggccgagaccgtgtctctgcaccccctggcaccaatgcccagcaaaacatgccaccacaaatgatgggcggccccatacaggcatcagctgaggttgctcagcaaggcaccatgtggcaggggcgtaatgacatgacctataattatgccaacaggcagagcacgggctctgccccccagggccccgcctatcatggcgtgaaccgaacagatgaaatgctgcacacagatcagagggccaaccacgaaggctcgtggccttcccatggcacacgccagcccccatatggtccctctgcccctgtgccccccatgacaaggccccctccatctaactaccagcccccaccaagcatgcagaatcacattcctcaggtatccagccctgctcccctgccccggccaatggagaaccgcacctctcctagcaagtctccattcctgcactctgggatgaaaatgcagaaggcaggtcccccagtacctgcctcgcacatagcacctgcccctgtgcagccccccatgattcggcgggatatcaccttcccacctggctctgttgaagccacacagcctgtgttgaagcagaggaggcggctcacaatgaaagacattggaaccccggaggcatggcgggtaatgatgtccctcaagtctggtctcctggcagagagcacatgggcattagataccatcaacatcctgctgtatgatgacaacagcatcatgaccttcaacctcagtcagctcccagggttgctagagctccttgtagaatatttccgacgatgcctgattgagatctttggcattttaaaggagtatgaggtgggtgacccaggacagagaacgctactggatcctgggaggttcagcaaggtgtctagtccagctcccatggagggtggggaagaagaagaagaacttctaggtcctaaactagaagaggaagaagaagaggaagtagttgaaaatgatgaggagatagccttttcaggcaaggacaagccagcttcagagaatagtgaggagaagctgatcagtaagtttgacaagcttccagtaaagatcgtacagaagaatgatccatttgtggtggactgctcagataagcttgggcgtgtgcaggagtttgacagtggcctgctgcactggcggattggtgggggggacaccactgagcatatccagacccacttcgagagcaagacagagctgctgccttcccggcctcacgcaccctgcccaccagcccctcggaagcatgtgacaacagcagagggtacaccagggacaacagaccaggaggggcccccacctgatggacctccagaaaaacggatcacagccactatggatgacatgttgtctactcggtctagcaccttgaccgaggatggagctaagagttcagaggccatcaaggagagcagcaagtttccatttggcattagcccagcacagagccaccggaacatcaagatcctagaggacgaaccccacagtaaggatgagaccccactgtgtacccttctggactggcaggattctcttgccaagcgctgcgtctgtgtgtccaataccattcgaagcctgtcatttgtgccaggcaatgactttgagatgtccaaacacccagggctgctgctcatcctgggcaagctgatcctgctgcaccacaagcacccagaacggaagcaggcaccactaacttatgaaaaggaggaggaacaggaccaaggggtgagctgcaacaaagtggagtggtggtgggactgcttggagatgctccgggaaaacaccttggttacactcgccaacatctcggggcagttggacctatctccataccccgagagcatttgcctgcctgtcctggacggactcctacactgggcagtttgcccttcagctgaagcccaggaccccttttccaccctgggccccaatgccgtcctttccccgcagagactggtcttggaaaccctcagcaaactcagcatccaggacaacaatgtggacctgattctggccacaccccccttcagccgcctggagaagttgtatagcactatggtgcgcttcctcagtgaccgaaagaacccggtgtgccgggagatggctgtggtactgctggccaacctggctcagggggacagcctggcagctcgtgccattgcagtgcagaagggcagtatcggcaacctcctgggcttcctagaggacagccttgccgccacacagttccagcagagccaggccagcctcctccacatgcagaacccaccctttgagccaactagtgtggacatgatgcggcgggctgcccgcgcgctgcttgccttggccaaggtggacgagaaccactcagagtttactctgtacgaatcacggctgttggacatctcggtatcaccgttgatgaactcattggtttcacaagtcatttgtgatgtactgtttttgattggccagtcatgacagccgtgggacacctcccccccccgtgtgtgtgtgcgtgtgtggagaacttagaaactgactgttgccctttatttatgcaaaaccacctcagaatccagtttaccctgtgctgtccagcttctcccttgggaaaaagtctctcctgtttctctctcctccttccacctcccctccctccatcacctcacgcctttctgttccttgtcctcaccttactcccctcaggaccctaccccaccctctttgaaaagacaaagctctgcctacatagaagactttttttattttaaccaaagttactgttgtttacagtgagtttggggaaaaaaaataaaataaaaatggctttcccagtccttgctggctttcccagtccttgcatcaacgggatgccacatttcataactgtttttaatggtaaaaaaaaaaaaaaaaaatacaaaaaaaaattctgaaggacaaaaaaggtgactgctgaactgtgtgtggtttattgttgtacattcacaatcttgcaggagccaagaagttcgcagttgtgaacagaccctgttcactggagaggcctgtgcagtagagtgtagaccctttcatgtactgtactgtacacctgatactgtaaacatactgtaataataatgtctcacatggaaacagaaaacgctgggtcagcagcaagctgtagtttttaaaaatgtttttagttaaacgttgaggagaaaaaaaaaaaaggcttttcccccaaagtatcatgtgtgaacctacaacaccctgacctctttctctcctccttgattgtatgaataaccctgagatcacctcttagaactggttttaacctttagctgcagcggctacgctgccacgtgtgtatatatatgacgttgtacattgcacatacccttggatccccacagtttggtcctcctcccagctacccctttatagtatgacgagttaacaagttggtgacctgcacaaagcgagacacagctatttaatctcttgccagatatcgcccctcttggtgcgatgctgtacaggtctctgtaaaaagtccttgctgtctcagcagccaatcaacttatagtttatttttttctgggtttttgttttgttttgttttctttctaatcgaggtgtgaaaaagttctaggttcagttgaagttctgatgaagaaacacaattgagattttttcagtgataaaatctgcatatttgtatttcaacaatgtagctaaaacttgatgtaaattcctcctttttttccttttttggcttaatgaatatcatttattcagtatgaaatctttatactatatgttccacgtgttaagaataaatgtacattaaatcttggtaa

SEQ ID NO: 12531 - DNA, 3171 bp, Homo sapiens
gggacagcttagggactatcgtcctgggactagggggaagttcgcgactttctgaagactggcaggaatgtgcctcctggccctcgatgcttcccccctgaggggaggcatcgtgagggactgtggcaggcttcactgaacgctgagccggggaggtccaactccacgtatggatccggggaatgagaattcagccacagaaggccgccgcgatcatagacctagatcccgacttcgaaccccagagccgtccccgctcctgcacctggccccttccccgaccagagatcgctaaccagccgtccgagccgcccgaggtggagccagatctgggggaaaaggtacacacggaggggcgctcagagccgatcctgttgccctctcggctctcagagccggccgggggcccccagcccggaatcctgggggctgtaacaggtcctcggaagggaggctcccgccggaatgcctggggaaatcagtcatatgcagaattcatcagccaggccattgaaagcgccccggagaagcgactgacacttgcccagatttacgagtggatggtccgtactgtaccctacttcaaggacaagggtgacagcaacagctcagcaggatggaagaactcgatccgccacaacctgtccctgcacagcaagttcatcaaggttcacaacgaggccaccggcaaaagctcttggtggatgctgaaccctgagggaggcaagagcggcaaagccccccgccgccgggccgcctccatggatagcagcagcaagctgctccggggccgcagtaaagcccccaagaagaaaccatctgtgctgccagctccacccgaaggtgccactccaacgagccctgtcggccactttgccaagtggtcaggcagcccttgctctcgaaaccgtgaagaagccgatatgtggaccaccttccgtccacgaagcagttcaaatgccagcagtgtcagcacccggctgtcccccttgaggccagagtctgaggtgctggcggaggaaataccagcttcagtcagcagttatgcagggggtgtccctcccaccctcaatgaaggtctagagctgttagatgggctcaatctcacctcttcccattccctgctatctcggagtggtctctctggcttctctttgcagcatcctggggttaccggccccttacacacctacagcagctcccttttcagcccagcagaggggcccctgtcagcaggagaagggtgcttctccagctcccaggctctggaggccctgctcacctctgatacgccaccaccccctgctgacgtcctcatgacccaggtagatcccattctgtcccaggctccgactcttctgttgctgggggggcttccttcctccagtaagctggccacgggcgtcggcctgtgtcccaagcccctagaggctcgaggccccagcagtctggttcccaccctttctatgatagcaccacctccagtcatggcaagtgcccccatccccaaggctctggggactcctgtgctcacaccccctactgaagctgcaagccaagacagaatgcctcaggatctagatcttgatatgtatatggagaacctggagtgtgacatggataacatcatcagtgacctcatggatgagggcgagggactggacttcaactttgagccagatccctgagtcatgcctggaagctttgtcccctgcttcagatgtggagccaggcgtgttcatatctactctttacccttgagccctccccaggaatttgggaccctgctttagagctagggtggggtctggtcacacacaggtgttgaagaaattataaagataaagctgccccatctggggacgatatggggagggagatgggaggggaaaggggagagggtttttctcactgtgccaattagggggtaaggccccctctcaggagccatcatcggctttccccattcctacccacttaggctttgtagcaagatgagcaatgctgttggaaatgtgaagtcaccagtggccttacccctgcctttgggagcaggatttttttgtagagagtcttatctgagctgagccaggctagctggagcctgggatttctatgcagtggccccttaggccagtgatgtgcggtgggtgggctgtttaggggatctggaagggccaaggtctgagcactggagtggctcgccaggccaaatcacccttagaaggctgcagataacagaaaggctttttataaacttttaaagaaatataaacacaaatatagagattttttaaccatggcagggtgctagtggtgggcagaatgcttttttttctttctgaaggctttgtgatagtgacatgatacaaacactacagacaataaatattaggagacacagggaagtggggagaggtggggagtaatagtaaacacagggaagagctcccctacggaccaggtatagagaaaggtctatgcagaaataggttagagtttccctaacaaaaaagctaacccaggtcccctcattccttcaacttgtgcctgggagtgtgtggtgttagggtgcagccacactcttctatgacccagcatgggttagtgctatggtgggagagtacattgaaggcctggaattagcttggggccagggaagggactgggaggggagagaagagaaggagggaaggatttaggatggtaaagttaggtacagagacctccctgttcaaggcccctgacagctgtccctgcccttcttccccttccctgactgcaggggttatgtggaagtgtgtgtggcagcaggcagcggggaggggaggaacagggaagggggagctggggagcttggctgagggtctgggaaatgagcagggatggggggggatgtggatcaggtttactagcacctgccagggaggccatctggggctccttctccaccccagcccccaaagcagcccttcccccagtgccctttgcatcgtcccctcccccacccctgctgtgggttcccatcatttcctgtgtcagcgcctggcctacccagattgtatcatgtgctagattggagtggggaagtgtgtcaaatcaataaatgaataaattcaataaatgcctataaccagcagaaaaaaaaaaaaaaaaaaaaaaaaaaaaaaa

SEQ ID NO: 12532 - DNA, 7859 bp, Homo sapiens
cgccaaatttctcccctgaagcagaggtggtagccaacggctccatgtctctgaggagcggcgggcggcggcgcgcggacccaggcgcggatggcgaggccagcagggatgatggcgccacttcctcagtttcggcactcaagcgcctggaacggagtcagtggacggataagatggatttgcggtttggttttgagcggctgaaggagcctggtgagaagacaggctggctcattaacatgcatcctaccgagattttagatgaagataagcgcttaggcagtgcagtggattactactttattcaagatgacggaagcagatttaaggtggctttgccctataaaccgtatttctacattgcgaccagaaagggttgtgagcgagaagtttcatcttttctctccaagaagtttcagggcaaaattgcaaaagtggagactgtccccaaagaggatctggacttgccaaatcacttggtgggtttgaagcgaaattacatcaggctgtccttccacactgtggaggatcttgtcaaagtgaggaaggagatctcccctgccgtgaagaagaacagggagcaggatcacgccagcgacgcgtacacagctctgctttccagtgttctgcagaggggcggtgtcattactgatgaagaggaaacctctaagaagatagctgaccagttggacaacattgtggacatgcgcgagtacgatgttccctaccacatccgcctctccattgacctgaagatccacgtggctcattggtacaatgtcagataccgaggaaatgcttttccggtagaaatcacccgccgagatgaccttgttgaacgacctgaccctgtggttttggcatttgacattgagacgaccaaactgcccctcaagtttcctgatgctgagacagaccagattatgatgatttcctacatgatcgatggccagggctacctcatcaccaacagggagattgtttcagaagatattgaagattttgagttcacccccaagccagaatatgaaggccccttttgtgtcttcaatgaacccgatgaggctcatctgatccaaaggtggtttgaacacgtccaggagaccaaacccaccatcatggtcacctacaacggggacttttttgactggccatttgtggaggcccgggcagcagtccacggtctgagcatgcagcaggagataggcttccagaaggacagccagggggagtacaaggcgccccagtgcatccacatggactgcctcaggtgggtgaagagggacagttaccttcctgtgggcagtcataatctcaaggcggccgccaaggccaagctaggctatgatcccgtggagctagacccggaggacatgtgccggatggccacggagcagccccagactctggccacgtattctgtgtcagatgctgtcgccacttactacctgtacatgaagtacgtccacccattcatctttgctctgtgcaccattattcccatggagcccgacgaggtgctgcggaagggctctggcactctgtgtgaggccttgctgatggtgcaggccttccacgccaacatcatcttccccaacaagcaagagcaggagttcaataagctgacggacgacggacacgtgctggactctgagacctacgtcgggggccacgtggaggccctcgagtctggggttttccgcagcgatatcccttgccggtttaggatgaatcctgccgcctttgacttcctgctgcagcgggttgagaagaccttgcgccacgcccttgaggaagaggagaaagtgcctgtggagcaagtcaccaactttgaagaggtgtgtgatgagattaagagcaagcttgcctccctgaaggacgttcccagccgcatcgagtgtccactcatctaccacctggacgtgggggccatgtaccccaacatcatcctgaccaaccgcctgcagccctctgccatggtggacgaagccacctgtgctgcctgtgacttcaataagcctggagcaaactgccagcggaagatggcctggcagtggaggggcgagttcatgccagccagtcgcagcgaataccatcggatccagcaccagctggagtcagagaagttcccccccttgttcccagaggggccagctcgggcctttcatgaactgtcccgcgaggaacaggcgaaatacgagaagagaaggctggcggattactgccggaaagcctacaagaagatccacatcaccaaggtggaagagcgtctcaccaccatctgccagcgggaaaactccttctacgtggacaccgtgcgtgccttccgggacaggcgttacgagttcaaagggctccacaaggtgtggaaaaagaagctctcggcggccgtggaggtgggcgacgcggctgaggtgaagcgctgcaagaacatggaggtgctgtatgactcgctgcagctggcccacaagtgcatcctgaactccttctatggctatgtcatgcgcaagggggctcgctggtactccatggagatggctggcatcgtctgcttcacaggggccaacatcatcacccaggcacgggagctgatcgagcagattgggaggcccttagagctggacacagatggtatatggtgcgtcctgcccaacagcttcccagaaaattttgtcttcaagacgaccaatgtgaagaagcccaaagtgaccatctcctacccaggcgccatgttgaacatcatggtcaaggaaggcttcaccaatgaccagtaccaggagctggctgagccgtcctcactcacctacgtcacccgctcagagaacagcatcttttttgaggttgatgggccctaccttgccatgattcttccagcctccaaggaagaaggcaagaaattgaagaagaggtatgctgtgttcaatgaagacggttctctggctgagctcaagggctttgaggtcaaacgccgcggggaactgcagctgattaagatcttccaatcctcggtgtttgaggccttcctcaagggcagcacgctggaagaggtgtatggctctgtagccaaggtggctgactactggctggacgtgctgtacagcaaggcagccaacatgcctgactctgagctattcgagctcatctctgagaaccgttccatgtctcggaagctggaagattacggggagcagaagtctacgtccatcagcacagcaaagcgcctggccgagttcctgggagaccagatggtcaaggatgcagggctgagttgccgctacatcatctcccgcaagcccgagggctcccctgtcacggagagggccatcccacttgccattttccaagcagagcccacggtgaggaagcactttctccggaaatggctcaagagctcttcccttcaagactttgatattcgagcaattctggattgggactactacattgagcggctgggaagcgccatccagaagatcatcaccatccctgcggccctgcagcaggtaaagaacccagtgccacgtgtcaaacaccccgactggctgcacaaaaaactgctggagaagaatgatgtctacaagcagaagaagatcagtgagctcttcaccctggagggcaggagacaggtcacgatggccgaggcctcagaagacagtccgaggccaagtgctcctgacatggaggacttcggcctcgtaaagctgcctcacccagcagcccctgtcactgtgaagaggaagcgagttctttgggagagccaggaggagtcccaggacctcacgccgactgtgccctggcaggaaatcttggggcagcctcccgccctgggaaccagccaggaggaatggcttgtctggctccggttccacaagaagaagtggcagctgcaggcccggcagcgcctcgcccgcaggaagaggcagcgtctggagtcggcagagggtgtgctcaggcccggggccatccgggatggtcctgccacggggctggggagcttcttgcgaagaactgcccgcagcatcctggaccttccgtggcagattgtgcagatcagcgagaccagccaggccggcctgttcaggctgtgggcgctcgttggcagtgacttgcactgcatcaggctgagcatcccccgtgtgttctacgtgaaccagcgagtcgctaaagcggaggagggtgcttcgtatcgcaaggtaaatcgggtccttcctcgctccaacatggtctacaatctctatgagtattcagtgccagaggacatgtaccaggaacacatcaacgagatcaacgctgagctgtcagcgccagacatcgagggcgtatatgagactcaggttccgttactgttccgggccctggtgcacctgggctgtgtgtgtgtggtcaataaacagctggtgaggcacctttcaggctgggaagcagagacctttgctcttgagcacctggagatgcgctctctggcccagttcagctacctggaaccagggagtatccgccatatctacctgtaccaccacgcacaggcccacaaagcgctcttcgggatcttcatcccctcacagcgcagggcatccgtctttgtgctggacactgtgcgcagcaaccagatgcccagccttggcgccctgtactcagcagagcacggcctcctcctggagaaggtgggccctgagctcctgccaccccccaaacacaccttcgaagttcgggcagaaactgacctgaagaccatctgcagagccatccagcgattcctgctcgcctacaaggaggagcgccgggggcccacactcatcgctgttcagtccagctgggagctgaagaggctggccagtgaaattcctgtcttggaggaattcccactggtgcctatctgtgtggctgacaagatcaactatggggtcctggactggcagcgccatggagcccggcgcatgatccgtcactacctcaacctggacacctgcctgtcgcaggccttcgagatgagcaggtactttcacattcccattgggaacctaccagaggacatctccacattcggctccgacctcttctttgcccgccacctccagcgccacaaccacctgctctggctgtcccctacagcccgccctgacctgggtggaaaggaggctgatgacaactgtcttgtcatggagttcgatgaccaagccactgttgagatcaacagttcaggctgttactccacagtgtgtgtggagctggaccttcagaacctggccgtcaacaccattctccagtctcaccatgtcaacgacatggagggggccgacagcatggggatcagcttcgacgtgatccagcaggcctccctggaggacatgatcacgggtggtcaggctgccagtgccccggccagctacgatgagacagccctgtgctctaacaccttcaggatcctgaagagcatggtcgtgggctgggtgaaggagatcacccagtaccacaacatctatgcagacaaccaggtgatgcacttctaccgctggcttcggtcgccatcctctctgcttcatgaccctgccctgcaccgcacactccacaacatgatgaagaagctcttcctgcagctcatcgctgagttcaagcgcctggggtcatcagtcatctacgccaacttcaaccgcatcatcctctgtacaaagaagcgccgtgtggaagatgccatcgcttacgtggagtacatcaccagcagcatccattcaaaggagaccttccattctctgacaatttctttctctcgatgctgggaatttcttctctggatggatccatctaactatggcggaatcaaaggaaaagtttcatctcgtattcactgtggactgcaagactcccagaaagcagggggagcagaggatgagcaggaaaatgaggacgatgaggaggaaagagatggggaggaggaggaagaggcggaggaatccaacgtggaggatttactggaaaacaactggaacattttgcagtttttgccacaggcagcctcctgccagaactacttcctcatgattgtttcagcgtacatcgtggccgtgtaccactgcatgaaggacgggctgaggcgcagtgctccagggagcacccccgtgaggaggaggggggccagccagctctcccaggaggccgagggggcggtcggagcccttcccggaatgatcaccttctctcaggattatgtcgcaaatgagctcactcagagcttcttcaccatcactcagaagattcagaagaaagtcacaggctctcggaactccactgagctctcagagatgtttcctgtcctccccggttcccacttgctgctcaataaccctgccctggagttcatcaaatacgtgtgcaaggtgctgtccctggacaccaacatcacaaaccaggtgaataagctgaaccgagacctgcttcgcctggtggatgtcggcgagttctccgaggaggcccagttccgagacccctgccgctcctacgtgcttcctgaggtcatctgccgcagctgtaacttctgccgcgacctggacctgtgtaaagactcttccttctcagaggatggggcggtcctgcctcagtggctctgctccaactgtcaggcgccctacgactcctctgccatcgagatgacgctggtggaagttctacagaagaagctgatggccttcaccctgcaggacctggtctgcctgaagtgccgcggggtgaaggagaccagcatgcctgtgtactgcagctgcgcgggagacttcgccctcaccatccacacccaggtcttcatggaacagatcggaatattccggaacattgcccagcactacggcatgtcgtacctcctggagaccctggagtggctgctgcagaagaacccacagctgggccattagccagccccgggccccgggtgcctctgcgtccgtgccaggcctcctgatgccaaggccacatccccgtgcttccagtgaccagaccactgaccaccctgactgtccaaacctgtgaccccaggccagggaacggggaggaaaccaaagaaaaccattttcagggagctcagacgtcacaggagggagcgggagcaggatgtggccctggcctcgccagagcacctgaagaagcaggccgtgagcgaggctgcgagtgccctgggcgccgtttctcacgcagtgaatgcttttccaggcctctgttgcttcctgcaccacacctggtggggtgggagcgtcctctaggtgcccctagttctttgtcctgcctcccagagggaggaaaagcccctgggggcttctggctccctgagattgggctctgagacgagacgggttcccaaggccctggtggggctggagtctcacctgtttgcatggagaaatgggctggccccacagcctcacaggagcagtttgtgggctggtttccccaggaatccagaccctaacccgtgagaatctggattttggcttgtgagccctgcttatttggagccgggtctagagggaaccctctatcagcctcaggaaaacaagacctctgtgcacctcacttttggctcactgcagcccttgtccttcacctccacacaggaccagctggaagcagaaagaagaaaggccaatttcacagggcaccaaacaagtatgaaatgtaaatcagaaatgcagacaccccagacgagagcctcacaggagggagggggccccacaggctccccaggaggctcgtgtctttggcccagagccagccttagtttgtccctgccatctactgtctgaggccatcgctgctacactttgtttttatttgtatttcatactgaagtttcaaaaaaaaaaaaaaaaaaa

SEQ ID NO: 12533 - DNA, 7537 bp, Homo sapiens
tcagaaccatcaatgagatgcaaacatgaaagacaagaggaagaagaaggaccgcacctgggccgaggctgcccgcctggcactagaaaaacaccccaactcaccaatgacagcaaagcagatattggaagtcattcagaaagaagggttaaaagaaacaagaaatggaacctctccattagcctgtctgaatgcaatgcttcacactaacactcgaataggggatggaacattcttcaaaatccctggaaagtcaggcctctatgctctcaaaaaagaggagtcgtcatgcccagcagatggcacgttggatttagtctgtgaatctgaattggatggtacagatatggccgaggcaaatgcccatggagaagaaaatggagtttgttcgaagcaggtaactgatgaagcatcttccactcgagattcaagccttactaacacagcagtgcaaagcaagttagtgtcttccttccagcagcacaccaaaaaggctcttaaacaggctttgaggcagcagcagaaaagaagaaatggagtctcaatgatggtaaacaagactgttcctcgtgttgttttgacaccattaaaggtgtctgatgagcagtcggattcgccttcaggatctgaatctaaaaatggtgaagcagacagttcagataaagaaatgaaacatgggcaaaaatctcccactggaaaacaaacaagtcagcacttaaaacgattaaaaaagtctggtttagggcacttgaaatggaccaaagctgaggacattgacatagaaaccccaggatctattcttgtcaacactaacttgagggcattaataaataaacatacgtttgcttccttacctcagcattttcaacaatacctcctgcttttgctcccagaagtggataggcagatgggaagtgatggaattttacgcctcagtacttcagctctaaataatgaattctttgcatatgcagcacaagggtggaaacagcgactggcagaaggagagtttaccccagaaatgcagttgcggataaggcaagaaattgagaaggaaaagaaaacagaaccttggaaagaaaaattctttgagaggttttatggagaaaagctgggcatgtcaagagaggaatctgtgaagctcactactggaccaaacaacccaaaaagcatgaaaagcccagcttctccagagcctggtttctgtgctactctttgccctatggtagaaattccacctaaagatataatggcagaattggagtcagaggatatcttgatccctgaagaatctgtaattcaggaggaaattgcagaagaggtagagactagtatctgtgaatgccaggatgaaaatcataagacaatacctgaattttctgaggaggctgaaagtctaaccaattctcatgaagaaccccaaatagcacctcctgaagataacttggaatcctgtgttatgatgaatgatgttttagaaactttgcctcatattgaagttaagatagaagggaagtcagaatcaccccaggaagaaatgacagttgttatcgatcagttagaagtctgtgactctcttattccttccacttcatctatgactcatgtcagtgacacagaacataaggagtcagaaactgcagtagagaccagtacccccaaaataaaaacagggtcatcttctctagaaggccagtttccaaatgaaggaattgctatagatatggagctacagagtgaccctgaagaacagctttcagaaaatgcctgcatctctgaaacgtccttttcttctgagagcccagagggagcctgtaccagcctgccttctccaggaggggaaacacagtccacatcagaagaatcatgtactccagcctcccttgagacaacattttgttctgaggtatctagcactgaaaatacagacaaatacaaccagagaaattccactgatgaaaactttcatgcatctttgatgtcagaaatatctccaatatccacttcacctgaaatatcagaagcatctcttatgtccaacttaccattaacatctgaagcatcaccagtatccaacttacctttaacatcagaaacctcaccgatgtctgacttacctttaacatcagaaacttcttcagtgtcttccatgcttctcacctctgagaccacttttgtatccagtttgccacttccttcagaaacatctccaatttccaactcttccataaatgagagaatggcacatcagcaaagaaagtcaccttctgtatctgaagagccactctccccgcagaaagatgagtcttccgccactgccaaacctctgggagagaaccttacctcccagcagaagaatctgtctaatactcccgaacccatcataatgagttcttcttccattgctcctgaagcatttccgtctgaagatttgcacaataagaccctgagtcagcaaacctgtaaatcacatgttgacactgagaagccctaccctgcttcaattccagaacttgcttctactgaaatgataaaagttaaaaatcatagcgtcctgcaaagaacagaaaaaaaagtgttaccttcaccattggaattatctgtcttttctgaagggacagataataagggaaatgagcttccatctgctaaattacaggacaagcaatatatctcatcagtggataaggctccattttcagaaggctctagaaataaaacacataagcaagggagtacacagagtcggttagaaacctcacatacttccaagtcatcagagccctccaagtcacctgatgggataagaaatgaaagtagagattcagagatatcaaagagaaaaactgcagagcaacacagctttggaatctgtaaggaaaagagagctaggatagaagatgatcagtcaacccggaacatatcatctagcagcccacctgagaaagaacagcctcccagagaggaaccaagggttccccctctcaagattcagctttccaaaattgggccaccttttataatcaagagccaaccagtctccaaacctgagtctcgagcatccactagcacatctgtcagtggcgggaggaacacaggagccaggaccctcgcagatatcaaggcccgggcccaacaagctcgggcccagcgagaggctgctgcagctgctgctgtggctgctgcagcgagcattgtctctggagccatgggaagtccaggagagggtggaaagacgagaactctggcacacatcaaagagcagacaaaggctaagctctttgcaaagcatcaagctcgagcccatctcttccagacctctaaagagacccggttgcctcctccgctcagctcaaaggaagggcctccaaacttagaagtctcttctacccctgaaacaaaaatggaaggttcgactggtgtcattattgtcaatccaaactgtagatctcctagcaacaagtctgcccacctccgggagaccaccactgtactacagcagtctcttaacccaagtaaacttccagaaactgccactgacttatctgtgcatagttctgatgaaaacatacctgtgtcacatttatctgagaaaattgtttcatctacctcttctgaaaatagcagtgtgcccatgctttttaataaaaattctgtccctgtatctgtttgcagcactgctatatcgggagcaattaaagaacatccctttgtgagttctgttgataaatcctctgtcctaatgtctgttgacagtgcaaacactacaatttctgcttgtaatataagcatgttaaaaaccatccagggaactgacactccatgcatagccattataccaaaatgtattgaaagcactcccatttcagccactacagagggctccagcatatcaagctccatggatgataagcagttactaatatcaagcagcagtgctagtaacttagtctccactcagtacacctctgtgccaactccctccatcggaaacaatttgccaaacctctccactagctctgtcttgattcccccaatgggaattaacaacagatttccttctgagaagatagccatacctgggagtgaagaacaggccactgtatccatgggtaccactgtgagagcagccctcagctgcagtgattctgtagcggtcacagactctctggttgcacacccgaccgtcgcaatgtttactggaaacatgctgacaataaactcttatgatagtcctcccaagttaagtgctgaaagcttggacaaaaattcagggcctcgaaacagggcagataattctggaaaacctcagcaaccaccagggggctttgcaccagcagccataaaccgatcaattccgtgtaaagtcatcgttgaccacagcaccacgctgacctccagtttgtctctgactgtctccgttgaaagctcagaagccagcttggacctgcagggcagaccagtgaggacagaggcatccgtacagcccgtggcgtgtcctcaggtgtctgtgattagcaggcctgagccagttgccaacgaaggtatagatcacagttccactttcattgctgcttcggcagcaaaacaagacagtaaaacattgccggccacctgcacaagtctccgagaattaccccttgttccagataaattaaatgagccgactgctcccagtcataactttgctgagcaggcacgtggcccagctcctttcaaaagtgaagcagacacaacctgtagcaatcagtataacccaagtaaccggatttgctggaatgatgatgggatgaggagcacaggacagcctctggttactcactcgggttcaagtaaacaaaaagaatatctagagcaaagctgtccaaaggctatcaaaactgaacatgccaactacttgaacgtgtcagaacttcatcccaggaatcttgtaacaaatgttgctcttcctgtgaaatctgaacttcacgaagcagacaagggctttagaatggacactgaagacttccctggccctgagctgcctcctccggctgcagagggagcctctagtgtacaacaaacacagaacatgaaagcttccacctcaagtcccatggaagaggctatttccttggctaccgatgccctgaagagagtccctggtgcagggagctcaggctgtcgtctgtcctctgtggaggctaacaatccgctggtgacgcagttactacagggcaacctgcctttggaaaaagtgttgccacagcccagattgggagccaagcttgaaatcaacaggcttccattgcctcttcaaactacctcagtgggtaaaacagcaccagagagaaacgttgaaattccgcccagctctccaaatccagatggtaagggctacttggcagggactctggcaccactccaaatgagaaagcgagaaaaccaccccaaaaagagagtagctaggactgtaggagaacacactcaagttaaatgtgaaccaggaaaattgttggtggagccagatgttaaaggggtgccttgtgtcatcagttccggcatcagtcagctaggacacagccagccatttaagcaagaatggctaaacaagcactccatgcagaacagaattgttcacagccctgaggtcaaacagcaaaagcggctgctcccctcgtgtagcttccagcagaacctatttcatgttgacaagaatggcggcttccacactgacgctggtacctcacacagacagcagttttaccaaatgcctgtggctgccaggggccccattcctactgcagctctgttacaggcctcttccaagaccccagtggggtgtaatgcatttgccttcaacaggcatcttgaacagaagggattgggagaggttagtctttcctcagcacctcaccagctaaggttagccaacatgttatcccccaatatgcccatgaaagaaggtgatgaggtgggaggcactgcacacacaatgccaaacaaagcactagtacatccgccgccgccaccgcctccccctccccctccacccttggctttgcccccgcctccccccccaccacctccgctacctccacctctccctaatgcagaagtcccatctgatcaaaaacaacctccagttaccatggaaaccactaagagacttagttggccacagtccacgggcatatgtagcaatataaaatcggaacctctttcttttgaggaaggtttaagcagcagctgtgaactgggcatgaaacaagtttcctatgaccagaatgaaatgaaagaacagttaaaagcattcgcgctaaaaagtgcagatttctcttcctatttgctttctgagccacaaaagccttttacccaattagctgctcagaaaatgcaggtgcagcaacaacagcagctctgtggaaattatccaacaatacactttggtagcacgagtttcaaaagggcagcatctgcaattgaaaagtccattgggattttgggaagtggctccaatcctgccacaggcttgtctggtcagaacgctcagatgcccgttcagaactttgccgacagcagcaatgcagatgaattggaactgaaatgctcttgccggctgaaagccatgattgtgtgcaaaggctgtggggccttctgccatgacgactgcataggtccttcaaaactttgtgtagcatgcctggttgtacgataagagctgagtgaaagatgcagtatcccttttccacacggaaaagccaaatagcatcagcaacaacaaatagaataatgcagtggtttctatcatgctaatttattttgctttggagcaggtacctttcctctatggcattattttcttgcatttctcataaaggggaggatgcatcccaactgaatggctcactggcatgtcttttatgtgttcagttgccattcctagctttggaaagtttctatctgtccatgtgtatacaagtcaatgccccatttttgtttttcttttaaccgaggtgtagataggaaaaggacatttttaattacttaataaccggaaatgcagatgtgtaaggagaatgagaggaatgagttaaagtggttatgcatttttctatagatgagccattacagcaaggaattttacagttgacttctctgaacctagctttaccacagtgattaaatcctatttagaaaggggaatctgatttaaatgtgtgattccttgtatttgctcctatcacaaaagatatattaaaggaggtatgccattaatgaaatccactgtcctgagtattatctttcctcctgttgtactttctcagagactatggcagaatatctggatcttccttggattttgtacacatattgtagtgaaatgtgtcctacatctgaaattgcatgggactcatgcccagcaatctggttctaggcctttgacacctgataatatgagagcaattggccagccaatagccataagcccagaggattttagagcttcatgtgtggcttttaagagcaggtttgaaaaaaaaaaaaaaaagaccct

SEQ ID NO: 12534 - DNA, 3426 bp, Homo sapiens
ccggaacatggctgccgccggccgccaaccggtcttgctgtctcacccaggctggagtgcagtggcacgatcacagctcactgcagccttgagctcctgggctaccaagtagctgggacttcagagatggctggagccgtgtggatgggcataaatggctaatgtccagcaaccatcgatgtcaagtatccacacacctggcctgaatggatccctctgcctttcagagtttgggatatgagattgaaaatgacgactcggaattttcctgagagagaagtaccctgtgatgtagaagtggaaagattcacaagggaagttccctgcttgtccagtttaggtgatggttgggactgtgagaaccaggagggacacttgaggcaatcagctttaactctggagaaaccagggactcaggaagcaatttgtgaatatcctggttttggggagcatttgattgcaagctcagaccttccaccgtctcagagagttctggcaacaaatggtttccatgcacctgactcaaatgttagtggtctggattgtgaccccgccttacccagctatcctaaaagttatgcagataagagaactggtgacagtgatgcctgtggaaaaggcttcaaccattccatggaagttattcatggaagaaatccagtgagagagaagccctacaaataccctgaaagtgttaagtcttttaatcattttacctctcttggtcatcagaaaataatgaaaagaggcaagaaatcgtatgaaggtaagaattttgagaacatctttactctgagctcatcgcttaatgaaaaccagagaaatctccctggagagaaacaatatagatgtactgaatgtggcaaatgcttcaaacggaactcttctcttgttttgcatcaccgaactcacaccggagagaagccttatacttgtaatgagtgtggaaagtccttctccaagaactacaacctgattgtgcatcaaagaatccacacaggagagaagccctatgaatgcagtaaatgtgggaaagctttcagtgatggctcagctctgacacagcaccagagaattcacacaggcgagaaaccttatgaatgcctagagtgtggaaaaaccttcaaccgaaattcatccttaattttgcaccaaagaactcatacaggggaaaaaccatatagatgtaacgaatgtgggaaacccttcactgacatctcccaccttacagtgcatctcagaatccacaccggtgagaagccctatgagtgtagcaaatgtggaaaggctttccgggacggctcgtacctcacccagcatgagaggactcacactggagaaaagccctttgagtgtgcagagtgcgggaaatccttcaacagaaactctcacctcattgtgcatcaaaagatccattctggggagaaaccctatgaatgtaaagaatgtggcaagactttcatcgagagtgcgtacctcatcaggcatcagaggattcatactggcgagaagccctatggctgcaaccagtgtcagaaacttttcaggaatatcgctggcctcattaggcaccagaggactcatactggtgagaagccctatgagtgtaatcagtgtggcaaagccttcagggacagctcctgtctgaccaagcaccagagaattcacactaaggagaccccatatcagtgtccagaatgtgggaagtccttcaagcagaactctcacctggcagtacatcagagactccatagcagggagggtcccagccggtgtcctcagtgtggaaaaatgttccaaaagagctcatcccttgttcgacatcaaagagcacacctgggagagcaacccatggaaacataatggttgggggccacatgagtcttccagttcactctcactcctgtgtttaggaggcgtgtcttagatctgactcctctctggtcagtagaaaagaatcctttaagctatccagtgaattgatgaatgtgagacattgctgagccacactgttaagtctgctcattggggaactccagagacaacttaggatgagggcagaaaagtctttggggatgattcagtctgtaccagacatgacaacacacacactggaatgaaatgtgcaaacatgggggtgacaccacagagagaacctgtgaatgcattcagaacatgattggaatgaagagccctgtagtagggagtttccaccttgtacgtaagcaaacactgaatcaacttttttttttttttcggacagagtctcactgtgcagtggcatgatctccactcacagcaacctctgcctcccaggttcaagcagttctcctgcctcagcctccaaagtagctaggattacaggtgcctgccaccatgcctggctaattttttctatttttagtagagacagggtttcactgtgttggccaggctggtcttgaactcctgacctcatgatccgcccacctcagcctcccaaagtgttgggattacaggcatgagacactgcctggcctgaatcaaccttttttaagtgtaatcagaaagagaggctttggcaggggctcttactgtgttttctgtaacaacaaaggtgtacaatgagagagtccacacagtgctgtactgcacacaccacagaatgtgtgagattttcctgtttgaatgtatgtctgcattatactcctgcaataatgctgaggactcgttgcaggagggcaaactaggtgaataaattacctgtgaatgaacaatgaagtcgttcctcttaagactgaaacaagcaggccagatgtggtggctcacgcctgtaatcctagcactttgggaggccgaggcggccagatcacaaggttaggagttcaagaccagcctggccagcatggtgaaaccccatctctaccaaaaatacaggaaattatctgggcatagtagtgtgtgcctgtaatcccagctacttgggaagctgaggcaggagaattgcttgaacctgggaggtggaggttgcagtgagctaagatcgcaccactgcactccagcctgggtgacagagcgagactccatttcaaaaaaaaagactgaaacaagcttgtgctaagatggaaagggctgcttctaacagatgtggtttgttgctttagttgttgaagcaaaaatactgagttgttatgtttatgttatcaccccaccactacctccatggttgttcatttaggatgcttctaattcagccactgtgaaccattataaaggttttattgccatgttgaaaatgtttataatatggcaaaaaggggcatcaaatagaagatttactattattccagccatgtaaaaatatgtgcacatatggatgtatgttgaaagtggatgatggagaaataaaatgtggttttctttggggactggaaaaaaaaaaaaaaa

SEQ ID NO: 12535 - DNA, 9036 bp, Homo sapiens
gcggagacccgagccggatgtgccaagatggctgcggcggctgaggtgtctgtgctcgtcgccagcgtcgggtgggctttcgcccgcggctcctgagggatcggtctcagccgcgcggagaccgtcttgctctgttgcccaggctggaccgcggtggtataatcatagctcactgcagcctcgaactcatggacacaagtgatcttccttccttaaccccctgagtccctgggactacagctccaattaaggaacagctatatcctgcttccttctgtaagcagcatcgacttgtgcaagggttcagtcatgcagccaccgccccagacggtcccgtctggcatggctgggccacctccagccgggaatcctcggagcgtgttctgggctagcagcccttacaggagacgggctaataataatgcagcagtggctccgacaacttgcccgttgcagccggtcacggatccatttgcttttagtagacaggcgctccaaagtacaccactgggcagttcgtccaaaagcagtccacctgtcttgcaaggcccagcccccgcagggttttctcagcaccccggtttgcttgttcctcacacacatgccagagatagctctcagggaccctgtgagcccctgcctggacctctgacacagcccagagcacatgccagtccgttttctggtgcattgacaccttcagcacctcctgggcctgagatgaacaggagtgcagaggtcggtcccagttcagagcctgaagttcagactctgccatatcttcctcactacattccaggagtggatcctgaaacgtctcatgggggccaccctcatgggaacatgcctgggctcgaccgacccctgagcaggcaaaacccacatgacggtgtggtcaccccagcagcatccccttccctccctcagcctggtctgcagatgccaggacagtgggggccagtgcagggaggcccacagccctcggggcaacatcgttcaccctgccctgaaggacctgttcccagcggggtgccctgtgccaccagcgttcctcatttccccaccccgtccatcctacatcagggccctggtcatgagcaacacagccctctggtggctcccccagcagccttgcccagtgacggaagagacgaggtgagccacttgcaaagtggaagccacctggccaataactctgatcctgaaagtacattcaggcaaaatcccagaattgtgaatcactgggcaagcccagagctcaggcagaatccaggagtgaagaatgagcaccggcccgcctctgctcttgtgaaccccctcgcccggggagatagcccagaaaaccgtacgcaccacccactgggggctggggccgggtctggctgtgccccgctagaagcagactcaggagcttcaggagctctggcgatgtttttccaagggggagagacagaaaatgaggagaatctctcatctgaaaaagcaggcttatctggtcaagcggactttgacgatttctgctccagccctgggctaggccgtccgcccgcacctacacacgtgggggcaggcagcctctgccaggcccttctcccaggccccagcaatgaggctgctggtgatgtgtggggtgacacagcgagcacaggggtgccggatgccagcggctcgcagtatgagaatgttgagaacttagaatttgttcagaatcaagaagttctgccaagtgagcccctcaatttggacccttcctccccgagtgaccagttcagatatgggccccttcctgggccagctgtgcccaggcatggtgctgtgtgccacaccggagcccctgatgccacactgcatacagtgcaccctgacagcgtgtcatccagctatagcagcagaagccacggaaggctctcaggctcagccaggccccaggagctggttggcacattcattcagcaagaagttggaaaacccgaggatgaagcttcaggtagtttttttaagcaaatcgattcttctcccgtaggaggtgaaacagacgagaccactgtgagccagaattaccgtggcagcgtgtcccagccctcaaccccgagccccccgaaacctacaggaatatttcagacaagtgcaaatagttctttcgaaccggtaaaatctcacttagttggggtaaaaccatttgaggcagatcgcgccaacgtggttggtgaagtaagggagacctgtgtccgccagaagcagtgcagaccagctgccgccctgcccgatgcttcccctggcaacctggagcagccaccagacaacatggagaccctctgtgcaccccaggtctgtcccctgcctcttaactccaccacggaagctgtgcacatgcttccgcacgcaggggcaccgcccttggatactgtgtatccagcacccgagaagaggccttcagccaggacccaggggcccgtgaagtgtgagagcccagcaacgactctgtgggcgcaaagtgagctgccagattttggaggcaacgtccttctggcccctgcagccccggcgctttatgtgtgtgcaaaacctcagccacctgttgttcagcctccagaagaggcgatgtccgggcagcagtcacggaacccaagctcggcggccccggtgcagagccgaggtggcattggtgcttctgagaaccttgagaatcctcccaaaatgggagaggaggaggcccttcagtcccaggcgagttctggttatgcaagtttattatcctcaccgcccactgagtctctgcagaatcctccagtcttgattgctcagcctgatcacagctataatctggctcagcccattaacttttctgtgtccttatcgaactctcatgagaagaatcagtcctggagagaggctttggtgggggatagacctgcagtcagcagttgggctctcggtggtgattctggggagaacacttctttgtctgggattccaaccagctctgtccttagcttgtctctgcctagcagtgttgcccaaagtaattttccacaaggttctggtgcttccgaaatggtttctaatcagcctgctaatttgctggttcaaccaccatcccagccagttccagagaacttggttccagaaagtcaaaaggatcgtaaggcaggaagtgctcttcccggatttgctaatagccctgctggaagcacaagtgtggtgttagttccacctgcacacggcaccctggtgcctgatggtaataaggcaaaccattccagtcatcaggaagacacttacggagccctagactttaccttaagcaggactttggaaaatcctgtaaacgtgtacaacccgtcccattctgacagcctcgcttctcagcaaagtgttgccagtcatcccagacaatctgggcctggggcgcctaaccttgaccgtttttatcagcaggtcacgaaagatgcccagggccagcctggcctcgaaagagcccagcaggagctggtgccaccccagcaacaggcttctcccccacaactacccaaagccatgttttcggagctgtcaaatccagaaagtctgcccgcacagggacaggcccagaactcagcacagtcaccagcaagtctggttctggtcgacgcgggtcagcagctgccccctcggcctcctcagtcctctagcgtgtctctggtgtccagtggctccggccaggcagctgtgccgtcagagcagccgtggccacagccagtgcctgcacttgcccccggcccaccgcctcaggacctggccgcctactactactaccggcctttgtacgatgcctaccagcctcagtactctttgccgtacccaccggagcctggcgcagcctccctctattaccaggatgtctacagcctctatgagcctcgatacaggccctatgatggtgctgcgtctgcttacgcccagaactaccgctatcccgagcccgagcggcccagctcccgagccagccactcctcggaacggccacctcccaggcaaggatatcctgaaggatactatagttccaaaagtggatggagcagtcagagcgattactatgcaagctattactccagccagtacgattatggagatccaggtcactgggatcgttaccactacagtgctagagtcagggacccccgcacctatgaccggaggtattggtgtgatgcagagtatgacgcatacaggagagagcactctgccttcggggacaggcccgagaaacgtgacaacaactggaggtacgatcctcgcttcacggggagttttgacgatgaccccgatccgcacagagacccttatggggaagaggtggaccggcgcagcgtccacagcgagcactcggcacggagcctgcacagcgcacacagcctggccagccgccgcagcagcctcagctcccactcgcaccagagtcagatttacagaagccacaatgtggctgccggttcctacgaggccccgcttcctccaggctcctttcacggcgattttgcctacggcacctaccgcagcaatttcagcagtggccccggcttcccagagtatggctaccctgccgacaccgtctggcctgccatggagcaagtttcatcaagaccaacttctcctgaaaaattttcagtgcctcatgtctgtgccaggtttggccctggcggtcagcttatcaaagtgattcccaatctgccttcagaaggacagccggccttggtggaggtccacagcatggaggccttgctgcagcacacgtctgagcaggaggagatgcgggcgttcccgggacccctggccaaagacgacacccataaggtggatgtcattaattttgcacagaacaaagctatgaaatgtttgcagaatgaaaacttaattgacaaagagtctgcaagtcttctttggaattttattgttctcttatgcagacaaaatgggaccgtggtagggaccgacattgcggagcttctgttacgagaccacagaacagtgtggcttcctgggaagtcgcccaatgaagcaaacctgattgatttcacgaatgaggcagtggagcaggtggaagaggaggagtctggtgaggcccagctctctttcctcactggtggtccggcggctgccgccagctcgctcgagagagagaccgagaggttcagggagctgttgctgtatggccgtaagaaggatgctttggagtctgcaatgaagaatggcctgtggggtcacgctctgctacttgcaagtaagatggacagccggacacacgcccgagtcatgaccaggtttgctaacagcctcccaatcaacgaccctctgcagacagtctaccagctcatgtccggacggatgcctgccgcgtccacgtgctgtggagacgagaaatggggagattggaggccgcacctcgccatggtcttgtccaacttgaacaacaacatggacgtcgagtccaggacgatggctaccatgggcgacactctggcttcaaggggcctcttggatgcggcccacttctgctacctcatggcccaggcgggatttggtgtttacacgaagaaaactacaaagcttgtcttaatcggatccaatcacagtttgccattcttaaagttcgcaaccaacgaagcaatccagaggacggaagcctatgagtacgcccagtccctgggtgccgagacctgccccctgcctagtttccaggtgtttaagttcatctactcctgccgcctggcggaaatggggctggccacgcaagccttccactactgtgaggccatcgcgaagagcatcctgacgcagccgcacctgtattccccggtgttgatcagccagcttgtgcagatggcttcccagttacgactcttcgatccccagctgaaagagaagccagaagaggagtccttggccgcacccacgtggctggttcacctgcagcaggtggagcggcagattaaggagggggctggagtatggcatcaggatggagccctcccgcagcagtgtcctggcactccgagttccgagatggagcagttggacaggccaggactcagtcagccaggagccctggggatcgccaaccctctgctggcggtgcctgcaccgagccctgagcactcgagcccgagcgtgcggctgctgccctcagctccgcagacgctccctgacggcccattggccagtcctgccagagtgccgatgttcccagtgccactgcccccggggcccctggagccgggtcctggctgtgtgaccccagggcctgcacttggcttcctggagccctccgggcctggcctcccacctggtgtgccacctctgcaggaaaggagacacttgctccaggaagccaggagcccagacccagggatagtgccgcaggaggcgcctgttggaaactcactttccgagctaagcgaagaaaattttgatggaaaatttgctaatctgaccccctcgaggacggtgccagactcggaggcccccccagggtgggatcgtgccgactcgggtcccacgcagccacctctgtctctctcacccgctcccgaaacaaagagacccggacaggcagccaagaaagaaacgaaggaacctaagaagggtgaatcctggttctttcgttggctacctggaaagaaaaagacagaagcttatttgccagatgacaagaacaaatcgattgtttgggatgaaaagaaaaaccagtgggtgaatttaaatgagccagaagaggagaagaaagccccgcccccacctccaacctcgatgcccaagactgtgcaagctgccccgcctgccctcccagggcctcctggagcccccgtgaacatgtactctagaagagcagcaggaaccagagctcgctacgttgacgtcctgaacccaagcgggacccagcggagcgagccggctctcgctcctgcggactttgtcgctccactcgcgccactcccaattccttctaacttgttcgtgccaaccccagatgcagaagaaccacagcttccagacgggactggcagggaagggcctgcagcagctaggggcctggccaatccagagcctgccccagagcccaaggttttaagctctgcagcgtcactccctggctctgaactcccctcctccaggcctgagggttcccagggaggagagctttcgcgctgtagttcaatgagttcattatcacgtgaagtgagccagcattttaatcaggctcctggcgacctccctgctgcagggggccctcccagcggggccatgcccttctacaaccctgctcagctggcacaggcctgcgccacctccgggagctcaaggctagggaggattggccagaggaagcacctggtgctgaactaggcttgccctgctgtgaacttgcacttggagccctgacgctgctgttctccccgaagaacccgaccgacctccgcgatctccgtcccgcccccagggagacacagcagtgactcagagctggtcgcacactgtgcctccctcctcaccgcccatcgtaatgaattattttgaaaattaattccaccatcctttcagattctggatggaaagactgaatctttgactcagaattgtttgccgaaaagaatgatgtgactttcttagtcatttaggatgatttaaggatatagtattcctggtcatttaagaatgttcattcattgaagccggagctgtctctgccacaggagagccacatggtcggtagtaaccagggcctctccaagcccagctgtgagtcactgcccagtgagtcccgcgcttcctttaaggtgctgggagcaaagagagggtgactgaggcagaccccaacccctgctctgcaccatctgggccctcgccgtgtttgaacctggctgaatgagtggagggcgctgtgttctcaatcagcgcctccgaggagccgtggggttccttcggcattagttcacggtttttgagagaggccttagttactgcagtgaatttctttcctgttgcaaagacgcttccagcctcactttactttctgtggcctgatgaggaccatgggtgattttgtgtacccaaagcgctggggactgcccaccgtgtggcccagtcactgggaaggagccccagagagccggctgtctgacatgatggctcagggtggtcatccaggttgaaaactgaccgtgtgatgtttgatttgggcttcatttcgtgtgtaggagcacggttagactcactgttaaggaagctggatgcacttctctaaaaggctgcactttccgtgagcacttttcgtggtacaatccacatgacccactttctcccctgggggacgttggttcagaggttggtagcacttggggagagtatcttaacacagtttcttgacagcagctctggaacttagtatttctgccccgagttttgccacactgagactttgagtagctcctggtggactcaaccctgttcaactcagagacgggcctcctctcactgatgcaaagctttaaggcttctctgactgttctgaaactcttcgtattcttgtcaagtctaaagagactgaagaaaagatttaaatactaataaaaatcagtagataatttctgtaggttctgctggaggaatacaaactgtttggtgttttaaatttaagtgtagaaattgtagaatgtggaattagcacagatccttcctggctttctgtttcacttgatcatttagcccagaccacccaggatgttttccaaaatgttccacaggcgtgtcccgctggatccatttgtccttgtcacttggagaaaggccagtccctgtgacggggcagccctctctgtccctcggtcagctcgtgtgaatcctgggacctcttccggtcggctctgcccgctgttctggggtcgactgccacgacttttgattcaagaagcttcctccaggcgggagcggctatttttcctaaatgagaattgttacattgcaaattgttgaataaaatattttgcgctccttcaagca

SEQ ID NO: 12536 - DNA, 2297 bp, Homo sapiens
aggatcagactttttaaatgtttggaattcaagatactttaggaagaggaccaactctgaaagagaaatcgctgggcgcggagatggattcggtcaggtcctgggtccggaatgtcggagtggtggacgctaatgtcgccgcgcagagcggggtcgccctgtcccgggcccactttgagaaacagcctccttccaacttgaggaaatccaacttctttcacttcgtcctggcgctctatgacaggcagggccagccggtggagatcgagcggacggccttcgtggactttgtggagaatgacaaagaacaaggcaacgagaagaccaacaacggcactcactacaagttacagctcctctacagcaacggtgtccgcacggaacaggacctctatgtcaggctcatcgactcggtcaccaagcagcccatcgcttacgagggacagaataagaatccggaaatgtgccgagttctcctgacgcacgaagtgatgtgtagtcgatgctgcgaaaagaaaagctgtggaaaccgaaatgagactccatcggacccagtcataattgacagattctttttaaaatttttcctcaagtgcaatcagaattgtttgaaaacagcaggaaacccaagggacatgagacggtttcaggttgtgttgtcaacaacggtgaatgtggatggacacgtcctggctgtttctgacaacatgtttgttcataacaactccaagcatggacggagagcaagaagactcgatccatcggaagctaccccctgcatcaaagccattagcccgagtgaaggctggaccacaggaggagccatggtcatcatcatcggggacaacttctttgatggtctccaagtggtgtttgggactatgcttgtatggagcgagctaataacccctcatgccatcagagtacagactcctccccggcacatcccaggcgtggtagaggtgacattatcttataaatctaaacagttctgcaaaggagccccaggaaggttcatttacacagcattaaatgaacccaccatagactatggcttccagagactgcagaaggtcatccctaggcatcctggagatcctgagagattagctaaggagatgctgttgaaaagagctgcagatctagtggaagctctttatggcacaccacacaataaccaggacatcattttgaagcgagccgcagacattgctgaagctctctacagcgtccccaggaatcccagccagcttccagccctctctagctccccagcgcacagtggcatgatgggaatcaactcctatggcagccagcttggggtcagcatctcagagtcaacacaaggaaataatcaagggtacatccgcaacacaagcagcatctctccgcggggatactcttccagctccacgcctcaacagtctaattacagtacctccagcaacagtatgaatggctacagcaatgtccccatggccaacttgggtgttccaggttcaccaggatttctaaatggctcacccaccggctctccttatggaatcatgtcatcaagtcccaccgttgggtcttccagcacatcctccatcctcccattttcctcttcagtttttcctgctgtcaaacagaagagtgcctttgcccctgtcatcaggccccaaggctccccttcacctgcctgctccagcggcaatggaaatggattcagagccatgaccggacttgttgtacccccgatgtaaagaagaactgctttcttatagcacaaaactacttactctgatggaccaataatgaagaaagcactaggagctcttttgggggtgtagtggtgcccccacatgaacatgatggacacccttgggtctgcaaggagccagcatcttacttggtcccacgtcctcctatagctctgatggtggctacacaaactgaccctcttgggacaaggacaaaagatgtcattgacgtagtcagtgctaagagcagaaatgcaattctttgttatgaacattatgaaaaccaccttcctatgtttgtaaaatatttaagaaaaaattggcaaacaattaatgcttaatattttggatactatttgtttttctttgtaggaaaaaaaagttgaaagtttctattttctatgaagcctttcagataccaatttagtttatgcagaaaaaaattgaacaaaacagggtaccagcacggaagactttcttaaaacgcaacctgaattgaatgatgaaatgttgtatgtgtgtttgcttatagcttaatctctttaaaaaatgaac

SEQ ID NO: 12537 - DNA, 1936 bp, Homo sapiens
ccgctcgccctgaacccagtgcctgcagccatggctcccggccagctcgccttatttagtgtctctgacaaaaccggccttgtggaatttgcaagaaacctgaccgctcttggtttgaatctggtcgcttccggagggactgcaaaagctctcagggatgctggtctggcagtcagagatgtctctgagttgacgggatttcctgaaatgttggggggacgtgtgaaaactttgcatcctgcagtccatgctggaatcctagctcgtaatattccagaagataatgctgacatggccagacttgatttcaatcttataagagttgttgcctgcaatctctatccctttgtaaagacagtggcttctccaggtgtaactgttgaggaggctgtggagcaaattgacattggtggagtaaccttactgagagctgcagccaaaaaccacgctcgagtgacagtggtgtgtgaaccagaggactatgtggtggtgtccacggagatgcagagctccgagagtaaggacacctccttggagactagacgccagttagccttgaaggcattcactcatacggcacaatatgatgaagcaatttcagattatttcaggaaacagtacagcaaaggcgtatctcagatgcccttgagatatggaatgaacccacatcagacccctgcccagctgtacacactgcagcccaagcttcccatcacagttctaaatggagcccctggatttataaacttgtgcgatgctttgaacgcctggcagctggtgaaggaactcaaggaggctttaggtattccagccgctgcctctttcaaacatgtcagcccagcaggtgctgctgttggaattccactcagtgaagatgaggccaaagtctgcatggtttatgatctctataaaaccctcacacccatctcagcggcatatgcaagagcaagaggggctgataggatgtcttcatttggtgattttgttgcattgtccgatgtttgtgatgtaccaactgcaaaaattatttccagagaagtatctgatggtataattgccccaggatatgaagaagaagccttgacaatactttccaaaaagaaaaatggaaactattgtgtccttcagatggaccaatcttacaaaccagatgaaaatgaagttcgaactctctttggtcttcatttaagccagaagagaaataatggtgtcgtcgacaagtcattatttagcaatgttgttaccaaaaataaagatttgccagagtctgccctccgagacctcatcgtagccaccattgctgtcaagtacactcagtctaactctgtgtgctacgccaagaacgggcaggttatcggcattggagcaggacagcagtctcgtatacactgcactcgccttgcaggagataaggcaaactattggtggcttagacaccatccacaagtgctttcgatgaagtttaaaacaggagtgaagagagcagaaatctccaatgccatcgatcaatatgtgactggaaccattggcgaggatgaagatttgataaagtggaaggcactgtttgaggaagtccctgagttactcactgaggcagagaagaaggaatgggttgagaaactgactgaagtttctatcagctctgatgccttcttccctttccgagataacgtagacagagctaaaaggagtggtgtggcgtacattgcggctccctccggttctgctgctgacaaagttgtgattgaggcctgcgacgaactgggaatcatcctcgctcatacgaaccttcggctcttccaccactgattttaccacacactgttttttggcttgcttatgtgtaggtgaacagtcacgcctgaaactttgaggataactttttaaaaaaataaaacagtatctcttaaaaaaaaaaaaaaaaaaaaaaaaaaaa

SEQ ID NO: 12538 - DNA, 2078 bp, Homo sapiens
gcaacgcaaagcgcttggtattgagtctgtggccgacttcggttccggtctctgcagcagccgtgatcgcttagtggagtgcttagggtagttggccaggatgccgaatatcaaaatcttcagcggcagctcccaccaggacttatctcagaaaattgctgaccgcctgggcctggagctaggcaaggtggtgactaagaaattcagcaaccaggagacctgtgtggaaattggtgaaagtgtacgtggagaggatgtctacattgttcagagtggttgtggcgaaatcaatgacaatttaatggagcttttgatcatgattaatgcctgcaagattgcttcagccagccgggttactgcagtcatcccatgcttcccttatgcccggcaggataagaaagataagagccgggcgccaatctcagccaagcttgttgcaaatatgctatctgtagcaggtgcagatcatattatcaccatggacctacatgcttctcaaattcagggcttttttgatatcccagtagacaatttgtatgcagagccggctgtcctaaagtggataagggagaatatctctgagtggaggaactgcactattgtctcacctgatgctggtggagctaagagagtgacctccattgcagacaggctgaatgtggactttgccttgattcacaaagaacggaagaaggccaatgaagtggaccgcatggtgcttgtgggagatgtgaaggatcgggtggccatccttgtggatgacatggctgacacttgtggcacaatctgccatgcagctgacaaacttctctcagctggcgccaccagagtttatgccatcttgactcatggaatcttctccggtcctgctatttctcgcatcaacaacgcatgctttgaggcagtagtagtcaccaataccatacctcaggaggacaagatgaagcattgctccaaaatacaggtgattgacatctctatgatccttgcagaagccatcaggagaactcacaatggagaatccgtttcttacctattcagccatgtccctttataatagagtaacttctgaggctttttgagaataaaatccaccccacccttgtttccccttggtatttgatgacaaattcagcagaagacccggcttgctccagtgtagctttctacatcccacatcaggtatattagagcttatccgaactggggaaagacggattgagattaactgctgggacctcctacctgcattatctcattctggcttccttgataattctgtgggccttgcagctttaactatagctcagctgctgcaagatttcagacttttgaggatgttgtgtgagggtgtttgactgtgactggggaagctcagactactttgtatgtgaatgcttcagggttttctttgttgagaacaactagcaacaaaggcaacccatgtgtgaccagttctccccaaggtctatgctaaattatagcaagagccctgggcaaccccaaacctagtcctggtagctgagcaccctgtaaggcaggagcaggcagctcagcttgagcagacattgggtggggggtggggggtggttgaggggggaggcagcacagtgcagcaaatgtttcttgggaggaagaagcctgatccatcaccatctgcttgactatgtagcttggattctcctttgtacctatccctttcgatttggctttaccttcatctatcttgatcctttcctggccaaatatcctcttgggcccaaatgaacattgtaccatagtcttctggaaagcaaacatgcttcctgctatgtaattgctaacattcatattagatgatgtgctgtagcttgatcttccttagcctactgccactgaggcagtaggttttaggtggtatcgtagtgccttttgattaatttaagtatttaattttcatcttccttctttggatctatttggcctctcaaatgaactgagattcctgttaaaaaagattgatgttattgtctcttgtagaggaaactaataaagtgtgtgtacctgtgtgaaaaaaaaaaaaaaaaaaaaaaaaaaaa

SEQ ID NO: 12539 - DNA, 7861 bp, Homo sapiens
gtttggggcatctccgcggtccggcccggggccccgggatctcggctgtccttcctcccggcataagatgcacatttttctgctctggagccgggaatgaaatattcttgagttcttacaactttatgacgagacccatgtgtggtgctattgagaaattcattgggaagttggaagacatttcaaacaacaggttgttttggtttctatagtacaattggggtggcattctgttttgtgaaaggaggaaggacttaggccagaaaactcatatgctatggttaactggttcccagcctccgagaatcttgttttccatggtgtaaaacttactcagcatcaggataagggataacgactctatggatatacagaatccttcaccatggtaaaactcgcaaacccgctttatactgagtggattttggaggccatcaaaaaagtgaaaaagcagaaacagcgtccttcagaagaaaggatatgcaatgctgtgtcttcatcccatggcttggatcgtaaaactgttttagaacaattggagttgagtgttaaagatggaacaattttaaaagtctcaaataaaggactcaattcctataaagatcctgataatcctgggcgaatagcacttcctaagcctcggaaccatggaaaattggataataaacaaaatgtggattggaataaactgataaagcgggcagttgagggcttggcagagtctggtggctcaactttgaaaagcattgaacgttttttgaaaggtcagaaggatgtgtctgcattattcggaggcagtgctgcctctggctttcaccagcagttacgattggctatcaaacgtgccattggccacggcagactccttaaagatggacctctttatcggctcaacactaaagcaaccaacgtggatgggaaagagagttgtgagtctctttcctgtttacctccagtgtcccttcttccacatgaaaaggataagccggttgctgaaccaatccccatctgtagtttctgtcttggtacaaaagaacaaaaccgagaaaagaagccagaggaactcatctcctgtgccgactgtggcaacagtggccatccatcctgtttaaagttttcccctgaactaacggttcgagtgaaggccttacggtggcagtgcatcgagtgtaaaacatgcagctcctgtcgagatcaaggcaaaaatgcggataacatgctcttttgtgattcatgtgaccgaggttttcacatggagtgttgtgatccgccactcacccgtatgccaaaaggcatgtggatatgtcaaatatgtcgacctaggaaaaaaggacgaaaacttctacaaaagaaggcagcacagataaaacggcgctatactaatccaataggacgtccaaaaaacaggttaaagaaacaaaacacggtatcaaaaggtcccttcagcaaagttcgaactggccctggaaggggtaggaaacgaaaaatcactctttccagccaatcagcatcatcatcatcagaagaaggatatttagagcggatagatggcttggacttctgcagagatagcaatgtctccttgaggttcaacaagaaaaccaaagggctcattgatggccttaccaaattttttaccccttcccctgatgggcggaaagctcggggggaagtggtggactactctgagcaatatcgaatcagaaagaggggcaacaggaaatcaagcacttcagattggcccacagacaatcaggatggctgggatggcaaacaagaaaatgaggagcgactttttgggagccaggaaatcatgactgagaaagatatggaattatttcgtgatatccaagaacaagcactgcagaaagttggagtgactggtccccctgatccacaagtccgctgtccctctgtcattgagtttgggaagtatgaaattcacacctggtactcctccccatatcctcaagaatactcaaggctgcccaaattgtatctttgtgaattttgtctaaaatatatgaaaagtagaactattctgcagcagcacatgaagaaatgtggttggttccatcctcctgccaatgagatttacagaaagaataatatttctgtctttgaggttgatgggaatgtgagtaccatttattgtcaaaacctgtgtcttttggcaaagttgtttcttgaccacaaaaccctctattacgatgtggagccatttcttttttatgtactaacacagaatgatgtcaagggctgccaccttgttggctacttttctaaggaaaagcactgccaacagaagtacaatgtttcctgtataatgattcttcctcaataccagcgtaagggctatggcaggtttctcatcgatttcagttatttgttatcaaagcgtgaaggccaagcagggtctccagagaaaccgttatctgatctgggtcgtctttcctacatggcatattggaaaagtgtaatattggagtgcctttatcaccaaaatgacaagcagatcagcattaagaagttaagcaagttgactggaatctgccctcaagacatcacttccacactccaccacctacgaatgctggacttccgtagtgaccaatttgtgattatccgccgggaaaaacttatccaggatcacatggcaaagcttcagctgaatttgcgacctgtagatgtagatccagaatgtttgcgctggactccagtcatagtgtccaactctgtggtctcagaggaggaagaagaggaggctgaggaaggagaaaacgaagagccacagtgccaggaaagagaattagagatcagtgtgggaaagtctgtgtctcatgagaacaaagaacaagattcttattcagtagaaagtgaaaagaaaccagaagttatggctccagtcagttctacacgtttgagcaaacaagtccttcctcatgatagtcttcctgcaaatagccagccatctcggaggggccgctgggggaggaagaacagaaaaacccaggaacgttttggtgataaagattctaaactgctcttggaagagacgtcttcagctcctcaggaacaatatggagaatgtggggagaaatcagaagccacccaggaacaatacactgaaagtgaagaacagctggtggcttctgaggagcagccaagccaggacgggaaacctgaccttcccaagagaagactcagtgagggggttgagccctggcgaggacagctcaagaaaagccctgaggctctgaagtgcagattaacagaaggaagtgagaggctgccccgtcgctacagtgagggtgacagggctgtcctcaggggcttcagtgagagcagcgaggaggaggaggagccggaaagccctcggtcaagctcgccaccaattctcacaaagcccacgctgaagcgaaagaaaccatttctccaccgaaggaggagagtccgaaagcgcaaacaccacaatagcagtgtagtcacagaaactatttctgagaccactgaagtgttagatgaaccttttgaagattctgactccgagaggccaatgccaagattagaacccacatttgagatcgatgaagaagaggaggaagaggatgaaaatgaacttttccctagagaatacttccgtcgtttgtcttcgcaggatgtactcaggtgtcagtcctcttctaagaggaagtctaaagatgaagaagaagatgaagagtcagatgatgctgatgacactcctatcttaaagccagtatctcttttgcgaaaacgtgatgtgaagaattctcctcttgagccagatacatccacacctttgaaaaagaaaaagggatggcccaaaggcaagagccgcaaaccaatccactggaagaaaagacctggtcgaaaaccaggatttaagttgagtcgggaaatcatgccagtttctactcaagcatgcgtcattgagcccatcgtttccattcctaaagctggacgtaaacccaagatccaggagagtgaagaaactgttgagccaaaagaagacatgcccctacccgaggagaggaaggaggaggaggagatgcaagcagaggcagaagaggctgaagagggtgaggaagaggatgcagccagcagtgaagtcccagcagcctctccagcagacagcagcaatagtcctgagaccgaaaccaaggagcctgaggtggaggaggaagaagagaagccccgtgtctcagaggagcagaggcagtcagaggaggagcagcaggaattagaggagccagagccagaggaggaggaagatgcagctgcagagactgcccagaatgacgaccacgacgctgatgatgaggatgatggccacctggagtccacaaagaaaaaggagctagaggaacagcccacgagggaagatgtcaaggaggagcctggtgttcaagagtcttttttagatgctaatatgcagaagagtagggaaaagataaaggataaagaggaaaccgagctggattccgaagaggagcagccttcccatgacacgtccgtggtgtcagagcagatggctgggtctgaggacgaccacgaagaagactcccacactaaggaagagttaatcgaattaaaagaggaggaagagattcctcatagtgagctggatctggaaactgtacaggcagtgcagtctttgactcaagaagaaagcagtgagcatgagggcgcctaccaggactgtgaggaaactcttgcggcgtgtcagaccctgcagagttacacccaggctgacgaggaccctcagatgtccatggttgaagactgtcatgcgtcagaacataatagccctatctcctccgttcagtctcaccccagccagtcagtccgttcggtcagcagtcccaacgtgcctgcccttgagagtggctacacccagatcagcccagaacaaggatccctgtccgcaccctctatgcagaacatggagaccagccccatgatggatgtgccttccgtatcagaccactctcagcaggtggtggacagcggcttcagtgacctgggcagcattgagagcaccactgaaaactatgagaacccaagcagttacgactccacgatgggcggcagcatctgtgggaacagctcttcccagagcagctgctcctacggtgggctgtcgtcctccagcagcctcacccagagcagctgtgtggtcactcagcagatggccagcatgggcagcagctgcagcatgatgcagcagagcagcgtccagcctgctgccaactgcagcatcaagtcacctcagagctgcgtggtggagaggcctcccagtaaccagcagcagcagccgccaccaccgcctccacagcagccacagccgccgccgccacaaccacaaccagcaccacagcctccaccaccccagcagcagccgcaacagcagccgcagcctcagccccagcagcctccacccccaccccctccccagcagcagcccccgctgtcacagtgtagtatgaataacagtttcaccccagctcctatgatcatggagataccagaatctggaagcactgggaacataagtatctatgagaggattccaggggattttggtgccggcagctactctcaaccatcagccaccttcagcctagccaagctgcagcagctgaccaacaccattatggaccctcatgccatgccttatagccattctcctgctgtgacttcctatgcaaccagtgtttctctgtccaatacaggactggctcagctggctccatctcatcccttagctgggactcctcaagcacaagccaccatgacgccacccccaaacttggcatccactaccatgaacctcacatctcctctgcttcagtgcaacatgtctgccaccaacattggcattcctcacacgcagagattgcaagggcaaatgccagtgaaggggcacatttccatccgctccaagtctgcgccactgccctctgcggctgctcaccagcagcagctgtatggccgtagcccatcggcagttgccatgcaggctggccctcgcgcactggctgttcagcgtggcatgaacatgggggttaatctgatgcctactcccgcctataatgtcaattccatgaatatgaacaccttgaatgccatgaacagctatcgaatgacacagcccatgatgaacagcagttaccatagtaaccctgcctacatgaaccagacagcacagtatcctatgcagatgcagatgggaatgatggggagccaggcctatacccagcagcctatgcagcctaaccctcatgggaacatgatgtacacaggcccctcccatcacagctacatgaacgctgctggcgtgcccaagcagtcactcaacggaccttacatgagaagatgagcaagatgaacttgcaatcaaaaacttaaatatatataaataaaggaaccttttatactgacaaaccagagaaaaatggacctttttccagttaaaatattgctgtagatttagaggaatttttctttggtttattttattttttagaaaacctgatcttctcttttttttgggttcattttgttgtgggttttggttttcttcacaatcttgaacattttacagtagaactcatctaaaaatggatttggggatggggaaacatgcacaaaatcttttcataattaaaaagagccttactttctttacataccacatggacagaatttgtgtaaaagtgaattatctttattttaaaatgtatgtttcccctcactgtttgcagctcccaatgttgtcatttttaaatgttatatacatctcaagggttaaccagaccctttcctccaaacccaacctttcatttcctacttcattccagcaggaggcacttaggggagactcggatggggacatggagaacaacccaagctccttaaacttattattattgttaatattattattattattattaataaagtgaggcaggaaaatgcttctccttttaaaatcccctccactcctcacacacacacacctcttgaaacccttccccaagaatgtttctttatagacggacttcattgaaatctttgttgttcttgaatcaagtgtaatataatttttttcttcttttttaaaatattcccactcagcactcagagacacaaaaatactgtaagtctcaattaacagcagaatctcagagaaaagctgtttgcaatccaaatccagcctttggaggaatagagatggtcaattaacaatcaaaaagaggagattaacctcttgtttttttaccacctggtgaatcagccataacgcacacacacgccacccagcctcttgtttctagtatgtactttgaaatgctaactgagggtcttgatgcttgagcctttgactgataaaactcaaatagcagtccccagtgatttgcctcttaggttctttcttaaattgttggtggatgactgtacattttagtgatttgaaaaataactgacaaaccattgaaacagtttattttatgttggaagagatggcgcagatgtgtgtcagaagggagatcacggtgtgagtttcgtagctatttaagtgatacatacctctagtttttgtatgtcttttgagatcctgagttcatcccctgtgaatcagagtgcacaagcacctctcctgtgagtggctaatgagaagagggacagaccgaccaccagcacagtagggcagatctggacagcagaatgttataacgcaagttcatgtgttgctcccaactccattctcttttctctcgtgcaaccagtttgcccattctcttcctattacttgctccagggataggtaaaaaaaaaa

SEQ ID NO: 12540 - DNA, 2624 bp, Homo sapiens
cccacgcgtccggatggtcctggtcacaaaatattaaagagaccgaccgctaagggaacaggaaaaacgtccgagacagccgttgcaattacgaatggaccagacttggtagcacggggcattgattgctggtgcccaaccggaccctcctcccctcttcccatcccttcccccacccaaagcaggctcccgctgcggccgggacctcgcatccctgcaacgtggccggggctgcatttttcatgagcctagggtgaacaggtgcgaagtgcgctgggagcatccggccagcggccgagcgcggggaacatggagagcgagcgcgacatgtaccgccagttccaggactggtgcctcaggacttacggggactcaggcaagaccaagacggtgacccgtaaaaaatacgaacggatcgtctagctcctcaatggctccgagtcgagctccacggacaacgccaaatttaaattctgggtcaaatcgaagggcttccagctgggccagccggacgaggtccgcgggggaggcggcggcgccaagcaagtgctctagtgcctgtcaagaccacggatggcgtaggggtagatgagaagctatctttacgacgggtagctgtggttgaagatttctttgacattatttattcgatgcatgtggaaacggggccaaatggagaacaaattcggaaacacgctggacaaaagagaacttacaaagcaatttcagagagctatgccttcctaccaagagaagcggtgacacgatttctaatgagctgctcagagtgccagaaaagaatgcatttaaacccagatggaacagatcataaagataatggaaaacctcccactttggtgaccagcatgattgactacaacatgccaattaccatggcctacatgaaacacatgaagctgcagctgctaaactcacagcaagatgaggatgaaagttcaatagaaagtgatgaatttgacatgagtgattcaacacggatgtcagctgtgaactctgatcttagctccaatcttgaagaaagaatgcaaagtccccagaatcttcatggccagcaagatgatgattctgctgcagagagctttaatggcaatgagactctggggcacagttcaattgcttcagggggaacacacagcagggagatgggagactccaacagtgatggcaaaactgggctggagcaagatgaacagccactgaacctgagtgacagtcccctctctgcgcagctaacttcggaatacagaatagatgatcacaacagtaatgggaaaaacaagtataagaatcttctaatttctgacctcaagatggaacgagaggcgagagaaaatggaagcaagtctcctgcacatagttactccagctatgactctggcaaaaatgagagtgtagaccgaggagctgaggacctctcactaaacaggggagatgaggacgaagatgaccacgaggaccatgacgattcggagaaagttaatgagacagacggcgttgaagccgagcggctgaaagcttttaatatgtttgtcaggctgtttgtagatgaaaacttggaccgaatggtcccaatctctaagcagcccaaagaaaagatccaggctatcattgactcatgcaggcgacaattccctgagtatcaagagcgtgccagaaaacgtatacgtacttacctcaagtcctgcaggcggatgaaaagaagtggttttgagatgtctcgacctattccttcccaccttacttcagcagttgcagagagtatcttggcttcagcttgtgagagtgagagtagaaatgccgccaagaggatgcgtctggagagacagcaggatgagtctgctccagctgacaaacagtgtaaaccagaggcgacccaggccacttactcaacatcagctgttccaggctcacaggacgtgctgtacatcaatggaaatgggacctatagttaccatagttacagagggctaggagggggtctgctaaatctgaatgatgcttccagcagtggacccactgatctcagcatgaagagacaattggcgactagctcaggatcctccagcagctcaaactccagaccccagctgagtccaactgaaatcaatgccgtgagacagcttgttgcaggatatcgagaatcagctgcatttttattgcgatctgcagatgaactggaaaatctcattttacaacagaactgagacagacgaccaccatattcactgaggtctaaatttgcagttccactaatgacattttgatttcccaacagagatacttctggtcttactgcacagtcttttaagagaaatacttccattatgccacattgtccttgatccgtaagtgatgtgttaaggtgcttcaaaggaactctgacctctgaagtacttgagctactttagtatgtccagcctattgctttttgttttagtgtgtcaccataaatatcaggggcataaaaggctatctattcttaattcaaggataaaacagaagaagcttgtggtataaaacaatagttcaagatccagctgaaatattagtggaatttgctactgactcattggactgaaagctgaagtacctggcaaaaaaaa

SEQ ID NO: 12541 - DNA, 9926 bp, Homo sapiens
cgcctcccctcagtttgccccctttagccttccacctttcccttctcctctctcgcatttccgccagtcagcttacccgctggccgcctcctgacaagcgggagggatccgccgtggacccagggaagcggaggagcctggcggccaccccctcttccccacttccctgcactctcatcgctctcggcctcggcctcggcctccgacacgagaaagatgctggtttcgagttttggagatccttgttttttatggaacacagttctgtaaaattttcataagattccttggcaataacatacgcttgtgatggaccctagaaatactgctatgttaggattgggttctgattccgaaggtttttcaagaaagagtccttctgccatcagtactggcacattggtcagtaagagagaagtagagctagaaaaaaacacaaaggaggaagaggaccttcgcaaacggaatcgagaaagaaacatcgaagctgggaaagatgatggtttgactgatgcacagcaacagttttcagtgaaagaaacaaacttttcagagggaaatttaaaattgaaaattggcctccaggctaagagaactaaaaaacctccaaagaacttggagaactatgtatgtcgacctgccataaaaacaactattaagcacccaaggaaagcacttaaaagtggaaagatgacggatgaaaagaatgaacactgtccttcaaaacgagacccttcaaagttgtacaagaaagcagatgatgttgcagccattgaatgccagtctgaagaagtcatccgtcttcattcacagggagaaaacaatcctttgtctaagaagctgtctccagtacactcagaaatggcagattatattaatgcaacgccatctactcttcttggtagccgggatcctgatttaaaggacagagcattacttaatggaggaactagtgtaacagaaaagttggcacagctgattgctacctgtcctccttccaagtcttccaagacaaaaccgaagaagttaggaactggcactacagcaggattggttagcaaggatttgatcaggaaagcaggtgttggctctgtagctggaataatacataaggacttaataaaaaagccaaccatcagcacagcagttggattggtaactaaagatcctgggaaaaagccagtgtttaatgcagcagtaggattggtcaataaggactctgtgaaaaaactgggaactggcactacagcggtattcattaataaaaacttaggcaaaaagccaggaactatcactacagtaggactgctaagcaaagattcaggaaagaagctaggaattggtattgttccaggtttagtgcataaagagtctggcaagaagttaggacttggcactgtggttggactggttaataaagatttgggaaagaaattgggttctactgttggcctagtggccaaggactgtgcaaagaagattgtagcaagttcagcaatgggattggttaataaggacattggaaagaaactaatgagttgtcctttggcaggtctgatcagtaaagatgccataaaccttaaagccgaagcactgctccccactcaggaaccgcttaaggcttcttgtagtacaaacatcaataatcaggaaagtcaggaactttctgaatccctgaaagatagtgccaccagcaaaacttttgaaaagaatgttgtacggcagaataaagaaagcatattggaaaagttctcagtacgaaaagaaatcattaatttggagaaagaaatgtttaatgaaggaacatgcattcagcaagacagtttctcatccagtgaaaagggatcttatgaaacctcaaagcatgaaaagcagcctcctgtatattgcacttctccggactttaaaatgggaggtgcttctgatgtatctaccgctaaatccccattcagtgcagtaggagaaagcaatctcccttccccatcacctactgtatctgttaatcctttaaccagaagtccccctgaaacttcttcacagttggctcctaatccattacttttaagttctactacagaactaatcgaagaaatttctgaatctgttggaaagaaccagtttacttctgaaagtacccacttgaacgttggtcataggtcagttggtcatagtataagtattgaatgtaaagggattgataaagaggtaaatgattcaaaaactacccatatagatattccaagaataagctcttcccttggaaaaaagccaagtttgacttctgaatccagcattcatactattactccttcagttgttaacttcactagtttatttagtaataagccttttttaaaactgggtgcagtatctgcatcagacaaacactgccaagttgctgaaagcctaagtactagtttgcagtccaaaccattaaaaaaaagaaaaggaagaaaacctcggtggactaaagtggtggcaagaagcacatgccggtctccaaaagggctagaattagaaagatcagagctttttaaaaacgtttcatgtagctcactatcaaatagtaattctgagccagccaagtttatgaaaaacattggacccccttcatttgtagatcatgacttccttaaacgccgattgccaaagttgagcaaatccacagctccatctcttgctctcttagctgatagtgaaaaaccatctcataagtcttttgctactcacaaactatcctccagtatgtgtgtctctagtgaccttttgtctgatatttataagcccaaaagaggaaggcctaaatctaaggagatgcctcaactggaagggccacctaaaaggactttaaaaatccctgcttctaaagtgttttctttacagtctaaggaagaacaagaacccccaattttacagccagaaattgaaatcccttccttcaaacaaggtctgtctgtgtctccttttccaaaaaagagaggcaggcctaagaggcaaatgaggtcaccagtcaagatgaagccacctgtactgtcagtggctccatttgttgccactgaaagtccaagcaagctagaatctgaaagtgacaaccatagaagtagcagtgatttctttgagagcgaggatcaacttcaggatccagatgacctagatgacagtcataggccaagtgtctgtagtatgagtgaccttgagatggaaccagataaaaaaattaccaagagaaacaatggacaattaatgaaaacaattatccgcaaaataaataaaatgaagactttaaagagaaagaaactgttgaatcagattctttcaagttctgtagaatcaagtaataaagggaaagtgcaatccaaactccataatacggtatcaagtcttgctgccacatttggctctaaattgggccaacagataaatgtcagcaagaaaggaaccatttatataggaaagagaagaggtcgcaaaccaaaaactgtcttaaatggtattctttctggtagtcctactagccttgctgttcttgagcaaacagctcaacaggcagctgggtcagcattaggacagattcttcccccattactgccttcatctgctagtagttctgagattcttccatcacctatttgctctcagtcttctgggactagtggaggtcagagccctgtaagtagtgatgcaggttttgttgaacccagttcagtgccatatttgcatttacactccagacagggcagtatgattcagactcttgcaatgaagaaggcctcaaaggggaggaggcggttatctcctcctactttgttgccaaattctccttcgcacttgagtgaactcacatctctaaaagaagctactccttccccaatcagtgagtctcatagtgatgagaccattcccagtgatagtggaattggaacagataataacagcacatcagacagggcagagaaattttgtgggcaaaaaaagaggaggcattcttttgagcatgtttctctgattccccctgaaacctctacagtgctaagcagtcttaaagaaaaacataaacacaaatgtaagcgcaggaatcatgattacctcagctatgacaagatgaaaaggcagaaacgaaaacggaaaaagaaatatccccagcttcgaaatagacaggatccagactttattgcagagctggaggaactaataagtcgcctaagtgaaattcggatcactcatcgaagtcatcattttatcccccgagatcttctgccaactatctttcgaatcaactttaatagtttctatacacatccttctttccccttagaccctttgcactacattcgaaaacctgacttaaaaaagaaaagagggagaccccctaagatgagggaggcaatggctgaaatgccttttatgcacagccttagttttcctctttctagtactggattctatccatcttatggtatgccttactctccttcaccccttacagctgctcccataggattaggttactatggaaggtatcctcccactctttatccacctcctccatctccttctttcaccacgccacttccacctccttcctatatgcatgctggtcatttacttctcaatcctgccaaataccataagaaaaagcataagctacttcgacaggaggcctttcttacaaccagcaggactcccctcctttccatgagtacctaccccagtgttcctcctgagatggcctatggttggatggttgagcacaaacacaggcaccgtcacaaacacagagaacaccgttcttctgaacaaccccaggtttctatggacactggctcttcccgatctgtcctggaatctttgaagcgctatagatttggaaaggatgctgttggagagcgatataagcataaggaaaagcaccgttgtcacatgtcctgccctcatctctctccttcaaaaagcttaataaacagagaggaacagtgggtccaccgagagccttcagaatctagtccattggccttgggattgcagacacctttacagattgactgttcagaaagttctccaagcttatcccttggaggattcactcccaactctgagccagccagcagtgatgaacatacaaaccttttcacaagtgcaataggcagctgcagagtttcaaaccctaactccagtggccggaagaaattaactgacagccctggactcttttctgcacaggacacttcactaaatcggcttcacagaaaggagtcactgccttctaacgaaagggcagtacagactttggcaggctcccagccaacctctgataaaccctcccagcggccatcagagagcacaaattgtagccctacccggaaaaggtcttcatctgagagtacttcttcaacagtaaacggagttccctctcgaagtccaagattagttgcttctggggatgactctgtggatagtctgctgcagcggatggtacaaaatgaggaccaagagcccatggagaaaagtattgatgctgtgattgcaactgcctctgcaccaccttcttccagtccaggccgtagccacagcaaggaccgaaccctgggaaaaccagacagccttttagtgcctgcagtcgcaagtgactcttgcaataatagcatctcactcctatctgaaaagttgacaagcagctgttccccccatcatatcaagagaagtgtagtggaagctatgcaacgccaagctcggaaaatgtgcaattacgacaaaatcttggccacaaagaaaaacctagaccatgtcaataaaatcttaaaagccaaaaaacttcaaaggcaggccaggacagggaataactttgtgaaacgtaggccaggtcgacctcggaaatgtccccttcaggctgtcgtatcaatgcaagcattccaggctgctcagtttgtcaacccagaattgaacagagacgaggaaggagcagcactgcacctcagtcctgacacagttacagatgtaattgaggctgttgttcagagtgtaaatctgaacccagaacataaaaaggggttgaagagaaaaggttggctattggaagaacagaccagaaaaaagcagaagccattaccagaggaagaagagcaagagaataataaaagctttaatgaagcaccagttgagattcccagtccttctgaaaccccagctaaaccttctgaacctgaaagtaccttgcagcctgtgctttctctcatcccaagggaaaagaagcccccacgtcccccaaagaagaagtatcagaaagcagggctgtattctgacgtttacaaaactacagacccaaagagtcgattgatccaattaaagaaagagaagctggagtatactccaggagagcatgaatatggattatttccagcgcccattcatgttgtgttttttgtttcaggaaagtatctaagacaaaagagaattgacttccagcttccttatgatatcctttggcagtggaaacacaatcagctatacaaaaagccagatgtcccactatataagaaaattcgttcaaatgtctacgttgatgtcaaacccctttctggttacgaagctaccacctgtaactgtaagaagccagatgatgacaccaggaagggctgtgttgatgactgcctcaatagaatgatctttgctgagtgttcccccaacacttgcccatgtggcgagcaatgctgtaaccagaggatacagaggcatgaatgggtgcaatgtctagaacgatttcgagctgaggaaaaaggttggggaatcagaaccaaagagcccctaaaagctgggcagttcatcattgaatacctaggggaggtcgtcagtgaacaggagttcaggaacaggatgattgagcagtatcataatcacagtgaccactactgcctgaacctggatagtgggatggtgattgacagttaccgcatgggaaatgaggcccgattcatcaaccatagctgtgacccaaattgtgaaatgcagaaatggtctgttaatggagtataccggattggactctatgctcttaaagacatgccagctgggactgaactcacttatgattataactttcattccttcaatgtggaaaaacagcaactttgtaagtgtggctttgagaaatgtcgaggaatcatcggaggcaagagtcagcgtgtgaatggactcaccagcagcaaaaacagccagcccatggccacacacaaaaaatctggacggtcaaaagagaagagaaagtctaagcacaagctgaagaaaaggagaggccatctctctgaggaacccagtgaaaatatcaacaccccaactagattgaccccccaattacagatgaagccaatgtccaatcgtgaaaggaactttgtgttaaagcatcatgtattcttggtccgaaactgggagaagattcgtcaaaaacaggaggaagtaaagcacaccagtgataatattcactcagcatcattatatacccgttggaatgggatctgccgagatgatgggaatatcaagtctgatgtcttcatgacccagttctctgccctgcagacagctcgatctgttcgaacaagacggttggcagctgcagaggaaaatattgaagtggctcgggcagcccgcctagcccagatcttcaaagaaatttgtgatggtatcatctcttataaagattcttcccggcaagcactggcagctccacttttgaaccttcccccaaagaaaaagaatgctgattattatgagaagatctctgatcccctagatcttatcaccatagagaagcagatcctcactggttactataagacagtggaagcttttgatgctgacatgctcaaagtctttcggaatgctgagaagtactatgggcgtaaatccccagttgggagagatgtttgtcgtctacgaaaggcctattacaatgcccggcatgaggcatcagcccagattgatgagattgtgggagagacagcaagtgaggcagacagcagtgagacctcagtctctgaaaaggagaatgggcatgagaaggacgacgatgttattcgctgtatctgtggcctctacaacgatgaaggtctcatgatccagtgtgacaagtgcatggtatggcagcactgtgattgtatgggagtgaactcagatgtggagcactacctttgtgagcagtgtgacccaaggcctgtggacagggaggttcccatgatccctcggccccactatgcccaacctggctgtgtctacttcatctgtttgctccgagatgacttgctgcttcgtcagggtgactgtgtgtatctgatgagggatagtcggcgcacccctgatggccacccggtccgtcagtcctatcgactgttatctcacattaaccgacataaacttgacatctttcgcattgagaagctttggaagaatgaaaaagaggaacggtttgcctttggtcaccattatttccgtccccacgaaacacaccactctccatcccgtcggttctatcataatgaactatttcgggtgccactctatgagatcattcccttggaggctgtagtggggacctgctgtgtgttggacctttatacgtattgtaaagggagacccaaaggagtaaaggagcaagatgtgtacatctgtgattatcggcttgacaagtcagcacacctgttttacaagatccaccggaaccgctatcctgtctgcaccaaaccctatgcttttgatcacttccccaagaagctcactcccaaaaaagatttctcgcctcattacgtcccagacaactacaagaggaatggaggacgatcatcctggaagtctgagcgctcaaagccacccctaaaagacttgggccaggaggatgatgctctacccttgattgaagaggttctagccagtcaagagcaagcagccaatgagatacccagcctggaggagccagaacgggaaggggccactgctaacgtcagtgagggtgaaaaaaaaacagaggaaagtagtcaagaaccccagtcaacctgtacccctgaggaacgacggcataaccaacgggaacgactcaaccagatcttgctcaatctccttgaaaaaatccctggaaaaaatgccattgatgtgacctacttgctggaggaaggatcaggcaggaaactgcgaaggcgtactttgtttatcccagaaaacagctttcgaaagtgaccctcaaagaatgagaacctcaagcatctgggatccagtggagctaatcagtcctgcctcctgctctctgggtatagacaggggtgggaagggtccatctgggcaaggggaatggggccatgttgttgacattaggtacttaataagccttggagctagtggagagggagaggaaagggttctgtccaagacagttcaggttaattaattttcttctccattgcttcaccttaagggttaataatgtagagaggagggaggaccacattgatgaccagaacctactggtactttatagcatttgccccaccccacagcttaggtttttctgtcatcctcagatcccacaggcattgcgaagaagctgcttcctatacccaggtataactcaaaatccaaagggatagggccaggatccctattcctaccccatctattctctgttggctccaagagctaccccagagaccttaaacagaaacagtagctgaggcttcttcctagatacctgactagggaagtttgtctctcctttcttgcccaaccaggtcaaagtaaaatgtgagttgacagctcaaagcacttgtaactgctgccccctccctacctctactccccaaaatggaatcatgggatagggaaggcccccatggggtcagaagggcacggtagttcttgcaattatttttgttttacccttcataacc

SEQ ID NO: 12542 - DNA, 8776 bp, Homo sapiens
ggtggcgacggcgagcacagaaacgatggagttgagccagtcgaccctggttggaagcaagtgagaagagaccaggcgcacccctaaatttctgtgcggagcgcttgtcatcctccccagggaacggtgcacccaaaggaggactggctggactgatttgctagggagagggcggggaagaggaggcaaggtgagcagagaagccccctgcgtatccggactgccagatcgcgcttttgccggactcctgccccctccctgctcaggtgggcgcgcccggtctccagctcacaggggcgcttggaggagaccagaaagtcgccgcctggctgcgcgggatgcctttcgccaagcggatcgtggagccgcaatggctgtgcaggcagcggcgccctgcgcccggcccagcagtggacgcgagcggaggcagcgctgagccgccgccgcccttgcagccgccgggccggagggacctggacgaggtcgaggcgccagggccagaggagccagcccgcgccgtccctgcaccttcagggctgccaccgccgccgccgccactgcccgcgccggccgaccagactcagccgccgcacggagaggcgtccgtggctggcgaggagagcacggcggggatcccggaggcggcgcccgcagccggcgaggcgtcctcggcggcggcggcggcggccgtgctgctcatgctggacctatgcgcggtcagcaacgccgctctggcccgtgtcctccggcagctctcggacgtggcccggcacgcttgcagcctcttccaggagctcgagagcgacatccagctcacccaccgccgcgtctgggcgctgcagggcaagctcggcggcgtgcagcgcgtcctcagcacgcttgaccctaagcaggaggcagtgcccgtctccaacctggacatagagagtaagctgagtgtgtactaccgcgccccgtggcaccagcagcgcaacatcttcctcccagccacaaggccaccctgcgtggaggagctgcaccgccacgcccggcagagcctgcaagccctgcgcagagaacaccggagccggagcgatcgccgagagcaaagagcagctgcccccctttccattgcagctcctccactgccagcctaccctccagctcacagccagaggaggcgtgagtttaaggaccgtcactttttaacgtcccatcccccagaggatgaagatacagatgtcatgttagggcagaggccgaaaaacccaatacacaatatcccttccacactggacaagcagaccaactggagcaaagcactacctctcccgacgccagaggagaagatgaaacaagatgcccaagtgatttcttcttgcattattcccatcaatgttactggagttggctttgacagagaggctagtatacgctgctctctggttcattcacaatcggtactacagcggagacgaaaattgaggaggaggaaaaccatctcgggtatccccagaagagttcaacaagaaatagattctgatgaatcaccagtggccagggaaaggaatgtgattgtgcacacaaacccagacccctccaacactgtcaataggatatccggaaccagggactctgagtgccaaaccgaggatattctgattgctgccccatccagaaggagaatcagagctcaaaggggtcaaagcattgcagcttccctttctcattctgctggcaacatttctgccctagcagacaaaggtgacaccatgtttactcctgcagtgagcagccgcacaagatctcggagccttccccgggaaggtaatagaggtggggatgctgagcccaaagttggcgctaaaccctcagcatatgaagagggagagtcttttgtgggtgaccatgaaagaacccctaatgatttcagtgaggctccaagcagcccgagtgcccaggaccaccagcctactttgggcctggcctgctctcaacatcttcacagcccccagcacaaattaagtgagaggggaaggtcacgtctgtcccgaatggctgctgactctggcagctgtgacatctcctccaactcagacacgtttgggagccccatccactgcatctccacggctggcgtcctccttagcagccacatggaccagaaagatgaccaccagtcatccagtggcaactggagtgggagcagctccacgtgcccctcgcagacctcagaaaccatccctcctgcagcttctcctccactcactggctcttcacactgtgactcggagttgtcactaaacacagcccctcatgccaatgaggatgccagtgttttcgtgacagagcaatacaatgaccacttggataaagtgagaggccatcgggcaaactcctttacctccactgttgcagacctgctggatgatcccaacaacagcaacacaagtgacagtgagtggaattacctacaccaccaccatgatgcctcctgccgccaggattttagtcctgagcgtcccaaggcagacagcctgggctgcccaagcttcacaagcatggccacttatgacagctttctggaaaagtctccatcagacaaagcggacactagctctcacttttcagtagacacggaaggatactatacctccatgcactttgactgtggtctcaaaggtaataagagctatgtctgtcactatgcagccctgggcccagagaatggccagggtgtaggggcttcccctggtcttccagattgtgcctggcaggactacttagaccacaagaggcagggaagaccaagcatctctttcaggaaaccaaaggcaaagccgaccccacctaaacgtagctcatcattgaggaagtctgatggaaacgcagatatttctgagaagaaagaaccaaagataagcagtggtcagcacctgcctcacagttccagggaaatgaagctgcctcttgatttcgccaacacgccttctcgaatggaaaacgccaatcttcccaccaagcaggaaccttcttggataaaccagagtgaacaaggcattaaggaacctcagttagatgcttcggatattccaccattcaaagatgaagttgccgaatccacacactatgcagacctctggctcctaaatgacttgaaaacaaatgatccttatagatctctatctaattcaagcaccgctacgggtaccacagtcattgaatgcatcaaatctccagagagctctgaatcccaaacatcacaatcagaatcaagagccaccaccccatctcttccttctgttgacaatgagtttaaactggcttcaccagaaaagctggctggcttggcatctccatcaagtggctattcaagccagtctgaaacgccaacatcctctttccctacagctttcttttcaggtccattgtctcccggaggtagcaaaagaaaacctaaagtcccagaaagaaaatcctcactacagcaaccctctttaaaagatggaactatatcactgagtaaagaccttgaacttccaattatacctcctacccatcttgatctaagtgctcttcataatgtcttgaacaaaccattccaccaccgtcatccactgcatgtttttactcataataagcagaacacagtaggagaaacactgaggtcgaatcctccaccgtcccttgcaattacaccaacgatcctgaaatctgttaaccttaggtccatcaacaagtctgaagaagttaagcaaaaagaagaaaacaatacagatctcccttatttagaggaaagcacactcacaacggctgccttgtctccaagtaagattaggccgcatacagcaaataaatcagtatctcgtcaatactccactgaagacaccatactgtcctttttagactcttctgcagttgagatgggaccagataaactacatttagaaaaaaactctacttttgatgtgaagaatcgctgcgatccagaaaccataacatcagctggtagcagtcttctagattcaaatgtcacaaaagaccaagtgcgtacagagactgagcctattccagaaaacacgccaaccaaaaactgtgcttttcccacagaaggatttcagagggtctctgctgcccgcccaaatgatttggatggtaaaataatacaatatggacctggtccagacgaaactctagaacaggtacagaaggcaccctctgcaggtctggaggaagttgcacaacctgaatctgtggatgtaatcacatctcagtcagactcaccaactagagcaacagatgtaagcaatcaatttaagcatcaatttgttatgagccgccaccatgacaaagtgcctggtactatcagctatgaatcggagataacatctgtaaattcattccctgaaaaatgttccaagcaggaaaatattgcttcaggtatttcagccaaaagtgcctctgataacagcaaagcagaggagacccaaggaaatgtggatgaggcttcattgaaagaatcatcaccgagtgatgactccatcatttcaccacttagtgaagactcccaagctgaagcagagggtgtgttcgtgtctccaaacaaacctcgaacaactgaggatttatttgcagtcattcacagatccaagaggaaagtacttggaagaaaagattccggggacatgtctgttcgaagcaaatcgagagctcccctcagcagtagcagcagcagcgccagttccatcacttcacccagcagtaatgtgacaacccccaacagccagaggtctcctggtctcatataccgaaatgccaaaaagtccaacacatccaatgaagagtttaagctgttactgctcaagaaaggcagtcgctcagattctagttaccgcatgtctgccactgagatcctgaagagccccatactgcccaaacctcctggggagctcacagcagagtcccctcagagcaccgatgatgcccatcaggggtcacaaggggctgaggcattgtccccactctctccatgctccccacgagttaatgcagaaggcttttcctcgaagagctttgccacctcagcatcagcaagggttggacgttctcgggcccctcctgcagccagcagcagccgctacagtgtccgctgccggctgtacaatacgcccatgcaggcaatctccgagggagagacggaaaattctgacgggagcccacatgacgaccgttcctcccagagttcaacatagactgcctgtaccaggctgcctggcaaaggccaaaacccttactcacatgaggatggaggaacagaacagaggacttgggaaaagtctcaacttgatggggtagcatcactgctaagcaatgaatgaatttctaaatacagtatgtgctgggtaaacagaaagtggtttagacattcttgattagtttccatattttaagtagctgcagtctttcatgtttttctttagcatagtttgatttacgcaatctccttccttgtgaaaatagaggatacaaaattgtctaattttcatgacacctagaaaacgttttcccagagctgcctattcagaaactaaagccctcactgtcattattctttaagaagatgaaattactctggatgtttggtatttttttacattaaaacaaactaaagcaaaatttagaagaaagaactacacatatgtaaataccatatttttgataaaaatgtgtaaatagatttatcaatgatgagtggacatgtggtcaattatctactgcacaccaactgtttatagaatacacaaaaataaaatgtaataactgtattctgtgaataccattttcatatcaaatgccatatttaaatgtccaccaatatgatttctgagtggtaaacctcaaatatgaattttaaactggtgaactaaaggaaatcttgaggtcatatactgaaatatgaataaattaaaataatgaattcagatctaatcatttttatgacaaattgcagcaccaaacaaactaatagcaacccatggctgtgatttgttgtgtggtaatttggacagaatgaaaagcatgcttttgattttttttttaatcagtgagagaagtcatcattctcaacacaaagccctgaacaacagcatttgacagtgtcctttagattttaattttttcaatggattgctttaaagagaatgagtagggaaaatagtagttaattttaggttatgttttatattaggctactggggacataaacggtcataactaatgactgtaatcattaaactccttaaacagtttagaaattagctccaggttcttaaactaacaaaaataaaacctaagcatgccacagagctattgattaatcagtaagtacctgtaatgagttttcagtgaagctttctctctgtgctgatgagattcatgctacctaaaaattaacagaaatgacactgtgaacaatgtagttggaaaataggtatgtgtatatgcattatttatactcattgttaaactgggaatggggaacagctctggttcacaatactacatacaactgagtttttgtctggttttactatagtgtctgcttgatggcaaaaggggagggtggagggtgggagaggaaatgtcagggcatgtgctctgataaaataaaggcagggaaacaagctgaattacttgaaattacttgaattttcttgtcttaaaactgaaaaaaaaatgtagttacacgttaaaatctgcaaatggtttttacacctctgattttaacatgaacttatactaatgtttggaatcttatgtcagaaatataagcagctatgtacttagaataggttttgaatgggagaggtagaacagagagagaattaagaagggatctgacttataaaagactagaatgtgattagagtgatagaacataccaatgttaccaagaaattgacaagctgctggctttaagcttatgcaagtggtagttgggaaagtaggaggtgtggaagagggtttgcattttggattaattcatgcaaaatgaaggaggaagcctggtctaagaagatactgtctttcaatagaaatgatttctaaactgctacagattaagaatagataatctgattgctgttgttttgtttgtttggaaagaaaaaaaatgtctggcttcttctactatttgttttcactaccaaactgtgttactaaatttcttgtcatccttgtatgtaaaatgggtgctgggggtggaggggtataagaggagggagagtcagagagagtgtgtatgggtgtgtgtgagtgtgagtgtgtgtgtacgcacacacactggggatagataagctacctggtaaagggtttgaacatttacaaaatgtcacactttttcttaaaagaaaaatattttggggtttgaataaaatggaccaccatttctcattggaacccattaattaagaaaaccagcatggtttgacaccacatgggaacatgaataaatctgtctcatgatttgaaaagtacaccttgcaaagttttaaaaataaagtttttaggcaaatgcgataagaaaccgtcatttccagtcacagtaggcgatctttcgtaatttcataaaagcagttcgtttgcagtatggcttttgtgtagttaggggttttttaagtgtgaagaaaggtatgtgggctttaaaagtgattctaaatcttgaatagaaaacacatgaattggctttaataaaaatgtcacctttttattattgacattaagtaatggtaccatatattttttaaaatacatattgacttgaattgtgaggcaataagataccttctatatgtaatgatcacagaactaacccttataatatagttttacttattttgtttactctaaaaatctatagcagagtttctctattttatatttcatagatttaaaaaacccaaataaagatggatttaaaattcactgtggaaaagagtattgagttacaaactgagaagaaaaagcaggaagttccctaataatctggaatattctacatggcttgattacatagcaaacaagaccaagatttagggctgtcttaaacatcactgccgtcttgaagcagggtacacacgttaggtattgtgaagaacatcaatccgaacttttcttctgttgtttgcactgatgcgattttttgttcttttatgtttatacaacgtatctatgttgtgtaggggaaattttttcattttttaaaaattctactttggttttgttgttgttttgatttgtttttggctaagtagaggacatggactagttgtagcaaacagaacatgctgtttgctcttgccaaaggtcagtgagtgagtgcatttgctgcagtggtggcacgtagagaactagatggtaataaagatttaaaactatgaagaaggttacagtgtaactattttggtactagaaccagttcatgctggccgaaacgacaatggtttatggacttgcatccattttgtatttttgtaatatttgtaaatatgaactttttaaattgctgcaaagatggtttcttttgtaagatgttttcaacgtttacattcaatccaagcctttgtatattttagagctgtgcaacactttaagtcttgtatttatttttagtaaaaatggtgacagtttcattgtgaacccctctcaaaaaaaatgtatcagaaaagtttgattacctagaaagtgtgtatagaaactgcaaataaacgtgactgcaattaaaaaaaaaaaaaaaaaa

SEQ ID NO: 12543 - DNA, 9609 bp, Homo sapiens
gacccgggcggcggcggcggtcgaggagctcccatggcagggacgaggcggagggaaggcgaaaggggggcgaggagttaagccagagcctccgcggggcgggtttccgagggaggcacagagggaaacggctctcgcagcccgaggagggtcaggcgcggagcttgtcgcacctcccgcgcattctgtccagcccgggctccggagatgcatctgcatcaggtcctcaccggagctgtcaaccctggagacaactgctactccgtgggcagcgtcggggatgtccccttcacggcatatggatcaggctgtgatattgttattttggcaaatgactttgaatgtgtacagatcattcctggtgctaagcatggaaacatccaagtcagctgtgtggagtgttctaaccaacaaggaagaattgcagcttcatatggtaatgctgtttgtatatttgagcccttgggcataaattctcataaaagaaattgtcaactcaagtgccagtggcttaaaactgggcagttttttttgagttctgtgacatacaacttagcatgggatcctcaagataatagattgttgacaacaactgattctattcagttgtgggctcctccaggagatgatattctggaagaggaggaagaaattgataatacagttcctcctgttttaaatgattggaagtgtgtctggcagtgcaaaacctcagtatctgtacatttgatggaatggtctcctgatggtgaatattttgctactgctggaaaggatgattgtcttttgaaagtgtggtatcctatgactggttggaagtcttcaattatacctcaggatcatcatgaagtaaaaaggagacagtcctctactcaattttcttttgtttacttggcacatccccgagctgtgacaggtttttcgtggcgcaaaactagcaagtatatgcccaggggttctgtctgtaatgtgttgttaacttcatgtcatgatggtgtgtgccggctctgggcagaaactttattaccagaagactgtcttttgggtgagcagatttgtgagactaccacttccagcattgccagcagcctttctcatgctggaagacacaaagacagaatacagcatgctcttgagacaatacaccatttgaaaaatttaaggaaaggacagaggaggtcatctgttcttgtaactcatgctgaattaatgcccgaccagacagcaatgcatgaagttcaaagacacatttcccaccatgcaaatgcactctgtcattttcatattgcagcaagcatcaaccctgccacagatattccaaatgtcttggttggcactgcatttaatgttgatgatggaaatgggggctttgtagttcattggttaaacaacaaggaatttcattttacatcatctacagaagtatttatgcatcaattacgaaaactttctgataagcaggtagatcatgaaaatgatgatgcagatagagaagatgaggaacattcacaggaggatagagaacggggtttacatatgaaattagaccatgatttatccctggatagagaatctgaggcaggtacaggatcatcagaacatgaagatggagaaagagaaggaagtcctagaacttactcacgacttagtgtaccaatgccactgcctacggttctgcttgatcggaagattgaaacgctgctaactgaatggaataagaatcctgatatgctttttacaatacaccctgtagatggtacctttctagtgtggcatgtgaagtatttggatgaatataatcctggaatatttagacaagttcaggtttctttttcttctcggattcctgttgcatttccctctggtgatgcaagctctcttagtaaaaatatcatgatgtatgcctgtataaatgcgacaaaagattctcaccacacgctgttacaccaggaggggatgtctgtaggcagtcctcacggatcacagccacactctagatcccacagtacacatatgaacatcttagctcccacagtaatgatgatctctaaacacatagatggttctttaaatcagtgggcagtcacttttgctgataagtctgcctttaccactgttctaactgtatctcacaaatttagatattgcggtcatcgatttcacctcaatgacctggcatgtcattcagttttaccactgttattgacatcctctcatcataatgctctattgactcctgaattagattgtcagtgggactcagacaataaattaagtagattaatggaccctgtaaaacatataaaaggttcctcgaaacaacctcttagaaatgcagcaactcgtacatttcatgacccaaatgcaatctacagtgaacttattctgtggcgtgtagacccaataggacctttgtcatacactggaggagtatcagaattggctcgaattaactctttacatacctcagcgttctctaatgtggcttggcttccaactctcattcccagttactgtctaggcacatactgcaattctgcaagtgcttgctttgttgcttctgatggcaaaaatctgagactctatcaagctgtagtggatgcaaggaaattattagatgaattgtcagacccagaatcttcaaaacttattggagaagtgtttaatattgtgagccaacagtctactgctcgacctggctgcattattgaactcgacgcaataaccaaccaatgtggctcaaatacacagttgcttcatgtgtttcaagaagacttcattataggatataaaccacataaggaagatatggagaaaaaggaaacagaaatattttttcagccatcacaaggataccgcccaccaccattttcagaaaagttctttctagtagtaattgagaaggacagcaataataactctattctgcatatgtggcaccttcatcttaaatctgtacaagcatgtttagctaaagcttcagaaggggcttcctctgagagtctactttcagtccctggacagaagaacgtagattcttctccagaaacctctcctagtgtgagccccatgccacattcttcatcaattgccaatcttcaaactgccagtaaacttattctgagttttagactggtgtatagccaaccccttgatctcccagaatcagttgaagtaataagagcaacgccttcagcaggccatctgagttcttcttcaatttatccagtgtgccttgcaccttatttagtggttacaacttgttctgacaataaagtacgcttctggaaatgttgtatggaagccaacccagagtgtaataaaagtgatgagaaagaaatttatcattggaagagatggcctttgatgaatgatgaaggagaagataatagcagtacagtgagcattgtgggaagaccagttgctgttagctgttcatacacaggtcgccttgcagtggcttataagcagcctatccaccataatggttttgtttctaaagaattttccatgcatgtttgtatatttgaatgtgaatctacaggaggatcagagtgggttttagaacaaacaattcatcttgatgatttggttaaggttgggagtgtacttgattcaagggtcagcgtcgacagtaatctgtttgtgtatagcaagtcagatgcactcttgagcaaggatagatatcttattccgaatatcaaacatttagtacatttggactgggtatcaaaagaagatggctcccacattcttacagtgggagtcggtgcgaatatcttcatgtatggaaggctttcaggaattgtgactgagcaaaccaacagtaaggatggagtagctgtcatcactttaccactaggtggtagtatcaagcaaggagttaagtcaagatgggttcttcttagatctatagacttggtatcttctgttgatggtactccttcactgcctgtttctctctcttgggtaagagatgggatattggtggtaggaatggattgtgaaatgcatgtatatgcacagtggaagcatgctgtcaaatttggagacactgaagctgatagttctaatgcagaagaggcagcaatgcaagatcattcgacctttaaatctaatatgctggcaagaaaaagtgttgttgaaggaacagctatttctgatgatgttttttgttcaccaactgtaattcaagatggtggcttatttgaggctgcacatgtactttcccctactcttccacaatatcatccaactcagctgttagaattgatggatttagggaaagtgcgaagggctaaagccattctctctcatttagtaaaatgtattgcaggtgaagtagcaatagttagagatcctgatgctggagaaggaactaagcgacatctctctcgaactattagtgtaagtggcagtacagcaaaggaaacagtcaccgtaggaaaagatggtactcgagattatactgagatagattctatccctccactaccactatatgcattacttgctgcagatcaagatacatcctacagaatttcagaagaaagtacaaagataccacagagctatgaagatcagacagtaagtcaaccagaggatcagtattcagagctgtttcaaatccaggatataccaacggatgatattgatttagagcctgaaaagagagaaaacaaatcaaaagtaataaatctttctcaatatggaccagcttactttggccaagaacatgcaagggtactttcaagtcatcttatgcactcaagtctaccaggccttacccgtttggagcagatgttccttgtagctttggctgatacagtggctactactagtactgagcttgatgaaagcagagataagagttgctcaggaagagatacattagatgagtgtggtttgagatacttgttagctatgcgcctacacacatgccttttgacatcgctgcctcctttataccgagtgcagctacttcatcaaggtgtctctacatgccattttgcctgggcttttcattctgaggctgaagaagaactgattaatatgattccagcaattcagagaggggacccccagtggtctgaattaagagctatgggcataggatggtgggtgaggaacattaacacgcttcgaagatgcattgaaaaggttgccaaagcttcttttcaaaggaacaatgatgccttagatgctgcactattctacctttcaatgaagaagaaagcagtagtgtggggtctgtttaggtcacagcatgatgaaaaaatgacaacatttttcagccacaactttaatgaagatagatggcgaaaagctgctttgaaaaatgctttttccttacttggaaaacaacgctttgaacaatcggctgcttttttcttgctagctggttcattgaaagatgccatagaggtatgtcttgaaaaaatggaagatattcagctagccatggttattgcccgtttatatgaatctgaatttgagacttcatccacttatatatccatcctaaatcagaagattttgggttgccaaaaggatggctcaggattcagttgcaaaagattacatcctgatcctttcctgcgtagtcttgcctattgggtaatgaaagattacacccgagccttggacacattactggaacaaacaccaaaggaggatgatgaacatcaagttatcatcaagtcttgtaacccggtggcatttagtttttataactaccttcgaactcatcctttgctcattcgaagaaatcttgcctcccctgaaggaactttggcaaccttaggtctcaaaactgagaagaactttgttgataaaattaacctcatagaaagaaaattattctttaccactgcaaatgctcattttaaagttggatgccctgttttagccttggaggtactctccaaaattccaaaagtaaccaaaacatctgccttatctgcaaaaaaagatcagcctgacttcatttctcacaggatggatgatgtaccttcacattcaaaagctctgagtgatggcaatggaagttctggcattgaatggtcaaatgtaacttcatcacagtatgactggagtcagccaatagtaaaagttgatgaggaacctcttaatcttgattggggtgaagatcacgacagtgccttagatgaagaggaagacgatgctgttggtttagtgatgaaaagtacagatgccagggaaaaagataaacaatcagatcagaaggcctcagaccctaacatgttattaacacctcaggaagaggatgatcctgaaggtgatactgaagttgatgtgattgctgaacaactaaaattcagagcttgtttaaagatccttatgactgaattaagaacattggctacaggttatgaagtagatggaggaaaactcagatttcaactctataactggcttgaaaaggaaattgctgccttgcatgagatatgtaatcatgaatcagttattaaagagtattccagtaagacatattccaaagtagagagtgatctgctggatcaggaagaaatggtagacaaaccagatattggttcctatgagcgccatcaaatagaaagaagaagattgcaggccaaacgagagcatgcagaaagacgaaagtcgtggttgcagaaaaaccaagatctcctgagagtatttctcagctactgtagccttcatggggcccaaggtggtggtttggcttcagtaaggatggaactcaaatttttgctacaagaatcacaacaggaaactacagtaaagcagctccagtctccactaccactgcctaccaccctacctctgctttcagcaagtattgcgtcaacaaaaacagtcatagctaatcctgtattgtacttaaataatcacatccatgatatactttatactattgttcagatgaaaacaccacctcatcccagtattgaagatgtgaaggtgcacacacttcattcactagcagcatcactttctgcatcaatttaccaagcattatgtgacagtcatagctacagtcaaacagaaggaaatcagtttacaggaatggcttatcaaggacttcttttaagtgatcgtagaagactaaggacagaaagcattgaagaacacgcaacaccaaattcatctcctgctcaatggcctggtgtgagctcacttattaatcttttgagttcagcccaagatgaagaccagccaaaactgaacattttgctatgtgaagctgttgttgctgtttacttaagtttattgatacatgctcttgccacaaattcctccagtgaattatttcggcttgcagcccacccattaaataatcgaatgtgggctgctgtttttggaggcggtgtaaaacttgttgtgaaacctcgaagacaatcagaaaatatttcagcacctcctgtcctttctgaagacatagataaacaccgtaggagatttaacatgagaatgctcgtccctggaaggcctgtaaaagatgctaccccaccaccggtgcctgcagaaagaccatcttacaaagaaaaatttattcctcccgaacttagtatgtgggattattttgttgcaaagccatttcttcctttgtctgatagtggtgttatatatgattctgatgaaagcattcatagtgatgaagaagatgatgcctttttttcagatacacaaatacaggagcaccaagatccaaattcctatagctgggctcttctacatttgacaatggttaaactagcacttcacaatgtcaagaatttctttcctattgctggactggaattctctgagctgcctgtaacatcaccattaggtattgctgtgattaaaaacttggagaactgggaacagatcttgcaagagaaaatggatcagtttgaaggtccaccccctaactatatcaacacatatccaactgacctttcagtgggagctggaccagctattcttcgaaataaagcaatgctagaacctgaaaataccccattcaagtcccgggattcttctgcatttccagtcaaacgactttggcatttccttgttaaacaagaggtccttcaagagacatttattagatatattttcactaagaaaagaaagcagagtgaggttgaagctgatctgggctatccaggtggaaaggcgaaagtcatccataaggaatctgatatgatcatggcattttctgttaataaggcaaattgtaatgaaattgttttggcttcaacacatgatgttcaagaacttgatgttacttctctactggcctgtcagtcatacatatggatcggagaagaatatgacagagaatccaaaagttcagatgatgttgattatcgtggttccactacaactctttatcaacccagtgcaacatcctattcagcaagtcaggtgcatccaccttcatctctgccatggctgggcactggacagactagcactggagctagtgtgcttatgaaaaggaatctacataatgttaagagaatgacttcacacccagtccatcaatactatcttacaggtgctcaggacggcagtgtacgaatgtttgaatggacgcggcctcagcaacttgtctgctttcgtcaagctggcaatgcaagagttactagattatattttaattcacaaggcaacaagtgtggtgttgcggatggagagggttttctgagtatctggcaagttaaccaaactgcatcaaatcctaaaccttatatgagttggcagtgccacagtaaagccacaagtgactttgcatttattacctcttcaagtctagttgccacatctggacactccaatgacaatagaaatgtttgcctctgggacacattaatatcacccggaaacagcctcattcatggtttcacgtgccacgatcatggtgccacggtactgcagtatgcacccaaacagcaactcctaatctcggggggtaggaaaggacacgtctgcatttttgacatcaggcaaaggcagctcattcacacgttccaggcccatgactcagctattaaggctctggccttggatccctatgaggaatattttaccacaggttcagcagaaggtaacataaaggtttggagattgacaggccatggcctaattcattcatttaaaagtgaatatgctaagcagtccatatttcgaaacattggggctggagtcatgcagattgacatcatccagggcaatcggctcttctcctgtggtgcagatggcacgctgaaaaccagggttttgcccaatgcttttaacatccctaacagaattcttgacattctataaagattggggttttatttttatatacatttcagttaaaaggcacactacagtcatcactaggcaattctgctttctaagcagttgtattgaaaacagagaatctctgtgtagatttgaatatgacccaagctgagtattatctaaacaggttggtggaatgaatgcgcatgtaccttattatgctgacatactaaaaaaaataaaacctagtattgtatgaaggatagctattctttacagcatttagcaaacctgattcagaaaacatttgagattagcaaattagtaact

SEQ ID NO: 12544 - DNA, 2075 bp, Homo sapiens
ctcttttgaagattttaagaacttagcctcctgaacagtcttcttcgaaagtgaaaagtggtaacagctgatgagtatcaagaaattattttctgcaaaggggcagagttaattgtatttggaacccatgacagcacctactggggaaagacttctaagtgaggagaaacggctctacaggtcatgaaactatggaaatgagatggtttttgtcaaagattcaggatgacttcagaggtggaaaaattaacctagaaaaaactcagaggttacttgaaaaattagatattcggtgcagttatattcatgtgaaacagatttttaaggacaatgacaggctgaaacaaggaagaatcaccatagaagaatttagagcaatttatcgaattatcacgcacagagaagaaattattgagattttcaacacatattctgaaaaccggaaaattcttttagcaagtaatctggctcaatttctgacacaagaacaatatgcagctgagatgagtaaagctattgcttttgagatcattcagaaatacgagcctatcgaagaagttaggaaagcacaccaaatgtcattagaaggttttacaagatacatggattcacgtgaatgtctactgtttaaaaatgaatgtagaaaagtttatcaagatatgactcatccattaaatgattattttatttcatcttcacataacacatatttggtatctgatcaattattgggaccaagtgacctttggggatatgtaagtgcccttgtgaaaggatgccgttgtttggagattgactgctgggatggagcacaaaatgaacctgttgtatatcatggctacacactcacaagcaaacttctgtttaaaactgttatccaagctatacacaagtatgcattcatgacatctgactacccagtggtgctctctttagaaaatcactgctccactgcccaacaagaagtaatggcagacaatttgcaggctacttttggagagtccttgctttctgatatgcttgatgattttcctgatactctaccatcaccagaggcactaaaattcaaaatattagttaaaaataagaaaataggaaccttaaaggaaacccatgaaagaaaaggttctgataagcgtggagacaatcaagacaaggaaacaggggtaaaaaagttacctggagtaatgcttttcaagaaaaagaagaccaggaagctaaaaattgctctggccttatctgatcttgtcatttatacgaaagctgagaaattcaaaagctttcaacattcaagattatatcagcaatttaatgaaaataattctattggggagacacaagcccgaaaactttcaaaattgcgagtccatgagtttatttttcacaccaggaagttcattaccagaatatatcccaaagcaacaagagcagactcttctaattttaatccccaagaattttggaatataggttgtcaaatggtggctttaaatttccagacccctggtctgcccatggatctgcaaaatgggaaatttttggataatggtggttctggatatattttgaaaccacatttcttaagagagagtaaatcatactttaacccaagtaacataaaagagggtatgccaattacacttacaataaggctcatcagtggtatccagttgcctcttactcattcatcatctaacaaaggtgattcattagtaattatagaagtttttggtgttccaaatgatcaaatgaagcagcagactcgtgtaattaaaaaaaatgcttttagtccaagatggaatgaaacattcacatttattattcatgtcccagaattggcattgatacgttttgttgttgaaggtcaaggtttaatagcaggaaatgaatttcttgggcaatatactttgccacttctatgcatgaacaaaggttatcgtcgtattcctctgttttccagaatgggtgagagccttgagcctgcttcactgtttgtttatgtttggtacgtcagataacagctaatgataaatgacatatcattagctatgcatcgcaataaaacagccaaaatg

SEQ ID NO: 12545 - DNA, 3584 bp, Homo sapiens
ggccgccctcgctctttatccactgagcagcttatccactttaggtcggaaaggaaaggaaagaaaagcaggaaaaaaaaaaaagtcaggggaacatttttgtcggctgcgcgactcgactacttttgtctcctgcgggccactgttgagccttcacgagacgtcactgtcttcggtcgcggggcatcgtgggtaggagggagatttgctctcactgctcccaaaaatggcggacgcattcggagatgagctgttcagcgtgttcgagggcgactcgaccactgcggcgggaaccaaaaaagacaaggaaaaggacaaggggaaatggaaggggcctccagggtctgcagacaaggcagggaaacgttttgatggtaaattacaatcagaatcaactaataatggaaaaaataagagagatgtagatttcgaaggtacagatgaacccatttttggaaagaagcccaggatagaagagtcaataactgaagacttaagtttggcagacctgatgcccagagtcaaggtacaatcagttgaaactgttgaagggtgtacacatgaggttgcacttcctgcagaagaggattatttaccacttaaaccacgagttggaaaagctgctaaggaatacccgttcattcttgatgcttttcaaagagaggccattcagtgtgttgacaataatcagtctgttctagtatctgcacatacctcagcgggaaaaacagtatgcgccgagtatgccattgcattggccttaagggaaaagcagcgtgtaatatttaccagcccaattaaggctctgagtaaccaaaaataccgtgaaatgtatgaagaatttcaagatgttggtttgatgactggtgatgttactattaatcctacggcatcttgtcttgttatgaccacagagattttgagaagtatgctttacagaggttccgaagttatgagagaagttgcttgggttatatttgatgaaattcattatatgagagattcagaacgtggtgtagtatgggaagaaactattattttgcttcctgataacgtccactatgtctttctttcggctactattccaaatgcccgacagtttgctgaatggatttgccatttacataaacagccttgtcatgttatttacacagattatcggcccactccattgcaacactacatttttccagcagggggagatggcctgcatcttgtggttgatgaaaatggtgacttcagagaagataattttaatactgcaatgcaagtgcttcgagatgcaggtgatttggccaaaggagaccagaaagggcggaaaggaggaacaaaaggaccatcaaatgttttcaaaattgtgaagatgattatggaaagaaatttccaacctgtgattattttcagttttagtaagaaagattgtgaagcctatgcacttcaaatgaccaaattagatttcaacacagatgaagaaaagaagatggttgaagaagtattcagtaatgcaattgattgcttatccgatgaagataaaaaactccctcaggtagaacatgtacttcctcttttgaagaggggaattggtattcaccatggtggtttacttcctattttgaaagaaactatagaaattctcttttctgaaggattgataaaggccttatttgccacggagacctttgctatgggaattaacatgccagctagaactgttttatttacaaatgcccgcaaatttgatgggaaggatttccgatggatttcttctggtgaatacattcagatgtctggtcgtgctggaaggagaggaatggatgatagaggaattgtaattcttatggtagatgaaaagatgagcccaacaattggaaaacaattacttaagggctccgctgatcctctaaatagtgctttccatttgacctacaacatggttttgaacttactacgtgtagaagaaattaatcctgagtacatgttggaaaaatccttctaccagtttcagcattatagagcaattccaggagtagtagagaaggtaaagaattcagaagaacagtataataaaatagtaattcccaatgaagaaagtgtggttatctattataagattagacagcagcttgccaaattgggtaaagaaattgaagaatatattcacaaaccaaaatactgcttaccttttctacaaccaggtcgtttggtaaaggtaaagaatgaaggagatgactttggctggggagtagtggtgaatttctcaaaaaagtcaaatgttaagcctaactctggtgaactggatcctttgtatgtagtagaagtacttctgcgctgtagcaaagagagcttgaaaaattcagctacagaagctgcaaaaccagctaaacctgatgggaaaggagagatgcaggttgtcccagttttggtgcatctcctgtctgctatcagcagtgttaggctttacattcctaaagaccttcggccggtggacaatagacagagtgttttaaaatcaatacaggaagttcagaaacgttttcctgacggcatccccttattagaccctattgatgatatgggcattcaagatcaagggctgaaaaaagtcattcagaaagtagaagcttttgagcatcgaatgtattctcatccacttcacaatgatccaaatttggaaactgtgtatacgctttgtgaaaaaaaagcacagattgcaatagatattaaatctgcaaagcgagaactgaagaaagcaagaacagtcctacaaatggatgaactcaaatgtcgcaaacgtgttttaagaaggttgggatttgctacttcttctgatgtaatagagatgaaaggacgagtggcttgtgagataagcagtgctgatgagctccttctaactgagatgatgtttaatggccttttcaatgacctttctgcagaacaggcaacagcattattaagctgctttgtgtttcaagagaattctagtgagatgcccaaattaacagaacgattagcaggaccacttcgtcaaatgcaggaatgtgctaaaagaattgcaaaagtttcagcagaagccaaattggaaattgatgaggaaacttatctaagctcatttaaacctcacttaatggatgtagtatatacctgggcaactggagctacatttgcccatatctgcaaaatgacagatgtctttgaaggcagcataattcgttgtatgaggcgcctggaagaattgcttcgacaaatgtgtcaagcagcaaaagccattggaaacactgagctggaaaataaatttgcagaaggaatcaccaaaatcaagagagatattgtgtttgctgccagcctctacttgtagagtcagctaaaggaatgtgagattttaaattattgaccacctgtttgattacagttgactacaaatgcctgcaagtgtggatttggttctcccatacattttaatatgtattatatttaaatcaaacatcattcatagaaagcatattacatacatgtttatacataagcattacatttttttaataaaaatgtatacaggtgggtaaaaaaaaaaaaaaaaaaaaaaa

SEQ ID NO: 12546 - DNA, 2893 bp, Homo sapiens
ggtctgaagcggcactggagacccaggaaaaatctcgctgaatccgcctgccccagcagcggcctgatctgggttccgctgattcctttcgtaaccgcaccacacccgagatgaatctacgttctgtatttactgtagaacaacaaaggattttacagcgttattatgaaaatggaatgacaaatcaaagtaaaaattgctttcagctcatattacagtgtgcacaggagactaagctggacttcagtgtagtcaggacgtgggttggcaataagagaagaaagatgagtagtaagaactctgaatctggaacagcaacaacaggaacctctttgtcagctccagacatcacagtcagaaatgtggttaatattgctcgaccctcaagccagcagtcttcttggacatctgccaataatgatgtcattgtaactggtatatacagtccagccagttcatcaagtaggcaaggaacaaacaaacatacagacacacaaattacagaagcacataaaatccctattcagaaaacagccactaaaaatgatactgagtttcagttacacattcctgtccaaagacaagtagcacactgtaaaaatgcttccctactcctaggtgaaaaaacaattattttgtcaagacagacaagtgtgctaaatgctggaaactcagtattcaatcacgcaaagaaaaactatggaaactcttcagtacaagcttctgaaatgacagtacctcaaaagccttctgtgtgccaccgaccttgtaaaattgaaccagttgggattcaaaggtcatataagcctgaacacacaggcccagcattacataacttatgtgggcaaaagccaactattagagacccttactgtagaacacaaaacttggaaatccgtgaagtgttttcattggcagttagcgattacccccagagaattctgggaggaaatgccccacagaagcctagctcagcagaaggaaattgtttgtccattgcaatggagactggagatgctgaggatgaatatgccagagaggaagagctggcatcgatgagagcacagataccaagctattcgagattttatgaaagtggcagttcccttcgagctgagaaccaaagtacaaccttgcccggaccaggaagaaatatgccaaattcacaaatggtgaatattagagatatgtcagacaatgtactgtatcaaaacagaaactaccatttgacaccacggacctcattacatacagcatctagtacaatgtacagtaataccaatccattacggagtaatttttctcctcattttgcatcatcaaaccaattgagattatcacaaaaccaaaacaattaccagatttcaggaaaccttactgtgccttggattacagggtgttctagaaaaagagcactacaggaccgcactcagttcagtgaccgagacttagccacccttaagaagtattgggacaatggcatgaccagcctgggctctgtttgtagagagaaaattgaagctgtggcaactgaattaaatgttgactgtgaaatagttcggacttggattgggaatcgaagaaggaaatatcgtttaatggggattgaagttccacctccaagaggaggccctgctgatttctctgagcagcctgagtctggttctttatctgcactcacaccaggagaggaagctgggcctgaagtaggagaggataatgacagaaatgatgaagtatccatctgtttgtctgaaggaagctctcaagaagagcccaatgaagttgttccgaatgatgcaagggctcataaggaagaggaccaccatgcagtaaccacagataatgtgaaaatagaaattattgatgatgaagaaagtgacatgataagtaattctgaagtagaacaagtaaactctttcttggattataagaatgaagaagtcaaattcattgaaaatgagctcgagattcaaaagcaaaaatactttaaacttcagacttttgttagaagcttgatattagcaatgaaagctgatgataaggaacaacagcaggcactgctgtcagatttacctcctgaattagaggaaatggatttcaatcatgcctcactggagcctgatgatacctcattcagtgtatcttctttgtcagagaaaaatgtctcagaaagtttgtgatttcagttggagggaatatatgatacagtcttttggcttcgtaacaggtgtgcatttcaagataactgcattctgttgccctggtattctttagttgggaaaacacattgttgaaacggacgtattctgtgaagaatgtacaagatataatggctacagtgcaacaaaaatgtaggtgaaatttaaaagcattgtttgagagagtatttttttaactgatggaactctggaaaaaaattatatttaagtttcagcagtttaaccctgaaattcattatgtctaatttctaaccagagacaaaataactaaagacatttcagcattgcttatcaagttgctacagcttgattagtcttgtttttgtagccattacatcttctttcttcttctctccttttcctatcatccacttacactttttctcaggaaagtggactgaacatttaaaacaaaactttaaaaaattatttaactcattatttaatgagttctctgatttagtttttaacccctatgaaaatttgacttaaactaatgactgaaaattaaatgattacaggtatgtaattgtaaattgctggtgttcttctattatctaacccaaatatttgtgtgggggtggggaagcacaatggaaaggtaatttaaccaacataacgtcaaataaattacgaagtgtacagaaacgaaaaaaaaaaaaaaaaaaaca

SEQ ID NO: 12547 - DNA, 4052 bp, Homo sapiens
gaggcaagtgaggagagaagatgctgtagcgtcctcaccggctgccagcagggaaatggtccaggagtgctgggtgtgagcctcccttctcctcaagccggagactgcggttgtcattgatcaattgaagaagcaaggacccgaaatcacagacattagcaatgatgtgtgaagtgatgcccacgattaatgaggacaccccaatgagccaaagggggtcccaaagcagtggctcggactcagactcccattttgagcagctgatggtgaatatgctagatgaaagggatcgtcttctagacacccttcgggagacccaggaaagcctctcacttgcccagcaaagacttcaggatgtcatctatgaccgagactcactccagagacagctcaattcagccctgccacaggatatcgaatccctaacaggagggctggctggttctaagggggctgatccaccggaatttgctgcactgacaaaagaattaaatgcctgcagggaacaacttctagaaaaggaagaagaaatctctgaacttaaagctgaaagaaacaacacaagactattactggagcatttggagtgccttgtgtcacgacatgaaagatcactaagaatgacggtggtaaaacggcaagcccagtctccctcaggagtatccagtgaagttgaagttctcaaggcactgaaatctttgtttgagcaccacaaggccttggatgaaaaggtaagggagcgactgagggtttctttagaaagagtctctgcactggaagaagaactagctgctgctaatcaggagattgttgccttgcgtgaacaaaatgttcatatacaaagaaaaatggcatcaagcgagggatccacagagtcagaacatcttgaagggatggaacctggacagaaagtccatgagaagcgtttgtccaatggttctatagactcaaccgatgaaactagtcaaatagttgaactacaagaattgcttgaaaagcaaaactatgaaatggcccagatgaaagaacgtttagcagccctttcttcccgagtgggagaggtggaacaggaagcagagacagcaagaaaggatctcattaaaacagaagaaatgaacaccaagtatcaaagggacattagggaggccatggcacaaaaggaagatatggaagaaagaattacaacccttgaaaagcgttacctcagtgctcagagagaatctacctccatacatgacatgaatgataaactagaaaatgagttagcaaataaagaagctatcctgcggcagatggaagagaaaaacagacagttacaagaacgtcttgagctagctgaacaaaagttgcagcagaccatgagaaaggctgaaaccttgcctgaagtagaggctgaactggctcagagaattgcagccctaaccaaggctgaagagagacatggaaatattgaagaacgtatgagacatttagagggtcaacttgaagagaagaatcaagaacttcaaagagctaggcaaagagagaaaatgaatgaggagcataacaagagattatcggatacggttgatagacttctgactgaatccaatgaacgcctacaactacacttaaaggaaagaatggctgctctagaagaaaagaatgttttaattcaagaatcagaaactttcagaaagaatcttgaagaatctttacatgataaggaaagattagcagaagaaattgaaaagctgagatctgaacttgaccaattgaaaatgagaactggctctttaattgaacccacaataccaagaactcatctagacacctcagctgagttgcggtactcagtgggatccctagtggacagccagtctgattacagaacaactaaagtaataagaagaccaaggagaggccgcatgggtgtgcgaagagatgagccaaaggtgaaatctcttggggatcacgagtggaatagaactcaacagattggagtactaagcagccacccttttgaaagtgacactgaaatgtctgatattgatgatgatgacagagaaacaatttttagctcaatggatcttctctctccaagtggtcattccgatgcccagacgctagccatgatgcttcaggaacaattggatgccatcaacaaagaaatcaggctaattcaggaagaaaaagaatctacagagttgcgtgctgaagaaattgaaaatagagtggctagtgtgagcctcgaaggcctgaatttggcaagggtccacccaggtacctccattactgcctctgttacagcttcatcgctggccagttcatctccccccagtggacactcaactccaaagctcacccctcgaagccctgccagggaaatggatcggatgggagtcatgacactgccaagtgatctgaggaaacatcggagaaagattgcagttgtggaagaagatggtcgagaggacaaagcaacaattaaatgtgaaacttctcctcctcctacccctagagccctcagaatgactcacactctcccttcttcctaccacaatgatgctcgaagtagtttatctgtctctcttgagccagaaagcctcgggcttggtagtgccaacagcagccaagactctcttcacaaagcccccaagaagaaaggaatcaagtcttcaataggacgtttgtttggtaaaaaagaaaaagctcgacttgggcagctccgaggctttatggagactgaagctgcagctcaggagtccctggggttaggcaaactcggaactcaagctgagaaggatcgaagactaaagaaaaagcatgaacttcttgaagaagctcggagaaagggattaccttttgcccagtgggatgggccaactgtggtcgcatggctagagctttggttgggaatgcctgcgtggtacgtggcagcctgccgagccaacgtgaagagtggtgccatcatgtctgctttatctgacactgagatccagagagaaattggaatcagcaatccactgcatcgcttaaaacttcgattagcaatccaggagatggtttccctaacaagtccttcagctcctccaacatctcgaactccttcaggcaacgtttgggtgactcatgaagaaatggaaaatcttgcagctccagcaaaaacgaaagaatctgaggaaggaagctgggcccagtgtccggtttttctacagaccctggcttatggagatatgaatcatgagtggattggaaatgaatggcttcccagcttggggttacctcagtacagaagttactttatggaatgcttggtagatgcaagaatgttagatcacctaacaaaaaaagatctccgtgtccatttaaaaatggtggatagtttccatcgaacaagtttacaatatggaattatgtgcttaaagaggttgaattatgacagaaaagaactagaaagaagacgggaagcaagccaacatgaaataaaagacgtgttggtgtggagcaatgaccgagttattcgctggatacaagcaattggacttcgagaatatgcaaataatatacttgagagcggtgtgcatggctcacttatagccctggatgaaaactttgactacagcagcttagctttattattacagattccaacacagaacacccaggcaaggcagattcttgaaagagaatacaataacctcttggccctgggaactgaaaggcgactggatgaaagtgatgacaagaacttcagacgtggatcaacctggagaaggcagtttcctcctcgtgaagtacatggaatcagcatgatgcctgggtcctcagaaacattaccagctggatttaggttaaccacaacctctgggcagtcaagaaaaatgacaacagatgttgcttcatcaagactgcagaggttagacaactccactgttcgcacatactcatgttgaccagccactcaaaggaggcagcactgacctgctatggcgtcttttcagtctactctacctaaagtgcactaccatctaagaagacgagcagtgaaaacctttgtgaaaactgaattc

SEQ ID NO: 12548 - DNA, 5185 bp, Homo sapiens
cgggggtgcggctccaggaaacggcgcgctcccagctccgcgctcgccacccgacgcgccccaggcgaccccgcagactcagccagaccaccctgcgggccccagcggcggcagcggagagcgcggtcccgggtcggagcctgggacacctccgcacggacggggcgggcggcgcggacaggccatggggacccgggccgggccagcggtggcgggccagcgggagccccgggcctgagaagtgggcggcggggtggcgggggccatgacctcggtgtggaagcgcctgcagcgcgtgggcaagcgggcggccaagttccagttcgtggcctgttaccacgagctagtgttggagtgcaccaagaaatggcagccagataagctggtggtggtatggacccgtcggaaccgacgcatctgctccaaggcccacagctggcagccgggcatccagaacccataccggggcaccgtggtgtggatggtacctgagaatgtggacatctctgtgaccctctacagggacccccacgtggaccagtatgaggccaaagagtggacatttattattgaaaatgagtctaaggggcagcggaaggtgctggccacggccgaggtggacctggcccgccatgcagggcccgtgcctgtccaagtcccagtgaggctgcggctgaagccaaagtcagtgaaggtggtgcaggctgagctgagcctcactctttccggggtgctgctgcgggagggccgtgccacggacgatgacatgcagagtctcgcaagcctcatgagtgtgaagcctagtgatgtgggcaacttggatgactttgctgagagtgatgaagatgaggctcatggcccaggagccccggaggcccgggctcgagtcccccagccagatccctctcgagagctgaagacgctttgtgaggaggaggaggaaggccaaggacgaccccagcaggcagttgccagcccttctaatgctgaggataccagcccagcccctgtgagtgctcctgcacccccagccagaacctcccgaggccaggggtcagaacgagctaatgaagcggggggccaggtaggccctgaggccccaaggcccccggaaacctcaccagagatgaggtcttcaaggcagccagcccaggacacggcccccaccccagcccctcggctccggaaaggctctgatgccctccggcccccagtcccccagggggaagatgaggtccccaaagcctcaggggctcctccagcaggattgggctctgctagggagacccaggcccaggcatgccctcaggaagggacagaagcccatggagctaggctgggcccgagcattgaggataaaggttctggagacccttttggaaggcagagactcaaggctgaagagatggacactgaggacaggccagaggccagtggggtggacactgagccaaggtcaggaggcagagaggcaaacactaagaggtcaggagtcagagctggggaggctgaagagagttcagcagtttgtcaagtggatgctgagcagaggtcaaaggtgagacatgtggacactaagggaccagaggcgacaggggtgatgcctgaggcaagatgcagggggacccctgaggctcctccaaggggctctcaggggaggctgggagtcaggaccagggatgaggctccctcaggcctgagcctgcccccagcggagcctgcagggcactctgggcaacttggtgacctcgagggggccagggctgctgcaggccaggagagagagggtgcagaagtgaggggtggagcacctggtattgaggggacaggcctggagcagggcccttctgttggagcaataagcaccaggccccaggtgagcagctggcagggggccctgttatcaactgcccagggggcaatatccaggggtctgggaggctgggaggcagaagctgggggttcaggggacctggaaacagagactgaggtggtagggttggaggtgctgggaacccaggagaaagaagttgaggggtcagggttcccagagactaggacactagaaattgagatattgggggccttggagaaagaagcagcaagatcaagggtcctggagtcagaggttgctgggacagcacagtgtgagggactggagacccaggaaacagaggtgggggtcatagagaccccagggacagagactgaggtattggggacccagaaaacagaagctgggggttcaggagttttgcagacaagaactacgatagcagagactgaggtactggtgacccaggagatatctggggatttagggccactgaagatagaagatacaatacagtctgagatgctggggacccaggagacagaggtggaagcttctagggtaccagagtcagaggctgaggggacagaagctaaaatattagggacccaggagataacagctagggattcaggggtcagagagatagaagcagagatagcagagtctgacatattggtagcccaggagatagaggtgggacttttgggggttctgggaatagagactggggcagcagaaggtgcgatattggggacccaagagatagcatctagggattcaggggtcccagggttagaagctgatacaacagggatccaggtgaaagaggttgggggttcagaggttccagagatagcgactgggacagcagaaactgagatattggggacccaagagatagcatctaggagttcaggggtcccagggctagaatctgaggtagctggggcccaggagacagaggtcgggggttcagggatctcagggcccgaggctggaatggcagaggcccgagtactgatgacccgtaagacagaaattatagttccagaggctgagaaggaagaggctcagacttcgggggtccaggaagcagagactagagttgggagtgctctcaaatatgaggctttaagggccccagtcactcagccaagagttttaggatcccaggaagcaaaagcagagatttcaggagtacaagggtcagagactcaagttctgagagtccaggaggcagaggctggggtttgggggatgtcagagggcaaatctggggcttggggggcccaggaagcagagatgaaggttttagagtctccagagaacaaatctggtacttttaaggcccaggaagcggaggctggggtcttgggaaatgagaaggggaaagaagctgagggaagcctcacagaggccagcctgcctgaagcacaggtggccagtggggcaggggctggggcgcccagggcctcttccccagagaaggctgaagaggacaggaggctgccgggcagccaggcaccacctgccctggtcagctccagccagtccctgctggagtggtgccaggaagtcaccactggctaccgtggcgtccgcatcaccaacttcaccacatcctggcgcaacggcttggccttctgtgccatcctgcaccgattctacccagacaagattgactatgcctcgctagacccactcaacatcaagcagaacaacaagcaggccttcgatggcttcgcggctctgggcgtgtcgcggctgctggagcccgcggacatggtgctactgtcggtgcccgacaagctcatcgtcatgacgtacctgtgccagatccgcgccttctgcaccgggcaggagctgcagctggtacaactggagggcggcggcggcgccggcacgtaccgcgtgggcagcgcccagcccagcccgcccgacgacctggacgccggaggcctggcgcagcggctgcgcggtcacggggccgaggggccccaggagcccaaggaggccgcagaccgcgcagacggggcggccccgggggtggcctccaggaacgcggtcgcgggccgcgcctccaaggacggcggggccgaggccccccgagagtcgcgacccgcggaggtcccggccgaggggctggtgaacggggcgggggcaccgggcggcggcggcgtgaggctgcgacggccctcggtcaacggggagcccgggtcggtgcccccgccccgcgcgcacggctccttctcccacgtgcgcgacgcggacctgctcaagaagaggcgctcgcggctgcggaacagcagctcgttctcgatggacgatccggacgcgggagccatgggagctgcggctgcagaaggccaggcccctgaccccagccctgccccaggcccacccacagctgcagactctcaacagccccctggtgggagttccccctcggaggaaccacccccaagcccaggggaggaggctgggctgcaacggttccaggacacaagtcagtacgtgtgtgcagagctgcaggccctggaacaggagcagaggcagatagatgggcgggcggctgaggtggagatgcagctgaggagcctcatggagtcaggtgccaacaagctgcaggaggaggtgctgatccaggagtggttcaccctggtcaacaagaagaacgctctcatccggaggcaggaccagctgcagctgctcatggaggagcaggacttggagcgaaggttcgagctgctgagccgcgagctgcgggccatgctggccatcgaagactggcagaaaacgtccgctcagcagcaccgagagcagctcctactggaggagctggtgtcgctggtgaaccagcgcgatgagctagtccgggacctggaccacaaggagcggatcgccctggaggaggacgagcgcctggagcgcggcctggaacagcggcgccgcaagctgagccggcagttgagccggcgggagcgctgcgtgctgagctgaggccgccggcccgggtggcccataacttctcgcgtccccggcgtccgccgccgccccgggcctgcgctgcggacgacccggccgtcccggaggccgcgcgcgtgtccgctaggggccgccggcgcccttccccgtacagggcagggcggatccccgaccccacgggcggggcggccgccgtatttatttgtcaccgagggtgtgtgcgcgctcgcggcgggtgcggggtcctccccgacggcacggccgggccggcggcctcggggagagggatgcctgggcactaccgccccgcgctggcttgccctcctgttctccagagcaataaagttggacgagactacccca

SEQ ID NO: 12549 - DNA, 5229 bp, Homo sapiens
cacgtaaagggacagagattgggggacagaaggaagtgcattaattccttccacgacccctgaagagcagcggtgggtctgagcatcctatctccaggaagcaggccagcaggcaagccagctgccacctcgtcctgtgcaaagcacaggcaccgtccccaaaagatttccaaagatgatgttaaacccagccacggttctgatctccaggaaagcaattgctgtggtacaaaaggacaagggttaaaagagaacagtgggagctctctttcccagctaactcacgcagtgtgacgcagaggctttcagcacagcccagggtgcccgggactgaaaactccttcaccagccccctccacaggatatagaagacttagatcactacgagatgaaagcagagcccattagtgggaaaaagttggaggatgaaggaattgaaaaagaaaatttggcaatattagagaaattaggaagactgaaagacaagagcatttaactgcaaactgttgtcgttgtcaactgggttgtcttcctgaagtatgaatccggtatgtattgtgtggaggagcattacgtattgaacttctcacaaaacagggctgaagcagtgcctactcgacagaaccggtcatcgtacaaagaaatgccacgtgactcaaaggcaaagccagagtgcagcttggagcaaagaagatgatgtctcactctgtcacccaagatggagtgcaatggcacgatctcagctcactgcaacctctgcctcccaggttcaagcaattatcctgcctcagccacccgagtagctgagattacaggcctctgccaccatgctcagctattttttgtatttttagtagagacggggtttcaccatgttgggcaggctagtcttggaactactgacctcaggtgatccgcccactttggcctcccgaaagtgctgggattacagtcatgagccaccatgcccagcctatttatttctgattctttaagggtgactggatgtgttgatcagcgctcgctgggatttggctgacgtggccccagccccgcctccctccccaccccacaatggcagaagaaactggacagagtaaattagctgcagccaagaaaaagttcaaagaatattggcagagaaaccgccctggtgttccagcagcagcgaagaggaacacgaaagcaaatggcagtagccctgagacggccgcttctggtggttgccactcatctgaggcttcctcctccgcctcctcctctctgcatgcgcgtcagagcccgtgccaagaacaagcagcagtcctgaactcgaggtccataaaaatcagtcgactgaatgacaccatcaaatctttgaaacaacagaagaaacaagtggaacatcagctggaagaagaaaagaaagcaaacaatgagaaacagaaagctgaaagggagctagagggtcaaatccagagattgaacacagagaaaaagaaactaaatacggacctgtatcacatgaaacattctctcagatactttgaagaagagtccaaggatctggccggccgcctgcaacgttcatcgcagcgtataggagagttagagtggtctctctgtgctgtcgccgccacacagaagaagaagccggatgggttctcgagccgcagtaaagcacttctcaagcggcagttagagcagtccatacgggagcagatactgctgaaaggacacgtgacacagttgaaggagtcgcttaaagaagtccagctggagagagatcaatatgctgaacaaataaaaggagagagggcccagtggcagcagaggatgaggaaaatgtcgcaggaggtttgcacattgaaggaggagaagaagcatgatacgcatcgggtagaggagctggagaggagcttgtccagactcaaaaaccagatggctgagccactgcccccggatgccccagcagtgtcctctgaggtggagctgcaagacctgaggaaggagctggagagagtggcaggagagctccaggctcaggtggaaaacaatcagtgcatcagtctcctgaaccgtgggcaaaaggagaggcttcgcgagcaggaggagaggcttcaggagcagcaggagaggcttcgggaacgggagaagaggcttcagcagctggccgagccacagagcgacttggaggagctgaagcacgagaacaagagcgcactgcagttggagcagcaagtaaaggagctgcaggagaagctgggccaggtgatggagacgctcacctcggccgagaaggagccagaggcagcagtcccagcctcagggactgggggcgagtctagcggccttatggacctcctggaggagaaggcggacctgagggagcatgtggagaaactggaacttggattcatccagtaccggagagagagatgccatcagaaagtacatcgccttctaacagagccaggggacagtgccaaagatgcgtcaccgggaggaggccatcatcaggctggcccaggacaaggaggagaggaaggtgaagctgctggagctgcaggagatggtgttgcggcttgtggcagctacagcgaggggcacggcaaattcctggccgctgcccggaaccctgctgctgaacccagtccaggagccccagccccccaggagctcggggctgccgacaagcatggtgatctttgtgaggcgagcctcaccaacagcgtggagcctgcacaaggagaagccagggagggttcttcccaggacaaccctactgcacagccagtcgtgcagctccttggtgagatgcaggaccaccaggagcacccaggcttgggcagcaactgctgtgtgccatgcttttgctgggcttggctgccgagaagaaggagataaacaccaccatcatcaaagagctgctcaagaaatttttaaaaacgaaacaaagttatggggttaatctcctacacaattcatttacttcatttgaatgttagagctactcatgattatttgtgtttctaatttatagtttaagtttatttgtaaaaagttaaaagagagtgggtctctgtggctctcactgatgttcactctggcatccttcagcatttttcttttttcatttcataattgtaggtcattagcatgcatatcgagtttgcccttacgtggtgggagttcaaacacacaaagacccactctttgcacaaaactgttctcgctggtttggaataggctcccgtgcttttctaatgttattgcagcatggatgtccattacagaattcagataaaatttgctaatgttctgctatgatgtttgatctcatcttaatcacagtgagctcttctatagctcaatatgcggtttgccctcaagtgtgcactgtttattactttgtaatatgccactgtgagtactgacatttagagctgtttaaaggccgagaactggaaacagcctttcctccattttctgtgtattggtgatgggagtgataaccttttgggggagctttctaaatctcacagaagaggaaagtggcctgctctggcaggtatgtgcaggatacagtgtgtttcatctgttccggtgccaagaatgagcagtgtactgtggcagttccctttggatttgtatgtgctctgggctcatgaagatattgcatcgtgagctgcagcagttgcactctttttcagtgacctaaaaagggcttatttccgaggaatgaaaggctgccatcattggctgtgggtgtgaaaaacctttcctagcttagagcatttgtatctacaatacattttaaagtcagagttcgtgttccctgttttaatcacatgactacctgtcccagtacacgaaagggcgctggttggcattcttcttaatgtatttagtgaagatcataagaaatcctttaagagtttaaatgtctctgaaacaggcatacaggctctagtcaagaatgaattagagtgaaggaaagctgtgtgacacctggcattcctctctgttcatggagcttctttgaggcttgaagtttgattttactatctagacctctctggctaatacctattcttcaaccacctcggttactctgacataggaatttacttcttttccttgagtggaaaacactttagaaagtaataacaaacattattataaactaatatatgtgagagtacttagttgaaacaaaaaggaattttagtagacagtattatattatctttgaaaatcaaggagaagtttatgcaacttaaaatgtttacacactgtggtgcaatctactgtttgtgaatgtctgtattatcaggaaacatgtctatacgatcgcagagttgtatttcctcacaaacttctttacgaagagtgaaatacgtttttgtacctctcattttcagtcagggacatactttgtgcaatatttctgtgattgtgcctatgcatgatgaatgaatgcatttcaatcatacattgcctaaatcataacttgatgatgcttgggaaagaatcaacagttaaaacttcatgaagttctaatgtctgtgttccaaaacacatcacattattaggttgtagggagatatgtaggtgtgctccctggggtggggagttttctagttactagaccatctccatttttagcacttggcagcctcatgatccttttataaatgtgagattaacaggagagcagcaatacgattttgccaatggaataacagatttgccggcattcactgaaagagggcagatattgggtccttgtaacttcaactgactcttccaaattgtatgaatttatcaatgtattacacaaatccagtttcagaatgataaaaaatgttagaccaaataatgcggctaattaacagtcgtatgatttctagcccatgggtttaaaactgtatcttaaagagtcattttaaaataatataaatattaaaaaatgtaactgctatcttaatgttctgaaataaaacattttaaaatataaatcctgtagtttaaaaggaagaaatggtgggaaggaaaagtagagaaagaaatgccaattccaggccaaagcgttatttgccaagttttcttagaatgaattttaccaatgtatgagttcttgttaacagaatgtgtaacggaaatactgaaagacttttgcttaaagtggcattattgactgctgatgtgatgctactgtaatgcaataaatttttaaattgttgcaaa

SEQ ID NO: 12550 - DNA, 4966 bp, Homo sapiens
ccacgcgtccgcagaggtttcagcgctgaggaggcctgagttccgtcatggccctctattatgaccaccagatagaagccccggatgcagcagggtcaccctcatttatcagctggcaccctgtccatccattcttggcagttgcttacatcagcacaacctcaacaggcagcgtggatatttacctggagcaaggggagtgcgtgccagatacacacgtcgagaggccgttccgggttgcttccctgtgctggcacccgacgcggctggtgctggctgtgggctgggagactggagaagtgacggtgtttaacaagcaggacaaggagcagcacacgatgcccctgacacacacagccgacatcaccgtgctccgttggagccccagtggaaactgcctgctgtctggggacaggcttggtgtcttgctcttgtggaggttggaccaaaggggccgagtgcaagggacgcctctgctgaaacacgagtatgggaaacacctcacgcactgcatcttccggctcccccctcctggcgaggacctggttcagttggcaaaggcagctgtgagcggtgatgagaaagccctggacatgtttaactggaagaagagcagttctggaagtttgctgaagatggggtctcacgaggggctgttgttctttgtcagtctgatggacgggacagtgcactatgtggatgagaagggcaagaccactcaggtggtgtccgcagacagcacgattcagatgctgttctacatggagaagagggaggcactggtggtggtcacagagaacctccggctgtccctgtacacggtgcctcctgagggcaaagcagaagaagtgatgaaggtcaagctgagcgggaaaaccggccgccgggcagacatcgctttgattgaaggcagccttctcgtgatggccgtcggggaggctgccctcagattctgggacatagaacgaggagagaattatatactgagtccagatgagaagtttggctttgagaaaggagagaatatgaactgtgtgtgttactgtaaagtcaaaggtcttctggccgctggtaccgacagagggcgagtagccatgtggaggaaagtaccagacttcctgggcagccccggggcagagggcaaggacaggtgggcccttcagacccctaccgagctccaaggaaacatcacgcaaatccagtggggttccaggaagaacctgctggcagtgaacagcgtcatctccgtggccatcctcagcgagcgggccatgtcgtcacacttccaccagcaagtggccgccatgcaggtctccccgagtctgctgaatgtgtgcttcctgtccacgggggtcgcacacagcctgcgcaccgacatgcacatcagtggagtgtttgccaccaaggatgctgtcgcagtctggaacggaaggcaggtggcgatcttcgagctttctggagccgcgatacggagtgcagggaccttcttgtgtgagacgcctgtgttagcaatgcatgaagaaaacgtttacacggtggagtcaaaccgagttcaagttcgaacctggcaggggactgtcaaacaactcctccttttctcggagactgaggggaatccctgcttcttggacatctgtgggaatttcctggttgtagggacagacttggctcactttaaaagctttgatctttcccgaagagaggccaaagcacactgtagctgcaggagcctggcggagctggtccctggggtggggggcatcgcttctctgcggtgcagcagcagcgggagcaccatcagcatcctccccagcaaggctgacaacagccctgattccaaaatctgcttctacgatgttgaaatggacacagtgaccgtctttgacttcaagactggacaaattgatcggagagagacgctgtcctttaatgagcaagagactaataagagccacctctttgtggatgagggactgaaaaattatgttcccgtgaaccacttctgggaccagagtgagccccggctgtttgtatgcgaagccgtgcaggagacgccgcgctcccagcctcagtctgcaaacgggcagccccaagatgggcgcgctggccctgcggcagatgttttgatcctgtccttcttcatttccgaagagcacggcttcctgcttcatgagagcttcccccggcctgccacctcccacagtctcctggggatggaagtgccttattactacttcacaagaaagcccgaagaagcagacagagaagacgaggtggagcctgggtgccaccacatccctcagatggtgtccaggagacccctgcgagactttgtggggctggaggactgcgacaaggccacccgggacgccatgctccacttcagcttctttgtcaccataggagacatggacgaagccttcaaatccatcaagctcatcaaaagtgaggccgtctgggagaacatggcgcgcatgtgcgtgaagacccagcggctggacgtggccaaggtgtgcctggggaacatgggccatgcccgcggggcccgagcgctgcgtgaggcggagcaggagccggagctagaggcccgcgtggccgtgctggccacgcagctgggcatgctggaggacgccgagcagctgtacaggaagtgcaagcgccacgacctcctgaacaagttctaccaggctgcgggccggtggcaggaggccctccaggtagccgagcaccacgatcgcgtgcacctgcgcagcacctaccaccgctatgccgggcacctggaggccagcgccgactgcagccgggccctcagttactacgagaagtcggacacgcaccgcttcgaggtgcccaggatgctgtcggaggacctgccgtccctggagctctacgtgaataaaatgaaggataagaccctgtggcggtggtgggcgcagtacctggagagccagggcgagatggacgccgcgctgcactactacgagctggcccgggaccacttctccctggtccgcatccactgcttccagggcaatgtccagaaggctgcgcaaatagccaacgagacaggaaacctggcggcctcctaccacctcgcccgccagtacgagagccaggaggaggtcgggcaggcggtgcacttctacacccgggcacaggccttcaagaatgccatccgcctgtgcaaggagaacggcctggacgaccagctcatgaacttggccctgctgagctcccccgaggacatgatcgaggcggcccgatactacgaggagaagggcgtgcagatggacagggcggtcatgctgtaccacaaggctggccacttctccaaggccctggagctggcctttgccacccagcagtttgtggccctacagctcatagcagaggacctggatgagacgtcagaccctgcgctcctggcccgctgctccgacttcttcatcgagcacagtcagtacgagagggcggtagagctgctgctggctgccaggaagtatcaggaagccctgcagctgtgcctggggcagaacatgagcatcaccgaggagatggcggaaaagatgaccgtggccaaggactcctcggacctgcctgaggagtcgcggcgggagctgctggagcagatagcagactgctgcatgcgccagggcagctaccacctggccaccaagaagtacacgcaggccggcaacaagctgaaggccatgagggcgctgctcaaatccggagacacggagaaaatcacgttcttcgcgagcgtgtccaggcagaaggaaatctacatcatggctgctaactacctgcagtccctggactggcggaaggagccggagatcatgaagaacatcatcggcttctacaccaaggggcgggccctggacctcctggctggcttttatgacgcttgtgcccaggtggagattgatgaataccagaactacgacaaagcccacggggcgctgaccgaggcctacaagtgcctggccaaggccaaggccaagagccccctggaccaggagaccaggctggcgcagctgcagagcaggatggcactggtgaagaggttcatccaggcccgcaggacgtacacagaggaccccaaggagtccatcaagcagtgtgagctgctcctggaggaaccagacctggacagcaccatccgcatcggggacgtctatggcttcctggtggagcactacgtgcggaaggaggaataccagacggcctacagattcctggaggagatgcggcggcggcttcccttggccaacatgtcctactacgtgagcccgcaggccgtggacgccgtgcaccgggggctgggtctcccactgccacgcaccgtccccgagcaggtccgccacaacagcatggaggacgccagggagctggacgaggaggtggtggaagaggcagatgacgacccctgaggggcctgggccccaggaccagcgtgctgctgcagaaaggcatcttctggaatttttttgtcagctgtggcaaagccagcatttttgctgggaaaaaacatgtctgtgttggaatacgcgacagagctgggcgagaacgcagcggcccgggccggcggagggtgtgacccgtctgcaccttgctctgtcccacctgcctctgggtgcccggcagctccactagatttttggattcattcctttgaagggagtcgggttcacccttccatcgtattctcccaactacacattgtaaagcctgagaaacttctagaacctcaggaagctgcagctggagggctggggcacctgcccccctgctccccacacatcatatcctccccatactcctgcagggcccacggctcctgagcaacagctgggacacccgggccttggcggctgcaccccctgctaggctctgcccaccggccaccaacactcctgtaattccaataaagcagtttattttctgaaaaaaaaaaaaaaaa

SEQ ID NO: 12551 - DNA, 3574 bp, Homo sapiens
cttctgcctaggtcccaacgcttcggggcaggggtgcggtcttgcaataggaagccgagcgtcttgcaagcttcccgtcgggcaccagctactcggccccgcaccctacctggtgcattccctagacacctccggggtccctacctggagatccccggagccccccttcctgcgccagccatgcctttaaaccgcactttgtccatgtcctcactgccaggactggaggactgggaggatgaattcgacctggagaacgcagtgctcttcgaagtggcctgggaggtggctaacaaggtgggtggcatctacacggtgctgcagacgaaggcgaaggtgacaggggacgaatggggcgacaactacttcctggtggggccgtacacggagcagggcgtgaggacccaggtggaactgctggaggcccccaccccggccctgaagaggacactggattccatgaacagcaagggctgcaaggtgtatttcgggcgctggctgatcgagggaggccctctggtggtgctcctggacgtgggtgcctcagcttgggccctggagcgctggaagggagagctctgggatacctgcaacatcggagtgccgtggtacgaccgcgaggccaacgacgctgtcctctttggctttctgaccacctggttcctgggtgagttcctggcacagagtgaggagaagccacatgtggttgctcacttccatgagtggttggcaggcgttggactctgcctgtgtcgtgcccggcgactgcctgtagcaaccatcttcaccacccatgccacgctgctggggcgctacctgtgtgccggtgccgtggacttctacaacaacctggagaacttcaacgtggacaaggaagcaggggagaggcagatctaccaccgatactgcatggaaagggcggcagcccactgcgctcacgtcttcactactgtgtcccagatcaccgccatcgaggcacagcacttgctcaagaggaaaccagatattgtgacccccaatgggctgaatgtgaagaagttttctgccatgcatgagttccagaacctccatgctcagagcaaggctcgaatccaggagtttgtgcggggccatttttatgggcatctggacttcaacttggacaagaccttatacttctttatcgccggccgctatgagttctccaacaagggtgctgacgtcttcctggaggcattggctcggctcaactatctgctcagagtgaacggcagcgagcagacagtggttgccttcttcatcatgccagcgcggaccaacaatttcaacgtggaaaccctcaaaggccaagctgtgcgcaaacagctttgggacacggccaacacggtgaaggaaaagttcgggaggaagctttatgaatccttactggttgggagccttcccgacatgaacaagatgctggataaggaagacttcactatgatgaagagagccatctttgcaacgcagcggcagtctttcccccctgtgtgcacccacaatatgctggatgactcctcagaccccatcctgaccaccatccgccgaatcggcctcttcaatagcagtgccgacagggtgaaggtgattttccacccggagttcctctcctccacaagccccctgctccctgtggactatgaggagtttgtccgtggctgtcaccttggagtcttcccctcctactatgagccttggggctacacaccggctgagtgcacggttatgggaatccccagtatctccaccaatctctccggcttcggctgcttcatggaggaacacatcgcagacccctcagcttacggtatctacattcttgaccggcggttccgcagcctggatgattcctgctcgcagctcacctccttcctctacagtttctgtcagcagagccggcggcagcgtatcatccagcggaaccgcacggagcgcctctccgaccttctggactggaaatacctaggccggtactatatgtctgcgcgccacatggcgctgtccaaggcctttccagagcacttcacctacgagcccaacgaggcggatgcggcccaggggtaccgctacccacggccagcctcggtgccaccgtcgccctcgctgtcacgacactccagcccgcaccagagtgaggacgaggaggatccccggaacgggccgctggaggaagacggcgagcgctacgatgaggacgaggaggccgccaaggaccggcgcaacatccgtgcaccagagtggccgcgccgagcgtcctgcacctcctccaccagcggcagcaagcgcaactctgtggacacggccacctccagctcactcagcaccccgagcgagcccctcagccccaccagctccctgggcgaggagcgtaactaagtccgccccaccacactccccgcctgtcctgcctctctgctccagagagaggatgcagaggggtgctgctcctaaacccccgctccagatctgcactgggtgtggccccgcagtgcccccacccagtccgccaaacactccaccccctccagctccagtttccaagttcctgcactccagaatccacaaagccgtgcctttctctggctccagaatatgcataatcagcgccctggagtcccctgggcctggaccgcttcccagaggccaggaatctgccattactctgcggtggtgccagaggttttaggaaacctggcatggtgctttcaggtctggggcttttagagccccccgtgtggcttacaaattctacagcatacagagcaggccacgctcaggcccggcatgcgggccaccaagttctggaaaccacgtggtgtccctgcgaatggggcgatcaagtccagagccggggcactttcagagtttgaaggtaactgagagcagatggtcctccatttcaactccagaagtggggctctgggagggatgttctagccctccctggcatgtcagagccaggctctgcctggaggatccctccatccggctcctgtcatcccctacactttggccaagcaagaggtggtagaaccacttggctgctcattccttctggaggacacacagtctcagtccagatgccttcctgtctttctggccctttctggaccagatcctactcttcctttctaaatctgagatctccctccagggaatccgcctgcagaggacagagctggctgtcttcccccacccctaacctggcttattcccaactgctctgcccactgtgaaaccactaggttctaggtcctggcttctagatctggaaccttaccacgttactgcatactgatccctttcccatgatccagaactgaggtcactgggttctagaacccccacatttacctcgaggctcttccatccccaaactgtgccctgccttcagctttggtgaaagggagggcccctcatgtgtgctgtgctgtgtctgcaccgcttggtttgcagttgagaggggagggcaggaggggtgtgattggagtgtgtccggagatgagatgaaaaaaatacatctatatttaagaatcccaaaaaaaaaaaaaaaaaa

SEQ ID NO: 12552 - DNA, 2207 bp, Homo sapiens
acttcccagccggggccagtcgggagcgaaagtgcgctgagctgcagtgtctggtcgagagtacccgtgggagcgtcgcgccgcggaggcagccgtcccggcgtaggtggcgtggccgaccggacccccaactggcgcctctccccgcgcggggtcccgagctaggagatgggaggcacagctcgtgggcctgggcggaaggatgcggggccgcctggggccgggctcccgccccagcagcggaggttgggggatggtgtctatgacaccttcatgatgatagatgaaaccaaatgtcccccctgttcaaatgtactctgcaatccttctgaaccacctccacccagaagactaaatatgaccactgagcagtttacaggagatcatactcagcactttttggatggaggtgagatgaaggtagaacagctgtttcaagaatttggcaacagaaaatccaatactattcagtcagatggcatcagtgactctgaaaaatgctctcctactgtttctcagggtaaaagttcagattgcttgaatacagtaaaatccaacagttcatccaaggcacccaaagtggtgcctctgactccagaacaagccctgaagcaatataaacaccacctcactgcctatgagaaactggaaataattaattatccagaaatttactttgtaggtccaaatgccaagaaaagacatggagttattggtggtcccaataatggagggtatgatgatgcagatggggcctatattcatgtacctcgagaccatctagcttatcgatatgaggtgctgaaaattattggcaaggggagttttgggcaggtggccagggtctatgatcacaaacttcgacagtacgtggccctaaaaatggtgcgcaatgagaagcgctttcatcgtcaagcagctgaggagatccggattttggagcatcttaagaaacaggataaaactggtagtatgaacgttatccacatgctggaaagtttcacattccggaaccatgtttgcatggcctttgaattgctgagcatagacctttatgagctgattaaaaaaaataagtttcagggttttagcgtccagttggtacgcaagtttgcccagtccatcttgcaatctttggatgccctccacaaaaataagattattcactgcgatctgaagccagaaaacattctcctgaaacaccacgggcgcagttcaaccaaggtcattgactttgggtccagctgtttcgagtaccagaagctctacacatatatccagtctcggttctacagagctccagaaatcatcttaggaagccgctacagcacaccaattgacatatggagttttggctgcatccttgcagaacttttaacaggacagcctctcttccctggagaggatgaaggagaccagttggcctgcatgatggagcttctagggatgccaccaccaaaacttctggagcaatccaaacgtgccaagtactttattaattccaagggcataccccgctactgctctgtgactacccaggcagatgggagggttgtgcttgtggggggtcgctcacgtaggggtaaaaagcggggtcccccaggcagcaaagactgggggacagcactgaaagggtgtgatgactacttgtttatagagttcttgaaaaggtgtcttcactgggacccctctgcccgcttgaccccagctcaagcattaagacacccttggattagcaagtctgtccccagacctctcaccaccatagacaaggtgtcagggaaacgggtagttaatcctgcaagtgctttccagggattgggttctaagctgcctccagttgttggaatagccaataagcttaaagctaacttaatgtcagaaaccaatggtagtatacccctatgcagtgtattgccaaaactgattagctagtggacagagatatgcccagagatgcatatgtgtatatttttatgatcttacaaacctgcaaatggaaaaaatgcaagcccattggtggatgtttttgttagagtagactttttttaaacaagacaaaacatttttatatgattataaaagaattcttcaagggctaattacctaaccagcttgtattggccatctggaatatgcattaaatgactttttataggtcaatgcaaaaaaaaaaaaaaaaaaaaaaaaaaaaaaaaaaaaaaaaa

SEQ ID NO: 12553 - DNA, 5695 bp, Homo sapiens
gcggctcaggggcggggacgggggcgtggtcccgccgtataagaacggagggggcggcggcgggacggctcactcggtgccgctgcctaggggctgtagaggtcgcgccgctcctgctggggcctgcccacgccaaggacctgcctctgtcgcctcctcttctattgcccagtttccccagccagaacatcccctgaagatggcagaggagagcagctgtaccagggattgcatgtccttcagcgtgctcaactgggatcaggttagccggctgcatgaggtcctcactgaagttgtacctatccacggacgaggcaactttccaaccttggagataactctgaaggacatcgtccagaccgtccgcagtcggctggaggaggcaggcatcaaagtgcacgacgtccggctgaatggctccgcagctggccacgttttggtcaaagacaatggcttgggctgcaaagacctggacctaatcttccatgtggctcttccaacagaggcagaatttcagctggttagagatgtggttctgtgttcccttctgaacttcctgccagagggtgtgaacaagctcaaaatcagtccagtcactctgaaggaggcatatgtgcagaagctagtgaaggtttgcacggacactgaccgctggagcctgatctccctctccaacaagaacgggaagaacgtggagctgaagtttgtcgactccattcggcgtcagtttgagttcagtgtggactctttccaaatcatcctggattctttgcttttcttctatgactgttccaataatcccatctctgagcacttccaccccaccgtgattggggagagcatgtacggggactttgaggaagcttttgaccatctgcagaacagactgatcgccaccaagaacccagaagaaatcagaggcgggggacttctcaagtacagcaaccttcttgtgcgggacttcaggcccacagaccaggaagaaatcaaaactctagagcgctacatgtgctccaggttcttcatcgacttcccggacatccttgaacagcagaggaagttggagacttaccttcaaaaccacttcgctgaagaagagagaagcaagtacgactacctcatgatccttcgcagggtggtgaacgagagcaccgtgtgtctcatggggcatgaacgcaggcagactctgaacctcatctccctcctggccttgcgtgtgctggcggaacaaaacatcatccccagtgccaccaacgtcacctgttactaccagccggccccttacgtcagtgatggcaacttcagcaactactacgttgcccatcctccagtcacctacagccagccttaccctacctggctgccctgtaactaaccttgagacctgagggtttccacagtgggaaccccaatagggctagggctctcaggtaggggagcctccttctagatgtaggcatttggcttttaaaggggaactcagctctgattctgcttttttttttttttttcctttgtgtacccattggaatgggtctacagtgtatcatgagccaaccctcaaaggacccgtattacagtgccacgttggaaaacgctacaggaagcatgacctatccacatctttccaagatagacactaacatgtcatgtcccaaacattagcacgtgggggttgagctctgtgcagtaatcgagattgggagaatttgggcagcgcgtgagaagtgctaagctacttgttttctcacttgagcccgggtaggctgtgttggccctcacttgggattctcagcagttacatgaaagttgtgctgataatctcttctcttgtaccaattttagtcaggcagaaaatggtaaacatgagggtgctcttgtgacttaatttttgttcaagggactaaattgcttatgtttattccctgtcagcggagtggagaatgtcattcatcaataaaccaaagccaatagctggagaattgagatctggttgaaagtggtttatggtttacatgctgtactatcctgaggaattgcgagatattgctgaggggaaaaaaaaatgaccttttcttgaaatgtaacttgaaaacaaaataaaatgtggaacataatgtttaattagaattgtggtggtggtagtggaaggggataattgtaaataggaaacatgaatgttcatttttttctttaaagaattcttattaaatggctccctgccttttttttcttttttcctcatcagctctttcatggctgaattttgttttattcttcctaagactgaggattgtgctgagtccagagtcattgtggtaactgacatgagggtcttcccatgttttaactggaaacccactttggtcacattccaagtatgacacagctgttcttctggagtactttagctattttttgtttttgttcttttcgttttttttttttccaaaaatagtgacttccttctccaggtgtgtttgacagcaactcaattcaggaatttcggtagaactgagtgacctgtggaactgctttagaatctaacctgctgtcttcgtgctctgtgtgaaggggaagctggggggttagcatgaagtctggccttgtgtgcattggagcttccaaggcactttgaaatcattccagtatatttgggaagaattgagtgaatgagaatgctcttccttattctggtagatttgacttgtttataattctgcactttagaagaaaaacagtgttaatctgtagttgaaagaaagcttagtagatgagagagttctaggctactgtggctttttccagtagatttagatgagattatgtgttttgaaatgttttgtgggatcccttagaaagcatcacttcagggcagagacactcaatattgccagccagcttgggttctaaagtgatttaatcaaattcatgctcctgatcttttttttcccccttcctttggctatgaaaacccaaagcccggagtgattgttttctccttgctttaagcagtgaagttatcctaatgcaaaagagcttagtagaaaatgagtggtttacctttttttctaaaagtatattttcaagtttattctggaatgtgatgtcttggtcctcttaaaagcagatcagccatgactgaaactcaaggcttagctggtatctatgttgtgctacattaggtgactagaagccacttcttagtgtaatcagctcctgtttccctgtgagccttagttatattttaattcagtggctttgagtcaaggccggttctaattgaggggacccagtgtgcttcagtgttaagagtggggcaatgaagagtgaaccccaatgaagagtgatcccaactttggaaactatctggtcattcatgaccttaaaaagctgccatggtggtcaaatggcatgtgtttgcacaaaaatgaccgatgtgtttaaccaaagctttgaaatgtgatgaagccaccaacataagcacttgcctaacagaaatcagtatttcttctacttagaaggcttggggcccagggtaatgaggcaccagatgaagataagatctgcatcaaggaattaaatttccagtttgtccttggggttctttctgcttatgttttttcccccccatctggtaatagtcctcttctgagaatgaaaggaggcacagaagttgcgagaaagacccagtccccagtctttgccaccattgcaccatggttgtctcggagtcccttcacctgacctttttagtcagctcagatctttttgtagtttgagaatagacctattcaagagctatcagggttaaaagctgcactgaccaaagctgtacttttaaaacacaacccctgggctagtgatgtctctacttgctctatgagccttttgccagcctcagaataggcgaggtaaccttgaatttcagggccctggaaactctagctgaaacctgcctttcctaatgctcacacaagcaccaggtaccctgagcttatactgagtccagtggttcctattttatgtgtgtgtgtatgtgtgtgtgttgagtaacatgaaacttggcagtagcagagagcactgaagttcacatgcaagttctaatctaaagttaagcagtctcttatttgtttcgggactctgatttgactctttttctgatgctttcggcatgtctgcagcctgttctcctagcctgctgcttggagtcaggttgagcatcagtgagatgaagacagtaccttttcctctcacattggcagaatagcacgcactagatgcctgaccttgagctctagtctcccctttaaatcttaccttggcagtaacacattattcctcattcaataatttcaatgctgaaactgaactctattactaatgccttccaatcagagttcctgatggggatgcctgtgggatggcccacacctgggggacctggcagatggggtgagttgggtaaggaagatgatgcttagttcctgatagatgctacagatgtagtttggcatttcagtttttgtccagtttgattttcactggggtttgagtcacagcaagctgtgtatgaacttgtgttttgtggtgacacattaataatcaaattgctaaaaccctgaatctgcttattcttcagcttcacctctgcactaaccccttacccttatggtacgtcaggattttaactagtactgctttgttgactttgggaaatggtgccactcaaaagcaacttcctaacttgaggaataactcctttgtagtttactttctggtactggttggtgccttgtattgggatacagctatattcttagctcaaatgtcctctttttgagagcaaagtagttatccaatggtgagacgagaccctgacgctcatagaggccattccttcctgggtgtcggaccagggctctgtgtcagggaaaaccttctgggtggactttgtaagaatccagtttccaaggttagattcacatccttaatcttgcagagactagaatttcacagctcgctttggaacatattccaattcaaccagttaaaatcagaggaccaagtcgtgggggaggggggcggtgttgaggagaggtatttttaaagatctggcaacttttcaggattatttgtggagaactctaaggttaagatcaggaaataaaagactgtgtgtgtgtgtgtgtgtgcgtgtgtgtgttcaagtgcctaaatcttgtttacctatcactttaaaaaaataattgaagtgtaagctaaataaaatgcttggagttttgcctgggctagtgagagttggtgcaaattcttgtgtgtgtttgcataggaaggtgagatgaccatctactaaagaggaagtagctaaatacagatctgtgggtgtttttaaaaaaactcaacctatctggtgttttattttaatggataaaaatgtaatttttctaaggtagcaacttatttccaaattaatatagatgaaaaatagataccaattagactaaattgaaagctttttgttctatatttgcatagcctttgaaatatttcttagtgcctaggaggtctggggattcctctttcgtggtggtcactaaccttacttgatgcagataaaatcacttgtcaatgcaaaatgtgttagaacttgataaagctttgagtttgagaaataaaggtatatttaaaattt

SEQ ID NO: 12554 - DNA, 6582 bp, Homo sapiens
tgctgctgttaatcatttcagagaagaacactgaactttgaaaaaaatgttggaagccattgacaaaaatcgggccctgcatgcagcagagcgcttgcaaaccaagctgcgagaacgtggggatgtagcaaatgaagacaaactgagccttctgaagtcagtcctgcagagccctctcttcagtcagattctgagccttcagacttctgtacagcagctgaaagaccaggtaaatattgcaacttcagcaacttcaaatattgaatatgcccacgttcctcatctcagcccagctgtgattcctactctgcaaaatgaatcgtttttattatccccaaacaatgggaatctggaagcacttacaggacctggtattccacacattaatgggaaacctgcttgtgatgaatttgatcagcttatcaaaaatatggcccagggtcgccatgtagaagtttttgagctcctcaaacctccatctggaggccttgggtttagtgttgtgggactaagaagtgaaaacagaggagagctgggaatatttgttcaagagatacaagagggcagtgtggcccatagagatggaagattgaaagaaactgatcaaattcttgctatcaatggacaggctcttgatcagacaattacacatcagcaggctatcagcatcctgcagaaagccaaagatactgtccagctagttattgccagaggctcattgcctcagcttgtcagccccatagtttcccgttctccatctgcagccagcacaatttcagctcactctaatccggttcactggcaacacatggaaacgattgaattggtgaatgatggatctggtttgggatttggcatcataggaggaaaagcaactggtgtgatagtaaaaaccattctgcctggaggagtagctgatcagcatgggcgtttatgcagtggagaccacattctaaagattggtgacacagatctagcaggaatgagcagtgagcaagtagcacaagtccttaggcaatgtggaaatagagttaagttgatgattgcaagaggtgccatagaagaacgtacagcacccactgctttgggcatcaccctctcctcatccccaacttcaacaccagagttgcgggttgatgcttctactcagaaaggtgaagaaagtgagacatttgatgtagaactcactaaaaatgtccaaggattaggaattaccattgctggctacattggagataaaaaattggaaccttcaggaatctttgtaaagagcattacaaaaagcagtgccgttgagcatgatggaagaatccaaattggagaccaaattatagcagtagatggcacaaaccttcagggttttactaatcagcaagcagtagaggtattgcgacatacaggacaaactgtgctcctgacactaatgaggagaggaatgaagcaggaagccgagctcatgtcaagggaagacgtcacaaaagatgcagatttgtctcctgttaatgccagcataatcaaagaaaattatgaaaaagatgaagattttttatcttcgacgagaaacaccaacatattaccaactgaagaagaagggtatccattactgtcagctgagatagaagaaatagaagatgcacaaaaacaagaagctgctctgctgacaaaatggcaaaggattatgggaattaactatgaaatagtggtggcccatgtgagcaagtttagtgagaacagtggattggggataagcctggaagcgacagtgggacatcattttatccgatctgttctaccagagggtcctgttggacacagcgggaagctcttcagtggagacgagctattggaagtaaatggcataactttacttggggaaaatcaccaagatgtggtgaatatcttaaaagaactgcctatagaagtgacaatggtgtgctgtcgtcgaactgtgccacccaccacccaatcagaattggatagcctggacttatgtgatattgagctaacagaaaagcctcacgtagatctaggtgagttcatcgggtcatcagagacagaggatccagtgctggcgatgactgatgcgggtcagagtacagaagaggttcaagcacctttggccatgtgggaggctggcattcagcacatagagctggagaaagggagcaaaggacttggttttagcattttagattatcaggatccaattgatccagcaagcactgtgattataattcgttctttggtgcctggcggcattgctgaaaaggatggacgacttcttcctggtgaccgactcatgtttgtaaacgatgttaacttggaaaacagcagtcttgaggaagctgtagaagcactgaagggagcaccgtcagggactgtgagaataggagttgctaagcctttacccctttcaccagaagaaggttatgtttctgctaaggaggattcctttctctacccaccacactcctgtgaggaagcagggctggctgacaaacccctcttcagggctgacttggctctggtgggcacaaatgatgctgacttagtagatgaatccacatttgagtctccatactctcctgaaaatgacagcatctactctactcaagcctctattttatctcttcatggcagttcttgtggtgatggcctgaactatggttcttcccttccatcatctcctcctaaggatgttattgaaaattcttgtgatccagtacttgatctgcatatgtctctggaggaactatatacccagaatctcctgcaaagacaggatgagaatacaccttcggtggacataagtatggggcctgcttctggctttactataaatgactacacacctgcaaatgctattgaacaacaatatgaatgtgaaaacacaatagtgtggactgaatctcatttaccaagtgaagttatatcaagtgcagaacttccttctgtgctacccgattcagctggaaagggctctgagtacctgcttgaacagagctccctggcctgtaatgctgagtgtgtcatgcttcaaaatgtatctaaagaatcttttgaaaggactattaatatagcaaaaggcaattctagcctaggaatgacagttagtgctaataaagatggcttggggatgatcgttcgaagcattattcatggaggtgccattagtcgagatggccggattgccattggggactgcatcttgtccattaatgaagagtctaccatcagtgtaaccaatgcccaggcacgagctatgttgagaagacattctctcattggccctgacataaaaattacttatgtgcctgcagaacatttggaagagttcaaaataagcttgggacaacaatctggaagagtaatggcactggatattttttcttcatacactggcagagacattccagaattaccagagcgagaagagggagagggtgaagaaagcgaacttcaaaacacagcatatagcaattggaatcagcccaggcgggtggaactctggagagaaccaagcaaatccttaggcatcagcattgttggtggacgagggatggggagtcggctaagcaatggagaagtgatgaggggcattttcatcaaacatgttctggaagatagtccagctggcaaaaatggaaccttgaaacctggagatagaatcgtagaggtggatggaatggacctcagagatgcaagccatgaacaagctgtggaagccattcggaaagcaggcaaccctgtagtctttatggtacagagcattataaacagaccaaggaaatcccctttgccttccttgctgcacaacctttaccctaagtacaacttcagcagcactaacccatttgctgactctctacaaatcaacgccgacaaggcacccagtcagtcagagtcagagccagagaaggctccattgtgcagtgtgcccccaccccctccttcagcctttgccgaaatgggtagtgatcacacacagtcatctgcaagcaaaatctcacaagatgtggacaaagaggatgagtttggttacagctggaaaaatatcagagagcgttatggaaccctaacaggcgagctgcatatgattgaactggagaaaggtcatagtggtttgggcctaagtcttgctgggaacaaagaccgatccaggatgagtgtcttcatagtggggattgatccaaatggagctgcaggaaaagatggtcgattgcaaattgcagatgagcttctagagatcaatggtcagattttatatggaagaagtcatcagaatgcctcatcaatcattaaatgtgccccttctaaagtgaaaataatttttatcagaaataaagatgcagtgaatcagatggccgtatgtcctggaaatgcagtagaacctttgccttctaactcagaaaatcttcaaaataaggagacagagccaactgttactacttctgatgcagctgtggacctcagttcatttaaaaatgtgcaacatctggagcttcccaaggatcaggggggtttgggtattgctatcagcgaagaagatacactcagtggagtcatcataaagagcttaacagagcatggggtagcagccacggatggacgactcaaagtcggagatcagatactggctgtagatgatgaaattgttgttggttaccctattgaaaagtttattagccttctgaagacagcaaagatgacagtaaaacttaccatccatgctgagaatccagattcccaggctgttccttcagcagctggtgcagccagtggagaaaaaaagaacagctcccagtctctgatggtcccacagtctggctccccagaaccggagtccatccgaaatacaagcagatcatcaacaccagcaatttttgcttctgatcctgcaacctgccccattatccctggctgcgaaacaaccatcgagatttccaaagggcgaacagggctgggcctgagcatcgttgggggttcagacacgctgctgggtgccattattatccatgaagtttatgaagaaggagcagcatgtaaagatggaagactctgggctggagatcagatcttagaggtgaatggaattgacttgagaaaggccacacatgatgaagcaatcaatgtcctgagacagacgccacagagagtgcgcctgacactctacagagatgaggccccatacaaagaggaggaagtgtgtgacaccctcactattgagctgcagaagaagccgggaaaaggcctaggattaagtattgttggtaaaagaaacgatactggagtatttgtgtcagacattgtcaaaggaggaattgcagatgccgatggaagactgatgcagggagaccagatattaatggtgaatggggaagacgttcgtaatgccacccaagaagcggttgccgctttgctaaagtgttccctaggcacagtaaccttggaagttggaagaatcaaagctggatccagtacatctgagtcactggaaagtagctcaaagaagaatgcattggcatctgaaatacagggattaagaacagtcgaaatgaaaaagggccctactgactcactgggaatcagcatcgctggaggagtaggcagcccacttggtgatgtgcctatatttattgcaatgatgcacccaactggagttgcagcacagacccaaaaactcagagttggggataggattgtcaccatctgtggcacatccactgagggcatgactcacacccaagcagttaacctactgaaaaatgcatctggctccattgaaatgcaggtggttgctggaggagacgtgagtgtggtcacaggtcatcagcaggagcctgcaagttccagtctttctttcactgggctgacgtcaagcagtatatttcaggatgatttaggacctcctcaatgtaagtctattacactagagcgaggaccagatggcttaggcttcagtatagttggaggatatggcagccctcatggagacttacccatttatgttaaaacagtgtttgcaaagggagcagcctctgaagacggacgtctgaaaaggggcgatcagatcattgctgtcaatgggcagagtctagaaggagtcacccatgaagaagctgttgccatccttaaacggacaaaaggcactgtcactttgatggttctctcttgaattggctgccagaattgaaccaacccaacccctagctcacctcctactgtaaagagaatgcactggtcctgacaatttttatgctgtgttcagccgggtcttcaaaactgtaggggggaaataacacttaagtttctttttctcatctagaaatgctttccttactgacaacctaacatcatttttcttttcttcttgcattttgtgaacttaaagagaaggaatatttgtgtaggtgaatctcgtttttatttgtggagatatctaatgttttgtagtcacatgggcaagaattattacatgctaagctggttagtataaagaaagataattctaaagctaaccaaagaaaatggcttcagtaagttaggatgaaaaatgaaaatataaaaaaaaaaaaaaaaaaa

SEQ ID NO: 12555 - DNA, 2207 bp, Homo sapiens
actgacggccggccggcttcccggaactggaaggttacattgattacccacctagtacaacatcttacgggaagagcatagtatttcctagaggaatatgaacataacaggaaggtatcattggctctgaattaaatttgaacttgtcccctgaatagctacaggttttggaagctgaatcaatgttatcagatgagttagaatccaaaccagagctcctggtacagtttgttcagaatacgtccatcccattgggacaggggcttgtagaatcagaagctaaagatattacttgcttgtccctccttcccgtgactgaagcctcagaatgcagtcggctaatgttaccagatgatactacaaatcattctaactcctccaaggaggtcccttcctcagctgttttgagaagccttcgggtgaatgtgggtccagacggagaggagacgagagctcagactgtacagaaatccccggagtttttgtccacttcagagtcttctagcttgttgcaagatctacagccaagtgatagcacttcttttattcttcttaacctaacaagagcaggtctgggctcttcagctgagcacttagtgtttgtacaggatgaggcagaagattcagggaatgatttcctctccagtgagagcacagacagtagcattccatggttcctccgggttcaggagttggcccatgacagtttgattgctgctactcgtgcacaactggcaaagaatgcaaaaaccagcagcaatggagaaaatgtccaccttggttctggtgatgggcagtcaaaagattctgggccccttcctcaagtggaaaagaagctcaagtgtacagttgaaggttgtgaccggacatttgtatggccagctcactttaaataccacctcaagactcatcgaaatgaccgctccttcatctgtcctgcagaaggttgtgggaaaagcttctatgtgctgcagaggctgaaggtgcacatgaggacccacaatggagagaagccctttatgtgccatgagtctggctgtggtaagcagtttactacagctggaaacctgaagaaccaccggcgcatccacacaggagagaaacctttcctttgtgaagcccaaggatgtggccgttcctttgctgagtattctagcctccgaaaacatctggtggttcactcaggagagaagcctcatcagtgccaagtctgtgggaagaccttctctcagagtggaagcaggaatgtgcatatgagaaagcatcacctgcagctgggagcagctgggagtcaagagcaggagcaaactgctgagccactaatgggcagtagtttgcttgaagaggcttcagtacccagtaaaaacctggtgtctatgaattcccagcccagccttggtggagagtccttgaacctaccaaataccaattctatcctgggagttgatgatgaggtgcttgctgaaggatccccacgttccctgtcttcagtgcctgatgtgacacatcacctggtgaccatgcagtcagggaggcaatcatatgaagtttctgtcttaactgcagtaaatccacaagagttactaaaccaaggagatttaactgaaagacggacatgagcgtgggtgctgactcctggaagagcaactctatctgatctcaaaatgcgtatactgggaacaggatgccttagcccacaacagaaccagaatgaatctttgaaggcacaagactctgcttttgccactcttcctctttcctggtatagaagatggatgtaggagagcttcttttctaactaccatctgatcagacaaggaatgaagcaatgactgtgggctgggaaactgtacctacctctcttcccactgcaaatttctgggatagaccaaaagtgaatttgattatgtgttggctgaagttcttcattctgactgttgaggggaggttttcctttgaagagttttcatcccagactcagctgtcttttcacatggatgaaataattcctgctaccaacaacagagcttcaccaggaagttgagttttcaagatgccttgttgctttgaagaagggagtgatgtcaattctcttgttacattctccctttagcaacctgagtaagagactctctgccactgggctgcaaaaaaataaattacttgaatctccccttgaaaaaaaaaaaaaaaaaaaaaaaaaaaaa

SEQ ID NO: 12556 - DNA, 3325 bp, Homo sapiens
cggagctgaagccggagccgggttggagtctgggcgggggccgggccggagcgggctccagagacatggggtcgaccgactccaagctgaacttccggaaggcggtgatccagctcaccaccaagacgcagcccgtggaagccaccgatgatgccttttgggaccagttctgggcagacacagccacctcggtgcaggatgtgtttgcactggtgccggcagcagagatccgggccgtgcgggaagagtcaccctccaacttggccaccctgtgctacaaggccgttgagaagctggtgcagggagctgagagtggctgccactcggagaaggagaagcagatcgtcctgaactgcagccggctgctcacccgcgtgctgccctacatctttgaggaccccgactggaggggcttcttctggtccacagtgcccggggcagggcgaggagggcagggagaagaggatgatgagcatgccaggcccctggccgagtccctgctcctggccattgctgacctgctcttctgcccggacttcacggttcagagccaccggaggagcactgtggactcggcagaggacgtccactccctggacagctgtgaatacatctgggaggctggtgtgggcttcgctcactccccccagcctaactacatccacgatatgaaccggatggagctgctgaaactgctgctgacatgcttctccgaggccatgtacctgcccccagctccggaaagtggcagcaccaacccatgggttcagttcttttgttccacggagaacagacatgccctgcccctcttcacctccctcctcaacaccgtgtgtgcctatgaccctgtgggctacgggatcccctacaaccacctgctcttctctgactaccgggaacccctggtggaggaggctgcccaggtgctcattgtcactttggaccacgacagtgccagcagtgccagccccactgtggacggcaccaccactggcaccgccatggatgatgccgatcctccaggccctgagaacctgtttgtgaactacctgtcccgcatccatcgtgaggaggacttccagttcatcctcaagggtatagcccggctgctgtccaaccccctgctccagacctacctgcctaactccaccaagaagatccagttccaccaggagctgctagttctcttctggaagctctgcgacttcaacaagaaattcctcttcttcgtgctgaagagcagcgacgtcctagacatccttgtccccatcctcttcttcctcaacgatgcccgggccgatcagtctcgggtgggcctgatgcacattggtgtcttcatcttgctgcttctgagcggggagcggaacttcggggtgcggctgaacaaaccctactcaatccgcgtgcccatggacatcccagtcttcacagggacccacgccgacctgctcattgtggtgttccacaagatcatcaccagcgggcaccagcggttgcagcccctcttcgactgcctgctcaccatcgtggtcaacgtgtccccctacctcaagagcctgtccatggtgaccgccaacaagttgctgcacctgctggaggccttctccaccacctggttcctcttctctgccgcccagaaccaccacctggtcttcttcctcctggaggtcttcaacaacatcatccagtaccagtttgatggcaactccaacctggtctacgccatcatccgcaagcgcagcatcttccaccagctggccaacctgcccacggacccgcccaccattcacaaggccctgcagcggcgccggcggacacctgagcccttgtctcgcaccggctcccaggagggcacctccatggagggctcccgccccgctgcccctgcagagccaggcaccctcaagaccagtctggtggctactccaggcattgacaagctgaccgagaagtcccaggtgtcagaggatggcaccttgcggtccctggaacctgagccccagcagagcttggaggatggcagcccggctaagggggagcccagccaggcatggagggagcagcggcgaccgtccacctcatcagccagtgggcagtggagcccaacgccagagtgggtcctctcctggaagtcgaagctgccgctgcagaccatcatgaggctgctgcaggtgctggttccgcaggtggagaagatctgcatcgacaagggcctgacggatgagtctgagatcctgcggttcctgcagcatggcaccctggtggggctgctgcccgtgccccaccccatcctcatccgcaagtaccaggccaactcgggcactgccatgtggttccgcacctacatgtggggcgtcatctatctgaggaatgtggacccccctgtctggtacgacaccgacgtgaagctgtttgagatacagcgggtgtgaggatgaagccgacgaggggctcagtctaggggaaggcagggccttggtccctgaggcttcccccatccaccattctgagctttaaattaccacgatcagggcctggaacaggcagagtggccctgagtgtcatgccctagagacccctgtggccaggacaatgtgaactggctcagatccccctcaacccctaggctggactcacaggagccccatctctggggctatgcccccaccagagaccactgcccccaacactcggactccctctttaagacctggctcagtgctggcccctcagtgcccacccactcctgtgctacccagccccagaggcagaagccaatgggtcactgtgccctaaggggtttgaccagggaaccacgggctgtcccttgaggtgcctggacagggtaagggggtgcttccagcctcctaacccaaagccagctgttccaggctccaggggaaaaaggtgtggccaggctgctcctcgaggaggctgggagctggccgactgcaaaagccagactggggcacctcccgtatccttggggcatggtgtggggtggtgagggtctcctgctatattctcctggatccgtggaaatagcctggctccctcttacccagtaatgaggggcagggaagggaactgggaggcagccgtttagtcctccctgccctgcccactgcctggatggggcgatgccacccctcatccttcacccagctctggcctctgggtcccaccacccagccccccgtgtcagaacaatctttgctctgtacaatcggcctctttacaataaaacctcctgctccaaaaaaaaaaaaaaaaaaaaaaaaaaaaaaaaaaaaaaaaaaaaaaaaaaaaaaaaaaaaaaaaaaaa

SEQ ID NO: 12557 - DNA, 1704 bp, Homo sapiens
aggagccaccgtccgagccttgcggagcgcggcagtgggcgccggctgcccgcagcccctgacccggccccggacggagcgccggccgcaccaccgccctctggccgttgcctcaccggctcggcaagatgtcggtgaaggagggcgcacagcgcaagtgggcagcgctgaaggagaagctggggccacaggattcggaccccacggaggccaacctggagagcgcggaccctgagctgtgcatccggctgctccagatgccctctgtggtcaactactccggcctgcgcaagcgcctggagggcagcgacggcggctggatggtgcagttcctggagcagagcggcctggacctgctgctggaggcgctggcgcggctgtcgggccgcggcgttgcacgtatctccgacgccctgctgcagctcacctgcgtcagctgcgtgcgcgccgtcatgaactcgcggcagggcatcgagtacatcctcagcaaccagggctacgtgcgccagctctcccaggccctggacacatccaacgtgatggtgaagaagcaggtgtttgagctactggctgccctgtgcatctactctcccgagggccacgtgctgaccctggacgccctggaccactacaagacggtgtgcagccagcagtaccgcttcagcattgtcatgaacgagctctccggcagcgacaacgtgccctacgtggtcaccctgcttagcgtgatcaacgccgtcatcttgggccccgaggacctgcgcgcgcgcacccagctgcggaacgagtttatcgggctgcagctgctggacgtcctggctcgcctgcggtgagtccccactgtagcggtcctgccggctccccctcctgctcccaaggccaggcccacctgccctttggctcccagccacctcacctaagcagcacctccagatggcagggaggtggctccctcggagtaaccccaggggtccagccagaagccaggtctcaggctagaatccagctcactgtccctggcagctgcccacagaaactagggttgcagcagccatagaaaggacagaatgagctcatatcctttgcacaccgtggatggagctggaggccgtgatcctaagtgaaccaacccagaaacagaaaatgaaatgccaataagagggaactacagggtggttcacgtggacgcaagatggagacagggacacgggctccagggcgagagttgaaaaactacctacagggtacagtgttcgtcgctacttggtgtcaggcccactagaacaagggtccccaaccgccaggctgcggaccggtacctggcctattggaaccgggccacgcagcaggaagtgagcggtgggcgggcattcctgcctgagctgcacctcatgtcagatcagcactgcattagattctccagcgcacgcacgcgcgcaagggatccaggctgcgcgctcctcatgacaatctaatgcctgatgatcgggggtggaacagttttatccctaaaccattcccgtcaccccagtctatggaaaaattgtcttccacaaaaccagtccctggtgccaaaaaggctggggaccactgccctagaaggcaaatcgcctacgttacacagtgtaccatgtggcaaacacgcacatgtacccccgagtctaaaataaaaattttttaaaaaagaaaaaaaaaaaaaaaaaa

SEQ ID NO: 12558 - DNA, 2164 bp, Homo sapiens
ggcggcggctggggagaagcgctctcgtcgcctgcccgaggccggagcggcggggcccgcgcctcctccccccagcgccgcggaggggggaggaggaagatggagacccacatctcatgcctgttcccggagctgctggccatgatcttcggctacctggacgtccgggacaaggggcgcgcggcgcaggtgtgcaccgcctggcgggacgccgcctaccacaagtcggtgtggcggggggtggaggccaagctgcacctgcgccgggccaacccgtcgctgttccccagcctgcaggcccggggcatccgccgggtgcagatcctgagcctccgccgcagcctcagctacgtgatccagggcatggccaacatcgagagcctcaacctcagcggctgctacaacctcaccgacaacgggctgggccacgcgtttgtgcaggagatcggctccctgcgcgctctcaacctgagcctctgcaagcagatcactgacagcagcctgggccgcatagcccagtacctcaagggcctggaggtgctggagctgggaggttgcagcaacatcaccaacactggccttctgctcatcgcctggggtctgcagcgcctcaagagccttaacctccgcagctgccgccacctttcggatgtgggcatcgggcacctggccggcatgacgcgcagcgcggcggagggctgcctgggcctggagcagctcacgctacaggactgccagaagctcacagatctttctctaaagcacatctcccgagggctgacgggcttgaggctcctcaacctcagcttctgtgggggaatctcggacgctggcctcctgcacctgtcgcacatgggcagcctgcgcagcctcaacctgcgctcctgtgacaacatcagtgacacgggcatcatgcatctggccatgggcagcctgcgcctctcggggctggatgtttcgttctgtgacaaggtgggagaccagagtctggcttacatagcccaggggctggatggcctcaagtctctctccctctgctcctgccacatcagtgatgatggcatcaaccgcatggtgcggcagatgcacgggctgcgcacgctcaacattggacagtgtgtgcgcatcacggacaagggcctggagctgatcgctgagcacctgagccaactcaccggcatagacctgtacggctgcacccgaatcaccaagcgcggcctggagcgcatcacgcagctgccgtgcctcaaggtactcaacctgggactctggcagatgacggacagtgagaaggaggcacgaggggatttttctccattattcactgtgagaactcggggaagctccagaaggtgagggagaggggacaacgacatggttcccgtggatctttaacttccagacttgcccgctctgcgcctccggcactctggtgatgacagctcaggtttccctgcctgtcactgctcgggcagaggctgctgcccagggcttctgctccggtaccttgtgaagctgcattctcctgccggtttctccagttctggggacagtggtttgctctgagacctcgcttcctttatggatccaaggagacttgctttttcagtctgttcagctttttacttgctaggatggaattgcaatttgcaagcttcttcgacaggaaactacaagttccacactttaattttatacatataaatatatacatgtacatatatctatgtacaggggtattatatatatacatataagatgatgatatatataatgatgatatgtattactgagaacgtaaaatatcattacatagtgatagctggacacacaaggaattcacaactccccaaagaaaatacatctggatgacctgcctagcagtttccccatgagatagaggaatgtctacgtatttcattccctgttcctgccctgaaacaatttcaatcactgacaaatcattatcattcattaataatgtttactgagtgcccatatgtgaaagaaatccactctacattccacagatgcatttcctctccccacggggtttccattttaatgggaacaatgtagaatatatctgtcttccctttatagattccaaaaaaaaaaaaaaaaaaaaaaaaaaaaaaaaaaaaaaaaaaaaaaaaaaaaaaaa

SEQ ID NO: 12559 - DNA, 3659 bp, Homo sapiens
gcagccagtcgcggaggcggggaggctgcgcggtcagaggcgcctggagcgagcgaatcctggcccaccgcctgcccaaccgcgtgaccttgattgagttaatgaacttcacgcctcagcgtccaggtctgtaaaatggggtgtctaacgcagaccgtacagcccagctgggtttagcaaacttccgggagccagttggagcctctccccatccctagcggtgatcccaggtgacgacatgccgcggggggtcctgcggaggccaccctagggcgttgctgctgcctttgggagtgtggagctccaaaccatgtcgcgagaggcggattttgggaggccgggatcctcgcgccagggggatgtgcgagggtgtgggataaatcttaattcctccggcccacccaaagcctggaaatccagcctccgcgcctcttgccctgcgggccccgccctcagtcccgccctcatctaacccgctaccccattggtggcgtccggcggcgcggctgctgttatttttcgaatatataaggaggtggaagtggcagctgcaactagaggcttccctggctggtgcctgagcccggcgtccctcgccccccgccctccccgcatccctctcctccctcgcgcctggccctgtggctcttcctccctccctccttccccccccccccacccctcgcccgctgcctccctcggcccagccagctgtgccggcgtttgttggctgccctgcgcccggccctccagccagccttctgccggccccgccgcgatggaggtgccccagccggagcccgcgccaggctcggctctcagtccagcaggcgtgtgcggtggcgcccagcgtccgggccacctcccgggcctcctgctgggatctcatggcctcctggggtccccggtgcgggcggccgcttcctcgccggtcaccaccctcacccagaccatgcacgacctcgccgggctcggcagccgcagccgcctgacgcacctatccctgtctcgacgggcatccgaatcctccctgtcgtctgaatcctccgaatcttctgatgcaggtctctgcatggattcccccagccctatggacccccacatggcggagcagacgtttgaacaggccatccaggcagccagccggatcattcgaaacgagcagtttgccatcagacgcttccagtctatgccggtgaggctgctgggccacagccccgtgcttcggaacatcaccaactcccaggcgcccgacggccggaggaagagcgaggcgggcagtggagctgccagcagctctggggaagacaaggagaatgatggatttgtcttcaagatgccatggaagcccacacatcccagctccacccatgctctggcagagtgggccagccgcagggaagcctttgcccagagacccagctcggcccccgacctgatgtgtctcagtcctgaccggaagatggaagtggaggagctcagccccctggccctaggtcgcttctctctgacccctgcagagggggatactgaggaagatgatggatttgtggacatcctagagagtgacttaaaggatgatgatgcagttcccccaggcatggagagtctcattagtgccccactggtcaagaccttggaaaaggaagaggaaaaggacctcgtcatgtacagcaagtgccagcggctcttccgctctccgtccatgccctgcagcgtgatccggcccatcctcaagaggctggagcggccccaggacagggacacgcccgtgcagaataagcggaggcggagcgtgacccctcctgaggagcagcaggaggctgaggaacctaaagcccgcgtcctccgctcaaaatcactgtgtcacgatgagatcgagaacctcctggacagtgaccaccgagagctgattggagattactctaaggccttcctcctacagacagtagacggaaagcaccaagacctcaagtacatctcaccagaaacgatggtggccctattgacgggcaagttcagcaacatcgtggataagtttgtgattgtagactgcagatacccctatgaatatgaaggcgggcacatcaagactgcggtgaacttgcccctggaacgcgacgccgagagcttcctactgaagagccccatcgcgccctgtagcctggacaagagagtcatcctcattttccactgtgaattctcatctgagcgtgggccccgcatgtgccgtttcatcagggaacgagaccgtgctgtcaacgactaccccagcctctactaccctgagatgtatatcctgaaaggcggctacaaggagttcttccctcagcacccgaacttctgtgaaccccaggactaccggcccatgaaccacgaggccttcaaggatgagctaaagaccttccgcctcaagactcgcagctgggctggggagcggagccggcgggagctctgtagccggctgcaggaccagtgaggggcctgcgccagtcctgctacctcccttgcctttcgaggcctgaagccagctgccctatgggcctgccgggctgagggcctgctggaggcctcaggtgctgtccatgggaaagatggtgtgggtgtcctgcctgtctgccccagcccagattcccctgtgtcatcccatcattttccatatcctggtgccccccacccctggaagagcccagtctgttgagttagttaagttgggttaataccagcttaaaggcagtattttgtgtcctccaggagcttcttgtttccttgttagggttaacccttcatcttcctgtgtcctgaaacgctcctttgtgtgtgtgtcagctgaggctgggggagagccgtggtccctgaggatgggtcagagctaaactccttcctggcctgagagtcagctctctgccctgtgtacttcccgggccagggctgcccctaatctctgtaggaaccgtggtatgtctgccatgttgcccctttctcttttcccctttcctgtcccaccatacgagcacctccagcctgaacagaagctcttactctttcctatttcagtgttacctgtgtgcttggtctgtttgactttacgcccatctcaggacacttccgtagactgtttaggttcccctgtcaaatatcagttacccactcggtcccagttttgttgccccagaaagggatgttattatccttgggggctcccagggcaagggttaaggcctgaatcatgagcctgctggaagcccagcccctactgctgtgaaccctggggcctgactgctcagaacttgctgctgtcttgttgcggatggatggaaggttggatggatgggtggatggccgtggatggccgtggatgcgcagtgccttgcatacccaaaccaggtgggagcgttttgttgagcatgacagcctgcagcaggaatatatgtgtgcctatttgtgtggacaaaaatatttacacttagggtttggagctattcaagaggaaatgtcacagaagcagctaaaccaaggactgagcaccctctggattctgaatctcaagatgggggcagggctgtgcttgaaggccctgctgagtcatctgttagggccttggttcaataaagcactgagcaagttgagaaaaaaaaaaaaaaaaaaaaaaaaaaaaa

SEQ ID NO: 12560 - DNA, 3701 bp, Homo sapiens
gcagccagtcgcggaggcggggaggctgcgcggtcagaggcgcctggagcgagcgaatcctggcccaccgcctgcccaaccgcgtgaccttgattgagttaatgaacttcacgcctcagcgtccaggtctgtaaaatggggtgtctaacgcagaccgtacagcccagctgggtttagcaaacttccgggagccagttggagcctctccccatccctagcggtgatcccaggtgacgacatgccgcggggggtcctgcggaggccaccctagggcgttgctgctgcctttgggagtgtggagctccaaaccatgtcgcgagaggcggattttgggaggccgggatcctcgcgccagggggatgtgcgagggtgtgggataaatcttaattcctccggcccacccaaagcctggaaatccagcctccgcgcctcttgccctgcgggccccgccctcagtcccgccctcatctaacccgctaccccattggtggcgtccggcggcgcggctgctgttatttttcgaatatataaggaggtggaagtggcagctgcaactagaggcttccctggctggtgcctgagcccggcgtccctcgccccccgccctccccgcatccctctcctccctcgcgcctggccctgtggctcttcctccctccctccttccccccccccccacccctcgcccgctgcctccctcggcccagccagctgtgccggcgtttgttggctgccctgcgcccggccctccagccagccttctgccggccccgccgcgatggaggtgccccagccggagcccgcgccaggctcggctctcagtccagcaggcgtgtgcggtggcgcccagcgtccgggccacctcccgggcctcctgctgggatctcatggcctcctggggtccccggtgcgggcggccgcttcctcgccggtcaccaccctcacccagaccatgcacgacctcgccgggctcggcagcgaaaccccaaagagtcaggtagggaccctgctcttccgcagccgcagccgcctgacgcacctatccctgtctcgacgggcatccgaatcctccctgtcgtctgaatcctccgaatcttctgatgcaggtctctgcatggattcccccagccctatggacccccacatggcggagcagacgtttgaacaggccatccaggcagccagccggatcattcgaaacgagcagtttgccatcagacgcttccagtctatgccggtgaggctgctgggccacagccccgtgcttcggaacatcaccaactcccaggcgcccgacggccggaggaagagcgaggcgggcagtggagctgccagcagctctggggaagacaaggagaatgatggatttgtcttcaagatgccatggaagcccacacatcccagctccacccatgctctggcagagtgggccagccgcagggaagcctttgcccagagacccagctcggcccccgacctgatgtgtctcagtcctgaccggaagatggaagtggaggagctcagccccctggccctaggtcgcttctctctgacccctgcagagggggatactgaggaagatgatggatttgtggacatcctagagagtgacttaaaggatgatgatgcagttcccccaggcatggagagtctcattagtgccccactggtcaagaccttggaaaaggaagaggaaaaggacctcgtcatgtacagcaagtgccagcggctcttccgctctccgtccatgccctgcagcgtgatccggcccatcctcaagaggctggagcggccccaggacagggacacgcccgtgcagaataagcggaggcggagcgtgacccctcctgaggagcagcaggaggctgaggaacctaaagcccgcgtcctccgctcaaaatcactgtgtcacgatgagatcgagaacctcctggacagtgaccaccgagagctgattggagattactctaaggccttcctcctacagacagtagacggaaagcaccaagacctcaagtacatctcaccagaaacgatggtggccctattgacgggcaagttcagcaacatcgtggataagtttgtgattgtagactgcagatacccctatgaatatgaaggcgggcacatcaagactgcggtgaacttgcccctggaacgcgacgccgagagcttcctactgaagagccccatcgcgccctgtagcctggacaagagagtcatcctcattttccactgtgaattctcatctgagcgtgggccccgcatgtgccgtttcatcagggaacgagaccgtgctgtcaacgactaccccagcctctactaccctgagatgtatatcctgaaaggcggctacaaggagttcttccctcagcacccgaacttctgtgaaccccaggactaccggcccatgaaccacgaggccttcaaggatgagctaaagaccttccgcctcaagactcgcagctgggctggggagcggagccggcgggagctctgtagccggctgcaggaccagtgaggggcctgcgccagtcctgctacctcccttgcctttcgaggcctgaagccagctgccctatgggcctgccgggctgagggcctgctggaggcctcaggtgctgtccatgggaaagatggtgtgggtgtcctgcctgtctgccccagcccagattcccctgtgtcatcccatcattttccatatcctggtgccccccacccctggaagagcccagtctgttgagttagttaagttgggttaataccagcttaaaggcagtattttgtgtcctccaggagcttcttgtttccttgttagggttaacccttcatcttcctgtgtcctgaaacgctcctttgtgtgtgtgtcagctgaggctgggggagagccgtggtccctgaggatgggtcagagctaaactccttcctggcctgagagtcagctctctgccctgtgtacttcccgggccagggctgcccctaatctctgtaggaaccgtggtatgtctgccatgttgcccctttctcttttcccctttcctgtcccaccatacgagcacctccagcctgaacagaagctcttactctttcctatttcagtgttacctgtgtgcttggtctgtttgactttacgcccatctcaggacacttccgtagactgtttaggttcccctgtcaaatatcagttacccactcggtcccagttttgttgccccagaaagggatgttattatccttgggggctcccagggcaagggttaaggcctgaatcatgagcctgctggaagcccagcccctactgctgtgaaccctggggcctgactgctcagaacttgctgctgtcttgttgcggatggatggaaggttggatggatgggtggatggccgtggatggccgtggatgcgcagtgccttgcatacccaaaccaggtgggagcgttttgttgagcatgacagcctgcagcaggaatatatgtgtgcctatttgtgtggacaaaaatatttacacttagggtttggagctattcaagaggaaatgtcacagaagcagctaaaccaaggactgagcaccctctggattctgaatctcaagatgggggcagggctgtgcttgaaggccctgctgagtcatctgttagggccttggttcaataaagcactgagcaagttgagaaaaaaaaaaaaaaaaaaaaaaaaaaaaa

SEQ ID NO: 12561 - DNA, 3876 bp, Homo sapiens
gggaacaaacttcagaaggaggagagacaccgggcccagggcaccctcgcgggcggacccaagcagtgagggcctgcagccggccggccagggcagcggcaggcgcggcccggacctacgggaggaagccccgagccctcggcgggctgcgagcgactccccggcgatgcctcacaactccatcagatctggccatggagggctgaaccagctgggaggggcctttgtgaatggcagacctctgccggaagtggtccgccagcgcatcgtagacctggcccaccagggtgtaaggccctgcgacatctctcgccagctccgcgtcagccatggctgcgtcagcaagatccttggcaggtactacgagactggcagcatccggcctggagtgatagggggctccaagcccaaggtggccacccccaaggtggtggagaagattggggactacaaacgccagaaccctaccatgtttgcctgggagatccgagaccggctcctggctgagggcgtctgtgacaatgacactgtgcccagtgtcagctccattaatagaatcatccggaccaaagtgcagcaaccattcaacctccctatggacagctgcgtggccaccaagtccctgagtcccggacacacgctgatccccagctcagctgtaactcccccggagtcaccccagtcggattccctgggctccacctactccatcaatgggctcctgggcatcgctcagcctggcagcgacaagaggaaaatggatgacagtgatcaggatagctgccgactaagcattgactcacagagcagcagcagcggaccccgaaagcaccttcgcacggatgccttcagccagcaccacctcgagccgctcgagtgcccatttgagcggcagcactacccagaggcctatgcctcccccagccacaccaaaggcgagcagggcctctacccgctgcccttgctcaacagcaccctggacgacgggaaggccaccctgaccccttccaacacgccactggggcgcaacctctcgactcaccagacctaccccgtggtggcagggcgagagatggtggggcccacgctgcccggatacccaccccacatccccaccagcggacagggcagctatgcctcctctgccatcgcaggcatggtggcaggaagtgaatactctggcaatgcctatggccacaccccctactcctcctacagcgaggcctggcgcttccccaactccagcttgctgagttccccatattattacagttccacatcaaggccgagtgcaccgcccaccactgccacggcctttgaccatctgtagttgccatggggacagtgggagcgactgagcaacaggaggactcagcctgggacaggccccagagagtcacacaaaggaatctttatttattacatgaaaaataaccacaagtccagcattgcggcacactccctgtgtggttaatttaatgaaccatgaaagacaggatgaccttggacaaggccaaactgtcctccaagactccttaatgaggggcaggagtcccagggaaagagaaccatgccatgctgaaaaagacaaaattgaagaagaaatgtagcccccagccggtacccaccaaaggagagaagaagcaatagccgaggaacttggggggatggcgaatggttcctgcccgggcccaaggggtgcacagggcacctccatggctccattattaacacaactctagcaattatggaccataagcacttccctccagcccacaagtcacagcctggtgccgaggctctcctcaccagccacccagggagtcacctccctcagcctcccgcctgccccacacggaggctctggctgtcctctttctccactccatttgcttggctctttctacacctccctcttgggcatgggctgagggctggagcgagtccctcagaaattccaccaggctgtcagctgacctcttttgcctgctgctgtgaaggtatagcaccaccccaggtcctcctgcagtgcggcatccccttggcagctgccgtcagccaggccagccccagggagcttaaaacagacattccacagggcctgggcccctgggaggtgaggtgtggtgtgcggcttcacccagggcagaacaaggcagaatcgcaggaaacccgcttccccttcctgacagctcctgccaagccaaatgtgcttcctgcagctcacgcccaccagctactgaagggacccaaggcaccccctgaagccagcgatagagggtccctctctgctccccagcagctcctgcccccaaggcctgactgtatatactgtaaatgaaactttgtttgggtcaagcttccttctttctaacccccagactttggcctctgagtgaaatgtctctctttgccctgtggggcttctctccttgatgcttctttctttttttaaagacaacctgccattaccacatgactcaataaaccattgctcttcatctcaggctttggggttggctggggaaggaggcatcccggggctgggctttctcccaagaacatcagagctgagtagccgacaaactcactttggggccgtgggctggaagggaccatctgatgccccagagctctggcttggccttctccctctgcctttaattcacgttgaacgctgggtacctcactcatcccaagttcttcaacactgagcaaatgcaaggatagcacagtactgagccaaccatagactccccacaaggagttgctgttgttattaacaggaagccagagaatcagcagggtgggttagtgagggatccgggaatagctgtgactggagcctgcataaacagctctgaagggagagagaagactgggctctcttgtgtgccaggcacagtatggaaggcttcatataagttaagctgaaattagccctgttttacatacagcttcattttacatatgaggaaactgaggctttgaaaaaaatgagatgtcttgtccaagatgaaaagtagtagattcaaccaagtcctcttactctaagcccaacgcttttacccaaaaccccagagtcctcatcagggatgccaaatggttctagacccagtggaggttctggagctgccactggggatttaatttcttttgatttgctaaagatttgacctgactgaatggagaggtagagtgtagtgtggccaggacaaggtgagggaggctgtagagacttagcactttaggccaaccacctccaggaaatctgggaaatgcaatgtgacagctcgggctctgcactccagggggctgtctggtgtccacatggaccttctccatgtgggacacagctggaacaagggggcaggggcctgcagctgggatgcccaggtgaatatgggcagctggacaaacaacactgggattgagtcagatagaaggggcccaaggactccagggctgggaggacagaggctgggagagagggctcttacctccttaggcctcccaaagagcggttagggatgctgccatggatggcatggcagggggaaccctcctggaagaaaatccatctcttctgaagggatctgagatgcggctggtttttcaatggcagaacttccctctgcagcgcgactccgaatccatgacatctgagagtcttcctgaccacaaacctctgggatcccgagggctccctacccaagaatcactttgagcacagcatcccaaggagcccatagagcgatcccttgcattcacagccacagcccctctggggacactctgtacccccggcagaccctttccaactcacaaccaataaaggggcttgggctgtgctttgactaaggtgaaaaaaaaaaa

SEQ ID NO: 12562 - DNA, 4065 bp, Homo sapiens
gggaacaaacttcagaaggaggagagacaccgggcccagggcaccctcgcgggcggacccaagcagtgagggcctgcagccggccggccagggcagcggcaggcgcggcccggacctacgggaggaagccccgagccctcggcgggctgcgagcgactccccggcgatgcctcacaactccatcagatctggccatggagggctgaaccagctgggaggggcctttgtgaatggcagacctctgccggaagtggtccgccagcgcatcgtagacctggcccaccagggtgtaaggccctgcgacatctctcgccagctccgcgtcagccatggctgcgtcagcaagatccttggcaggtactacgagactggcagcatccggcctggagtgatagggggctccaagcccaaggtggccacccccaaggtggtggagaagattggggactacaaacgccagaaccctaccatgtttgcctgggagatccgagaccggctcctggctgagggcgtctgtgacaatgacactgtgcccagtgtcagctccattaatagaatcatccggaccaaagtgcagcaaccattcaacctccctatggacagctgcgtggccaccaagtccctgagtcccggacacacgctgatccccagctcagctgtaactcccccggagtcaccccagtcggattccctgggctccacctactccatcaatgggctcctgggcatcgctcagcctggcagcgacaagaggaaaatggatgacagtgatcaggatagctgccgactaagcattgactcacagagcagcagcagcggaccccgaaagcaccttcgcacggatgccttcagccagcaccacctcgagccgctcgagtgcccatttgagcggcagcactacccagaggcctatgcctcccccagccacaccaaaggcgagcagggcctctacccgctgcccttgctcaacagcaccctggacgacgggaaggccaccctgaccccttccaacacgccactggggcgcaacctctcgactcaccagacctaccccgtggtggcagatcctcactcacccttcgccataaagcaggaaacccccgaggtgtccagttctagctccaccccttcctctttatctagctccgcctttttggatctgcagcaagtcggctccggggtcccgcccttcaatgcctttccccatgctgcctccgtgtacgggcagttcacgggccaggccctcctctcagggcgagagatggtggggcccacgctgcccggatacccaccccacatccccaccagcggacagggcagctatgcctcctctgccatcgcaggcatggtggcaggaagtgaatactctggcaatgcctatggccacaccccctactcctcctacagcgaggcctggcgcttccccaactccagcttgctgagttccccatattattacagttccacatcaaggccgagtgcaccgcccaccactgccacggcctttgaccatctgtagttgccatggggacagtgggagcgactgagcaacaggaggactcagcctgggacaggccccagagagtcacacaaaggaatctttatttattacatgaaaaataaccacaagtccagcattgcggcacactccctgtgtggttaatttaatgaaccatgaaagacaggatgaccttggacaaggccaaactgtcctccaagactccttaatgaggggcaggagtcccagggaaagagaaccatgccatgctgaaaaagacaaaattgaagaagaaatgtagcccccagccggtacccaccaaaggagagaagaagcaatagccgaggaacttggggggatggcgaatggttcctgcccgggcccaaggggtgcacagggcacctccatggctccattattaacacaactctagcaattatggaccataagcacttccctccagcccacaagtcacagcctggtgccgaggctctcctcaccagccacccagggagtcacctccctcagcctcccgcctgccccacacggaggctctggctgtcctctttctccactccatttgcttggctctttctacacctccctcttgggcatgggctgagggctggagcgagtccctcagaaattccaccaggctgtcagctgacctcttttgcctgctgctgtgaaggtatagcaccaccccaggtcctcctgcagtgcggcatccccttggcagctgccgtcagccaggccagccccagggagcttaaaacagacattccacagggcctgggcccctgggaggtgaggtgtggtgtgcggcttcacccagggcagaacaaggcagaatcgcaggaaacccgcttccccttcctgacagctcctgccaagccaaatgtgcttcctgcagctcacgcccaccagctactgaagggacccaaggcaccccctgaagccagcgatagagggtccctctctgctccccagcagctcctgcccccaaggcctgactgtatatactgtaaatgaaactttgtttgggtcaagcttccttctttctaacccccagactttggcctctgagtgaaatgtctctctttgccctgtggggcttctctccttgatgcttctttctttttttaaagacaacctgccattaccacatgactcaataaaccattgctcttcatctcaggctttggggttggctggggaaggaggcatcccggggctgggctttctcccaagaacatcagagctgagtagccgacaaactcactttggggccgtgggctggaagggaccatctgatgccccagagctctggcttggccttctccctctgcctttaattcacgttgaacgctgggtacctcactcatcccaagttcttcaacactgagcaaatgcaaggatagcacagtactgagccaaccatagactccccacaaggagttgctgttgttattaacaggaagccagagaatcagcagggtgggttagtgagggatccgggaatagctgtgactggagcctgcataaacagctctgaagggagagagaagactgggctctcttgtgtgccaggcacagtatggaaggcttcatataagttaagctgaaattagccctgttttacatacagcttcattttacatatgaggaaactgaggctttgaaaaaaatgagatgtcttgtccaagatgaaaagtagtagattcaaccaagtcctcttactctaagcccaacgcttttacccaaaaccccagagtcctcatcagggatgccaaatggttctagacccagtggaggttctggagctgccactggggatttaatttcttttgatttgctaaagatttgacctgactgaatggagaggtagagtgtagtgtggccaggacaaggtgagggaggctgtagagacttagcactttaggccaaccacctccaggaaatctgggaaatgcaatgtgacagctcgggctctgcactccagggggctgtctggtgtccacatggaccttctccatgtgggacacagctggaacaagggggcaggggcctgcagctgggatgcccaggtgaatatgggcagctggacaaacaacactgggattgagtcagatagaaggggcccaaggactccagggctgggaggacagaggctgggagagagggctcttacctccttaggcctcccaaagagcggttagggatgctgccatggatggcatggcagggggaaccctcctggaagaaaatccatctcttctgaagggatctgagatgcggctggtttttcaatggcagaacttccctctgcagcgcgactccgaatccatgacatctgagagtcttcctgaccacaaacctctgggatcccgagggctccctacccaagaatcactttgagcacagcatcccaaggagcccatagagcgatcccttgcattcacagccacagcccctctggggacactctgtacccccggcagaccctttccaactcacaaccaataaaggggcttgggctgtgctttgactaaggtgaaaaaaaaaaa

SEQ ID NO: 12563 - DNA, 3755 bp, Homo sapiens
gggaacaaacttcagaaggaggagagacaccgggcccagggcaccctcgcgggcggacccaagcagtgagggcctgcagccggccggccagggcagcggcaggcgcggcccggacctacgggaggaagccccgagccctcggcgggctgcgagcgactccccggcgatgcctcacaactccatcagatctggccatggagggctgaaccagctgggaggggcctttgtgaatggcagacctctgccggaagtggtccgccagcgcatcgtagacctggcccaccagggtgtaaggccctgcgacatctctcgccagctccgcgtcagccatggctgcgtcagcaagatccttggcaggtactacgagactggcagcatccggcctggagtgatagggggctccaagcccaaggtggccacccccaaggtggtggagaagattggggactacaaacgccagaaccctaccatgtttgcctgggagatccgagaccggctcctggctgagggcgtctgtgacaatgacactgtgcccagtgtcagctccattaatagaatcatccggaccaaagtgcagcaaccattcaacctccctatggacagctgcgtggccaccaagtccctgagtcccggacacacgctgatccccagctcagctgtaactcccccggagtcaccccagtcggattccctgggctccacctactccatcaatgggctcctgggcatcgctcagcctggcagcgacaagaggaaaatggatgacagtgatcaggatagctgccgactaagcattgactcacagagcagcagcagcggaccccgaaagcaccttcgcacggatgccttcagccagcaccacctcgagccgctcgagtgcccatttgagcggcagcactacccagaggcctatgcctcccccagccacaccaaaggcgagcagggcgagagatggtggggcccacgctgcccggatacccaccccacatccccaccagcggacagggcagctatgcctcctctgccatcgcaggcatggtggcaggaagtgaatactctggcaatgcctatggccacaccccctactcctcctacagcgaggcctggcgcttccccaactccagcttgctgagttccccatattattacagttccacatcaaggccgagtgcaccgcccaccactgccacggcctttgaccatctgtagttgccatggggacagtgggagcgactgagcaacaggaggactcagcctgggacaggccccagagagtcacacaaaggaatctttatttattacatgaaaaataaccacaagtccagcattgcggcacactccctgtgtggttaatttaatgaaccatgaaagacaggatgaccttggacaaggccaaactgtcctccaagactccttaatgaggggcaggagtcccagggaaagagaaccatgccatgctgaaaaagacaaaattgaagaagaaatgtagcccccagccggtacccaccaaaggagagaagaagcaatagccgaggaacttggggggatggcgaatggttcctgcccgggcccaaggggtgcacagggcacctccatggctccattattaacacaactctagcaattatggaccataagcacttccctccagcccacaagtcacagcctggtgccgaggctctcctcaccagccacccagggagtcacctccctcagcctcccgcctgccccacacggaggctctggctgtcctctttctccactccatttgcttggctctttctacacctccctcttgggcatgggctgagggctggagcgagtccctcagaaattccaccaggctgtcagctgacctcttttgcctgctgctgtgaaggtatagcaccaccccaggtcctcctgcagtgcggcatccccttggcagctgccgtcagccaggccagccccagggagcttaaaacagacattccacagggcctgggcccctgggaggtgaggtgtggtgtgcggcttcacccagggcagaacaaggcagaatcgcaggaaacccgcttccccttcctgacagctcctgccaagccaaatgtgcttcctgcagctcacgcccaccagctactgaagggacccaaggcaccccctgaagccagcgatagagggtccctctctgctccccagcagctcctgcccccaaggcctgactgtatatactgtaaatgaaactttgtttgggtcaagcttccttctttctaacccccagactttggcctctgagtgaaatgtctctctttgccctgtggggcttctctccttgatgcttctttctttttttaaagacaacctgccattaccacatgactcaataaaccattgctcttcatctcaggctttggggttggctggggaaggaggcatcccggggctgggctttctcccaagaacatcagagctgagtagccgacaaactcactttggggccgtgggctggaagggaccatctgatgccccagagctctggcttggccttctccctctgcctttaattcacgttgaacgctgggtacctcactcatcccaagttcttcaacactgagcaaatgcaaggatagcacagtactgagccaaccatagactccccacaaggagttgctgttgttattaacaggaagccagagaatcagcagggtgggttagtgagggatccgggaatagctgtgactggagcctgcataaacagctctgaagggagagagaagactgggctctcttgtgtgccaggcacagtatggaaggcttcatataagttaagctgaaattagccctgttttacatacagcttcattttacatatgaggaaactgaggctttgaaaaaaatgagatgtcttgtccaagatgaaaagtagtagattcaaccaagtcctcttactctaagcccaacgcttttacccaaaaccccagagtcctcatcagggatgccaaatggttctagacccagtggaggttctggagctgccactggggatttaatttcttttgatttgctaaagatttgacctgactgaatggagaggtagagtgtagtgtggccaggacaaggtgagggaggctgtagagacttagcactttaggccaaccacctccaggaaatctgggaaatgcaatgtgacagctcgggctctgcactccagggggctgtctggtgtccacatggaccttctccatgtgggacacagctggaacaagggggcaggggcctgcagctgggatgcccaggtgaatatgggcagctggacaaacaacactgggattgagtcagatagaaggggcccaaggactccagggctgggaggacagaggctgggagagagggctcttacctccttaggcctcccaaagagcggttagggatgctgccatggatggcatggcagggggaaccctcctggaagaaaatccatctcttctgaagggatctgagatgcggctggtttttcaatggcagaacttccctctgcagcgcgactccgaatccatgacatctgagagtcttcctgaccacaaacctctgggatcccgagggctccctacccaagaatcactttgagcacagcatcccaaggagcccatagagcgatcccttgcattcacagccacagcccctctggggacactctgtacccccggcagaccctttccaactcacaaccaataaaggggcttgggctgtgctttgactaaggtgaaaaaaaaaaa

SEQ ID NO: 12564 - DNA, 3986 bp, Homo sapiens
gggaacaaacttcagaaggaggagagacaccgggcccagggcaccctcgcgggcggacccaagcagtgagggcctgcagccggccggccagggcagcggcaggcgcggcccggacctacgggaggaagccccgagccctcggcgggctgcgagcgactccccggcgatgcctcacaactccatcagatctggccatggagggctgaaccagctgggaggggcctttgtgaatggcagacctctgccggaagtggtccgccagcgcatcgtagacctggcccaccagggtgtaaggccctgcgacatctctcgccagctccgcgtcagccatggctgcgtcagcaagatccttggcaggtactacgagactggcagcatccggcctggagtgatagggggctccaagcccaaggtggccacccccaaggtggtggagaagattggggactacaaacgccagaaccctaccatgtttgcctgggagatccgagaccggctcctggctgagggcgtctgtgacaatgacactgtgcccagtgtcagctccattaatagaatcatccggaccaaagtgcagcaaccattcaacctccctatggacagctgcgtggccaccaagtccctgagtcccggacacacgctgatccccagctcagctgtaactcccccggagtcaccccagtcggattccctgggctccacctactccatcaatgggctcctgggcatcgctcagcctggcagcgacaagaggaaaatggatgacagtgatcaggatagctgccgactaagcattgactcacagagcagcagcagcggaccccgaaagcaccttcgcacggatgccttcagccagcaccacctcgagccgctcgagtgcccatttgagcggcagcactacccagaggcctatgcctcccccagccacaccaaaggcgagcagggcctctacccgctgcccttgctcaacagcaccctggacgacgggaaggccaccctgaccccttccaacacgccactggggcgcaacctctcgactcaccagacctaccccgtggtggcagctccgcctttttggatctgcagcaagtcggctccggggtcccgcccttcaatgcctttccccatgctgcctccgtgtacgggcagttcacgggccaggccctcctctcagggcgagagatggtggggcccacgctgcccggatacccaccccacatccccaccagcggacagggcagctatgcctcctctgccatcgcaggcatggtggcaggaagtgaatactctggcaatgcctatggccacaccccctactcctcctacagcgaggcctggcgcttccccaactccagcttgctgagttccccatattattacagttccacatcaaggccgagtgcaccgcccaccactgccacggcctttgaccatctgtagttgccatggggacagtgggagcgactgagcaacaggaggactcagcctgggacaggccccagagagtcacacaaaggaatctttatttattacatgaaaaataaccacaagtccagcattgcggcacactccctgtgtggttaatttaatgaaccatgaaagacaggatgaccttggacaaggccaaactgtcctccaagactccttaatgaggggcaggagtcccagggaaagagaaccatgccatgctgaaaaagacaaaattgaagaagaaatgtagcccccagccggtacccaccaaaggagagaagaagcaatagccgaggaacttggggggatggcgaatggttcctgcccgggcccaaggggtgcacagggcacctccatggctccattattaacacaactctagcaattatggaccataagcacttccctccagcccacaagtcacagcctggtgccgaggctctcctcaccagccacccagggagtcacctccctcagcctcccgcctgccccacacggaggctctggctgtcctctttctccactccatttgcttggctctttctacacctccctcttgggcatgggctgagggctggagcgagtccctcagaaattccaccaggctgtcagctgacctcttttgcctgctgctgtgaaggtatagcaccaccccaggtcctcctgcagtgcggcatccccttggcagctgccgtcagccaggccagccccagggagcttaaaacagacattccacagggcctgggcccctgggaggtgaggtgtggtgtgcggcttcacccagggcagaacaaggcagaatcgcaggaaacccgcttccccttcctgacagctcctgccaagccaaatgtgcttcctgcagctcacgcccaccagctactgaagggacccaaggcaccccctgaagccagcgatagagggtccctctctgctccccagcagctcctgcccccaaggcctgactgtatatactgtaaatgaaactttgtttgggtcaagcttccttctttctaacccccagactttggcctctgagtgaaatgtctctctttgccctgtggggcttctctccttgatgcttctttctttttttaaagacaacctgccattaccacatgactcaataaaccattgctcttcatctcaggctttggggttggctggggaaggaggcatcccggggctgggctttctcccaagaacatcagagctgagtagccgacaaactcactttggggccgtgggctggaagggaccatctgatgccccagagctctggcttggccttctccctctgcctttaattcacgttgaacgctgggtacctcactcatcccaagttcttcaacactgagcaaatgcaaggatagcacagtactgagccaaccatagactccccacaaggagttgctgttgttattaacaggaagccagagaatcagcagggtgggttagtgagggatccgggaatagctgtgactggagcctgcataaacagctctgaagggagagagaagactgggctctcttgtgtgccaggcacagtatggaaggcttcatataagttaagctgaaattagccctgttttacatacagcttcattttacatatgaggaaactgaggctttgaaaaaaatgagatgtcttgtccaagatgaaaagtagtagattcaaccaagtcctcttactctaagcccaacgcttttacccaaaaccccagagtcctcatcagggatgccaaatggttctagacccagtggaggttctggagctgccactggggatttaatttcttttgatttgctaaagatttgacctgactgaatggagaggtagagtgtagtgtggccaggacaaggtgagggaggctgtagagacttagcactttaggccaaccacctccaggaaatctgggaaatgcaatgtgacagctcgggctctgcactccagggggctgtctggtgtccacatggaccttctccatgtgggacacagctggaacaagggggcaggggcctgcagctgggatgcccaggtgaatatgggcagctggacaaacaacactgggattgagtcagatagaaggggcccaaggactccagggctgggaggacagaggctgggagagagggctcttacctccttaggcctcccaaagagcggttagggatgctgccatggatggcatggcagggggaaccctcctggaagaaaatccatctcttctgaagggatctgagatgcggctggtttttcaatggcagaacttccctctgcagcgcgactccgaatccatgacatctgagagtcttcctgaccacaaacctctgggatcccgagggctccctacccaagaatcactttgagcacagcatcccaaggagcccatagagcgatcccttgcattcacagccacagcccctctggggacactctgtacccccggcagaccctttccaactcacaaccaataaaggggcttgggctgtgctttgactaaggtgaaaaaaaaaaa

SEQ ID NO: 12565 - DNA, 3653 bp, Homo sapiens
gggaacaaacttcagaaggaggagagacaccgggcccagggcaccctcgcgggcggacccaagcagtgagggcctgcagccggccggccagggcagcggcaggcgcggcccggacctacgggaggaagccccgagccctcggcgggctgcgagcgactccccggcgatgcctcacaactccatcagatctggccatggagggctgaaccagctgggaggggcctttgtgaatggcagacctctgccggaagtggtccgccagcgcatcgtagacctggcccaccagggtgtaaggccctgcgacatctctcgccagctccgcgtcagccatggctgcgtcagcaagatccttggcaggtactacgagactggcagcatccggcctggagtgatagggggctccaagcccaaggtggccacccccaaggtggtggagaagattggggactacaaacgccagaaccctaccatgtttgcctgggagatccgagaccggctcctggctgagggcgtctgtgacaatgacactgtgcccagtgtcagctccattaatagaatcatccggaccaaagtgcagcaaccattcaacctccctatggacagctgcgtggccaccaagtccctgagtcccggacacacgctgatccccagctcagctgtaactcccccggagtcaccccagtcggattccctgggctccacctactccatcaatgggctcctgggcatcgctcagcctggcagcgacaagaggaaaatggatgacagtgatcaggatagctgccgactaagcattgactcacagagcagcagcagcggaccccgaaagcaccttcgcacggatgccttcagccagcaccacctcgagccgctcgagtgcccatttgagcggcagcactacccagaggcctatgcctcccccagccacaccaaaggcgagcaggaagtgaatactctggcaatgcctatggccacaccccctactcctcctacagcgaggcctggcgcttccccaactccagcttgctgagttccccatattattacagttccacatcaaggccgagtgcaccgcccaccactgccacggcctttgaccatctgtagttgccatggggacagtgggagcgactgagcaacaggaggactcagcctgggacaggccccagagagtcacacaaaggaatctttatttattacatgaaaaataaccacaagtccagcattgcggcacactccctgtgtggttaatttaatgaaccatgaaagacaggatgaccttggacaaggccaaactgtcctccaagactccttaatgaggggcaggagtcccagggaaagagaaccatgccatgctgaaaaagacaaaattgaagaagaaatgtagcccccagccggtacccaccaaaggagagaagaagcaatagccgaggaacttggggggatggcgaatggttcctgcccgggcccaaggggtgcacagggcacctccatggctccattattaacacaactctagcaattatggaccataagcacttccctccagcccacaagtcacagcctggtgccgaggctctcctcaccagccacccagggagtcacctccctcagcctcccgcctgccccacacggaggctctggctgtcctctttctccactccatttgcttggctctttctacacctccctcttgggcatgggctgagggctggagcgagtccctcagaaattccaccaggctgtcagctgacctcttttgcctgctgctgtgaaggtatagcaccaccccaggtcctcctgcagtgcggcatccccttggcagctgccgtcagccaggccagccccagggagcttaaaacagacattccacagggcctgggcccctgggaggtgaggtgtggtgtgcggcttcacccagggcagaacaaggcagaatcgcaggaaacccgcttccccttcctgacagctcctgccaagccaaatgtgcttcctgcagctcacgcccaccagctactgaagggacccaaggcaccccctgaagccagcgatagagggtccctctctgctccccagcagctcctgcccccaaggcctgactgtatatactgtaaatgaaactttgtttgggtcaagcttccttctttctaacccccagactttggcctctgagtgaaatgtctctctttgccctgtggggcttctctccttgatgcttctttctttttttaaagacaacctgccattaccacatgactcaataaaccattgctcttcatctcaggctttggggttggctggggaaggaggcatcccggggctgggctttctcccaagaacatcagagctgagtagccgacaaactcactttggggccgtgggctggaagggaccatctgatgccccagagctctggcttggccttctccctctgcctttaattcacgttgaacgctgggtacctcactcatcccaagttcttcaacactgagcaaatgcaaggatagcacagtactgagccaaccatagactccccacaaggagttgctgttgttattaacaggaagccagagaatcagcagggtgggttagtgagggatccgggaatagctgtgactggagcctgcataaacagctctgaagggagagagaagactgggctctcttgtgtgccaggcacagtatggaaggcttcatataagttaagctgaaattagccctgttttacatacagcttcattttacatatgaggaaactgaggctttgaaaaaaatgagatgtcttgtccaagatgaaaagtagtagattcaaccaagtcctcttactctaagcccaacgcttttacccaaaaccccagagtcctcatcagggatgccaaatggttctagacccagtggaggttctggagctgccactggggatttaatttcttttgatttgctaaagatttgacctgactgaatggagaggtagagtgtagtgtggccaggacaaggtgagggaggctgtagagacttagcactttaggccaaccacctccaggaaatctgggaaatgcaatgtgacagctcgggctctgcactccagggggctgtctggtgtccacatggaccttctccatgtgggacacagctggaacaagggggcaggggcctgcagctgggatgcccaggtgaatatgggcagctggacaaacaacactgggattgagtcagatagaaggggcccaaggactccagggctgggaggacagaggctgggagagagggctcttacctccttaggcctcccaaagagcggttagggatgctgccatggatggcatggcagggggaaccctcctggaagaaaatccatctcttctgaagggatctgagatgcggctggtttttcaatggcagaacttccctctgcagcgcgactccgaatccatgacatctgagagtcttcctgaccacaaacctctgggatcccgagggctccctacccaagaatcactttgagcacagcatcccaaggagcccatagagcgatcccttgcattcacagccacagcccctctggggacactctgtacccccggcagaccctttccaactcacaaccaataaaggggcttgggctgtgctttgactaaggtgaaaaaaaaaaa

SEQ ID NO: 12566 - DNA, 7918 bp, Homo sapiens
cgagcacggtgcactctgggagctgtcactaggcccttcggctcccggtctcggtgtagctgccgtggttgccaggagagctgcgccggcgagaagcggccgagccagcagcaggaaggaacacacaagtagttatctttcaggctgtctttgaatacttccatgaccctgaacactagctgaggagagtttcaaccactgctaacagtaatgactttacatgagtttggaactggtctctagtgggaagttgtgggaggatgaacacagaagagctggagttattgagtgactccaaatacagaaactatgtagcagcaattgacaaagcactaaagaattttgaatactccagtgaatgggcagatttgatatcagcacttggaaaacttaataaggttttacaaaataatgcaaagtaccaagtagtacccaaaaagctgaccataggcaaacgcctagctcaatgtctacatccagcattaccaggtggagttcatcggaaggcgcttgaaacatatgaaattatcttcaaaataattggacctaagcgacttgccaaagatctttttttatatagttctggattatttcctcttcttgcaaatgctgccatgtctgtgaaaccaacattgctcagtttgtatgagatatattatctgcctttgggtaaaacactgaaacctggtctacagggattgcttactggtattcttcctggcttagaagaaggatcagagtactatgagagaacaaatatgttgttggaaaaggttgctgctgctgtggaccagtcagcattctacagtgccctgtggggtagtcttctcaccagtcctgctgtgcgtttacctggaatcacgtatgttcttgcccatttaaacaggaagctttctatggaagatcaactttatataattggcagtgatattgagctaatggtagaagcagtaagtacttcagtgcaggactcaagtgtacttgtacagagaagcacactggacctcatactcttctgttttccattccacatgagtcaggccactcgaccggatatgatcaggatcttgtcagcagcccttcatgtagtgctaaggagggatatgtctctgaatcgaagactttatgcatggcttcttggttttgataacaacggtgctatcataggacccagaagcacaagacacagtaatcctgaagaacatgccacttactatttcactaccttttcaaaagaattattagtccaggcaatggtgggaatcttacaagtgaatggatttggagaagagaacactctaatgcaggatctaaagccttttcgcattttaatcagtttactggacaaacctgagctaggacctgtaattctagaagatgtcctgattgaagtgtttagaacattatattctcaatgcaaagcagagttggatcttcaaactgaaccacccttcagcaaggatcatgctcagttaagcagtaaattaagagaaaataagaaaacagcagagctgattaaaactgctaaccttctctttaattccttcgaaccttattatatgtgggattatgttgcacgctggtttgaagaatgttgtaggaggacactgcatgtgagacttcagattggacctggagatagtaatgactcatctgaattacagctgaccaatttctgcttactggtggattttttgttggacatagtttctttgcctactagaagtatgagggtgctgtgtcaggagacttacattgaaatccagacagaacacttgccccagttgctgctcagaatgatttctgccttgacaagccatctccagacattgcacttatctgaactcacagattctctcagactctgctcaaagatccttagcaaggttcagcctccactgttatctgctagcactggaggtgttttgcagtttccaagtgggcagaacaattcagtcaaagagtgggaagacaaaaaggtatcatcagtttctcatgaaaatcctactgaagtgtttgaagatggagaaaatccaccaagtagtcgatcatcagagagtggattcactgagtttatacaatatcaagcagaccgaactgatgatattgacagagaactgagtgagggccagggggcagctgccatcccaattggtagcacatcctctgagacagaaacagcatccactgtgggatctgaagaaaccatcatccagaccccttccgtagtcactcaggggacagcaacccgaagtaggaagacagcccaaaagactgcaatgcagtgctgcttggagtatgtccaacagtttcttaccagacttatcaacctctacatcattcagaataactctttttctcagtctttggctacagaacatcaaggggatcttggtcgagaacaaggagagacttcaaaatgggacagaaattcacaaggagatgtaaaagagaaaaacataagtaaacaaaaaacttctaaagaatacctgtctgccttccttgctgcctgtcagctcttcctagagtgctcaagtttcccagtttacattgctgaggggaaccatacatcagagttacgttctgaaaaattggagactgactgtgagcatgtgcagcctccacagtggctccagactctgatgaatgcttgcagccaagcaagtgatttcagtgttcagagtgttgctatttcactagttatggacctggtgggactgacacagtctgtggccatggtcactggggaaaacatcaacagtgtagagcctgcacaacccttaagtccaaaccagggaagagtagctgtggttattagacctcccctcactcagggcaatctgaggtacatagctgagaagactgaatttttcaagcatgtagctttaacattgtgggaccagttgggagatgggacacctcagcatcaccagaagagtgtggaactattttatcaattacataacttagttccttcttctagcatctgtgaggatgttataagtcagcagttaacccataaagataagaaaataaggatggaagcacatgccaagtttgcagttctttggcatctaacgagagatctccatataaataaatcttcatcttttgtacgttcttttgacaggtcactgttcatcatgttagatagccttaacagtctcgatggttctactagctctgtgggacaagcctggctgaaccaagtcctacaaagacatgatattgcacgagttttggaaccattgctattgctcctgcttcatccaaaaactcagagggtttcagtacagcgtgtacaagcagaacgttattggaataagtctccctgttatccaggagaggagagtgacaagcatttcatgcaaaattttgcctgcagcaatgtgagccaagtacaactcatcacatcaaaaggaaatggtgaaaagccacttaccatggatgaaatagagaactttagtctcactgtgaatccattaagtgacagactttccctcctaagtaccagcagtgagacaattccaatggttgtgtctgattttgatcttccagaccaacagatagaaatacttcagagttctgactcgggatgttcacagtcctctgctggggacaacttgagttacgaagttgatcctgaaaccgtgaatgcccaagaggattctcaaatgcccaaggaaagctccccagatgatgatgttcaacaggtagtatttgacctgatatgtaaagttgtaagtggcctcgaagtggaatctgcatcagttacatctcaattagaaattgaagctatgcccccaaagtgcagtgatatagatccagatgaagagacgattaaaattgaagatgactccattcaacagagtcagaatgctttgctgagtaatgaaagttctcagtttctgtctgtgtctgcagagggaggccatgagtgtgtggcaaatggaatctccaggaatagctcctcaccttgtatttcaggaaccacacacactcttcatgactcttctgttgcttccatagaaaccaaatctagacaaaggagtcacagtagtattcaattcagcttcaaagaaaaattatcagaaaaagtttcggagaaggaaacaatagttaaggagtcaggtaaacaaccaggagcaaaacctaaagtaaaacttgccagaaaaaaggatgatgacaagaaaaaatcttcaaatgaaaaactcaaacaaaccagtgtattcttcagtgatggtctggatttagagaactggtatagctgtggagagggagacatttctgaaattgagagtgacatgggttctccaggatctcgaaaatctcccaatttcaacattcatcctctctatcaacatgtgctcctgtatctccagttgtatgattcatccaggactttgtatgctttctctgccatcaaagccatcttgaaaactaaccctatagcttttgtaaatgccatttcaactactagtgtaaataatgcatatactcctcagttgtctctccttcagaatctattggccagacaccggatttctgttatgggcaaagatttttatagtcacattccagtggactcaaatcataacttccggagttctatgtacatagaaattcttatttctctctgcttatattacatgcgtagccattacccaactcatgtcaaggttactgcacaagatttaataggcaatcgaaacatgcaaatgatgagcatagaaattctgacactactcttcactgagctggcaaaagtaatagaaagctcagcgaagggtttccctagttttatttctgatatgttatctaagtgcaaagttcagaaagtgattcttcattgtttgctgtcatctatctttagtgctcagaaatggcatagtgaaaaaatggcaggtaagaacctggttgctgtggaagaaggtttctcagaggacagccttattaatttctcagaggatgaatttgacaatggcagcacgttgcagtcacaacttcttaaggtgcttcagaggctgattgttctagaacacagagtaatgactattcctgaagagaatgaaacaggttttgattttgttgtatctgacttagaacacatcagtccccatcaacccatgacttctcttcagtatttgcatgctcagccaatcacatgtcaaggcatgttcctctgtgcagtgatacgagctttgcatcagcactgtgcatgtaagatgcacccacaatggattggtttaatcacatctactctgccttacatgggaaaagttctgcagagagtggttgtttctgtgacactacaactgtgcagaaatttagataatctaattcagcagtacaaatacgaaacaggattatctgatagtaggcctctgtggatggcatcaattattccaccagatatgattcttactcttttggaagggattacagccattatccattactgtttgttggatccaactacacagtatcaccaacttttggtcagtgtagaccagaaacacttgtttgaagcacgcagtggaatcctctcaatccttcatatgatcatgtcctctgtgacactgctttggagcatactgcatcaagctgattcttcagaaaagatgactattgccgcatccgcatctcttaccactattaatcttggagctacaaagaacttgagacaacagattcttgaattgttgggccccatttcaatgaatcatggtgttcactttatggctgccattgcatttgtgtggaatgaaagaagacagaataaaacaaccaccaggaccaaggtcattcctgcagccagtgaagaacagcttttattagtggaattggttcgttcaatcagtgtcatgagagcagaaactgttatccagactgtaaaagaagttttaaagcagccaccagccatagccaaggacaagaaacatctttctttggaagtctgcatgcttcagtttttctatgcttatattcaaagaattccagtgcccaatttagtggatagctgggcgtcactgttgatacttctgaaagactctatacaactgagtcttccagctccagggcagtttcttatacttggggttctgaatgagtttattatgaaaaaccctagtttggaaaataaaaaagaccaaagagaccttcaggatgtaactcacaaaatagtggatgcaattggtgcaattgctggttcttctctggaacagacaacatggctgcgacgaaatcttgaagttaagccttctcccaaaataatggtagatggaaccaatttggaatctgatgttgaagatatgttatcacctgcaatggaaaccgcaaacataactccttctgtatatagtgtccatgcattgacattactctctgaggttttggctcatcttttggatatggttttctatagtgatgaaaaggagcgggttattcctttacttgtaaatattatgcattatgttgtgccctacctcagaaatcacagtgcacataatgcccctagttatcgagcttgtgtccagctgctcagcagtcttagtgggtatcagtacacacggagagcttggaaaaaagaagcttttgacctctttatggatcccagtttctttcagatggatgcctcttgtgttaatcattggagagcaattatggacaatctgatgacacatgataaaacaacatttagagatttgatgactcgtgtagcagtggctcaaagcagttcacttaatctctttgcaaaccgtgatgtggagctagaacagagagctatgcttcttaaaagattagcatttgctatttttagcagtgaaattgaccagtaccagaaatatcttccagatatacaagagagattggttgagagtctccgtttgccacaggtgccaactctccattctcaagtgttcctgtttttcagagtgttacttttaagaatgtctccccaacatcttacctcactctggcctaccatgattacagaacttgtacaagtatttttactgatggagcaggaactcactgctgatgaagatatttcacggacttcagggccctctgtggctggtctggagacaacgtacacaggaggtaatggcttctctacttcatataacagccagcggtggttaaacctctatctctctgcttgcaaatttttggatttggctctcgcattgccctctgaaaaccttcctcagtttcagatgtaccgatgggcctttattccagaagcctcagatgattcaggtttggaagtcagaaggcagggtatacatcaacgagaatttaaaccttacgtggtacgactagcaaaacttcttcggaaaagagcaaagaaaaatccagaggaagacaactcagggagaacattgggttgggagccagggcacttgctgctcaccatctgcaccgtgcgcagtatggagcagctcctgccgttcttcaatgtgctcagtcaagtcttcaacagcaaagtcacaagccgatgtggaggacactcagggagtcctatcctctactcaaatgccttccctaataaggacatgaaactggagaaccacaaaccatgttccagcaaagccaggcaaaaaatagaagagatggtagaaaaagattttctggaagggatgataaaaacttgagcaccattgctggttccatttagcttacatgtaaatgtaattatttaaaacacacacactgctctgcgttgtatagtttttccttttttgtatgtaacagaacacatttcagattgtatttaatttaaatatttgtatataagagcaaatgtctgaatgtggcctgaatcaagtttaaatattgttggctcatactgattatggtgcctaagagagctatatatatacacatgtaaagtcctaaaaaaaaaaaaaaaaaa

SEQ ID NO: 12567 - DNA, 11242 bp, Homo sapiens
cccggatagccggcggcggcggcggcggcggcggcggcggcggccgggagaggcccctccttcacgccctgcttctctccctcgctcgcagtcgagccgagccggcggacccgcctgggctccgaccctgcccaggccatggccggcaacgtgaagaagagctctggggccgggggcggcagcggctccgggggctcgggttcgggtggcctgattgggctcatgaaggacgccttccagccgcaccaccaccaccaccaccacctcagcccccacccgccggggacggtggacaagaagatggtggagaagtgctggaagctcatggacaaggtggtgcggttgtgtcagaacccaaagctggcgctaaagaatagcccaccttatatcttagacctgctaccagatacctaccagcatctccgtactatcttgtcaagatatgaggggaagatggagacacttggagaaaatgagtattttagggtgtttatggagaatttgatgaagaaaactaagcaaaccataagcctcttcaaggagggaaaagaaagaatgtatgaggagaattctcagcctaggcgaaacctaaccaaactgtccctcatcttcagccacatgctggcagaactaaaaggaatctttccaagtggactctttcagggagacacatttcggattactaaagcagatgctgcggaattttggagaaaagcttttggggaaaagacaatagtcccttggaagagctttcgacaggctctacatgaagtgcatcccatcagttctgggctggaggccatggctctgaaatccactattgatctgacctgcaatgattatatttcggtttttgaatttgacatctttacccgactctttcagccctggtcctctttgctcaggaattggaacagccttgctgtaactcatcctggctacatggcttttttgacgtatgacgaagtgaaagctcggctccagaaattcattcacaaacctggcagttatatcttccggctgagctgtactcgtctgggtcagtgggctattgggtatgttactgctgatgggaacattctccagacaatccctcacaataaacctctcttccaagcactgattgatggcttcagggaaggcttctatttgtttcctgatggacgaaatcagaatcctgatctgactggcttatgtgaaccaactccccaagaccatatcaaagtgacccaggaacaatatgaattatactgtgagatgggctccacattccaactatgtaaaatatgtgctgaaaatgataaggatgtaaagattgagccctgtggacacctcatgtgcacatcctgtcttacatcctggcaggaatcagaaggtcagggctgtcctttctgccgatgtgaaattaaaggtactgaacccatcgtggtagatccgtttgatcctagagggagtggcagcctgttgaggcaaggagcagagggagctccctccccaaattatgatgatgatgatgatgaacgagctgatgatactctcttcatgatgaaggaattggctggtgccaaggtggaacggccgccttctccattctccatggccccacaagcttcccttcccccggtgccaccacgacttgaccttctgccgcagcgagtatgtgttccctcaagtgcttctgctcttggaactgcttctaaggctgcttctggctcccttcataaagacaaaccattgccagtacctcccacacttcgagatcttccaccaccaccgcctccagaccggccatattctgttggagcagaatcccgacctcaaagacgccccttgccttgtacaccaggcgactgtccctccagagacaaactgccccctgtcccctctagccgccttggagactcatggctgccccggccaatccccaaagtaccagtatctgccccaagttccagtgatccctggacaggaagagaattaaccaaccggcactcacttccattttcattgccctcacaaatggagcccagaccagatgtgcctaggctcggaagcacgttcagtctggatacctccatgagtatgaatagcagcccattagtaggtccagagtgtgaccaccccaaaatcaaaccttcctcatctgccaatgccatttattctctggctgccagacctcttcctgtgccaaaactgccacctggggagcaatgtgagggtgaagaggacacagagtacatgactccctcttccaggcctctacggcctttggatacatcccagagttcacgagcatgtgattgcgaccagcagattgatagctgtacgtatgaagcaatgtataatattcagtcccaggcgccatctatcaccgagagcagcacctttggtgaagggaatttggccgcagcccatgccaacactggtcccgaggagtcagaaaatgaggatgatgggtatgatgtcccaaagccacctgtgccggccgtgctggcccgccgaactctctcagatatctctaatgccagctcctcctttggctggttgtctctggatggtgatcctacaacaaatgtcactgaaggttcccaagttcccgagaggcctccaaaaccattcccgcggagaatcaactctgaacggaaagctggcagctgtcagcaaggtagtggtcctgccgcctctgctgccaccgcctcacctcagctctccagtgagatcgagaacctcatgagtcaggggtactcctaccaggacatccagaaagctttggtcattgcccagaacaacatcgagatggccaaaaacatcctccgggaatttgtttccatttcttctcctgcccatgtagctacctagcacaccatctccctgctgcaggtttagaggaccagtgagttgggagttattactcaagtggcacctagaagggcaggagttcctttggtgacttcacagtgaagtcttgccctctctgtgggatatcacatcagtggttccaagatttcaaagtggtgaaatgaaaatggagcagctagtatgttttattattttatgggtcttgagtgcatttgaaggtgtccttcagttcccacgtagagagagtgtggattatattacatgataacctacctggggaacagtccagaaagctatagaacaagtattttgctggaaatcctaattgaggacttaagacttcctgggttaaggatgtggccgtgtgtgtgtgtgtctgcctgtggttgtatgtgtccttgtgattataagattaacctgctgtgtgtgttaattccaggcagggaattagcacaaaaggtttaggaaggaatctttttttaaagacttccatctactgtggtattatacccaagcctagtgtgtattacaacttcaacactcccctttggcttatattaccatgtgcatagctaaagtcttctatttttagaacaccttctgtctgttctttccccatcaactccttcctcatccttcttggtgttctgtcatgggccatgggcttgctatggccagccttactgaggccaagcagcttatgggatgttctttattgtgtgtgatggtattggtttgtttggtagataagtgggaggaaaagtactgttgctacactattataggcatgtttgatactagcagctaacactggtcactccaaagcactgtttctataggaacattgaagctattaagatgttttgattatcctaattacataatgaccgatttgagatagaggcctttaaatacattccatgccctccccagaaaatagtctgtgggagtcagttgccttggtgccaggtatgtgttctgatgtaggtcatgagtctttctacttaatgggaagggaagaacatttgtttccaggatgactttctggccagaataccggaaagcttttaggaagcttcgttcacatgctatttaaatgcacaaaatagacagtaaggatttatctgttcagtttttcttcccagtgaattaatttcagcttatatgggtgtcttcatttgaacatgaggaatattaggttatattttcagcagtggttttttcctttgccctttaaggagtggggataatgtccacggtggcccagcctcttgctgatggcaccttccctgcattgctgcctcccgatgatgtggttcttttcttgtgcctgtggctttgggaatgtaacatctctttcctcctttccttcccttttcctcttcacctgaggtcctaaatactctctgtaattactgtgttcttcacggtaattagacatcattcagtgaataaattactgtagtcaaagacagtatgggctggcagtttgtgtaattgcaagttcataaagagaattgagggtccagttgggagaactattagtcagttcttttatatgctgataaatgatccctcgagttcagttagtattctgtccagagtgtttagctcactttcttagcagtgtgtaagctttctccatgtcagaagcaagcctgctctttgataaatctgtcttcctgaaaatctaaatcatgcttttgtctttagatctacacagaaatgaccctccttggatcagttttctttccagtctaatcatctttggaactaaaacttgttctaactcgtctcttggcattcagctactcctagatcttttggttttatcccctggcctcagagccatttatattcccagagtaggcagtacaggatctcgtgttgatttgctgtggttacccagtgtcttctctacatggcataaagcggcaaagcccaccattaggtgaggcggtcccgagttgaggtagagtggggcagaggaagatggcagtgaatatcaaacagtagaccgccatcaacttctaacagccagtacacacactgtttcattttgaggtaacgttcagttttgcattttgtttaaatattgaaggcctagacaaagaactagaaaaaaaaaagcagtttccaggcccatccatattgtaatttttctttatctgcagatattgcctgtagtctaaagatctctttggaagacaaagcattggctatatatcttttgccttttccatgcatctaaatcttctctggagattatctccctactgtgtaggttaagggcagtctcgacttttccttttttgagtcctgtgtggctctttgaatcagcgtgaaactgaggctccagctccctgtgttgtgtgtgtgtgccatccatgggcttgggtgtcagtttgtcacaggtatctgccagcattcaaggttttggatcatttcatgaggatctttcctttgactgggtgctgtgaggacacacctgggtctgtgcctgagattgccaggcaagattaaggaaagttttcatgtggcttttgttttgaggttattctcaaaaccttaatttcttatattttctgttgactaaggcaccagtaacccattcttcaccctccatttgtatggcaatttaaaagtctttggctttgctctgaatttaattaaaactgccttttatgaacagacttcgagttttgccattttgggcaagcccttccgcttgtcccttcctagtggctaataaagtaaaaaaacccacactactttgttctctttttctcatattcattgggctgttgtattcagccagtctcatgctttccctgggtcttcacggattgctttccaagctgccttgttgcggggttgctgcagagcagcaactggacctttccagctgtcgccatgttccttccactaaagtagagggttcttaaaatggaaaaacctgtgggctcttcatatacctccctttagttaagtaatagaccaggcagcttctcatctcagcatttacctgttaatatttttgtgaatagtgctctctacctgtgggtggccgttctcttccacttgctcgtctccccccagccccattctgcataatctaccattcttctcctctctttctcttcttatacagaccctcattactggggcccaagatgtgggatactactgttagtattatttaactattttgtagatttaaaagatttctggttaagggaggtgggggtcactgttcatcactcttaaaatatgtgttttctctatagaaaagtaaaatgtgtttatggtcccaaacagtcaactcacaaatttttataacaaaatttccttgtaaaaactagggaccatctatatattccctttaagatctagttctttttgtaggtgttcagcaatggtgataaagcagaatattctcctacctcacgtcattaaagtcagaagattatagaccttctcaaactataagtccctcttcttgccgttggcctttctgactctggaatgaccactgttcattgaaaaatagttttctgactattggtctggctctaacagtttgtttgttcatccagcaaatgtttatgagtgatgaccatgtgccagaaatgtcaggtatgtgtccttcccttggcgccacatagtagtttactaatgtttgggggattgtacttggactgtcatagcctctgcgtttgaccttaaaatagctcttcccagtaagattgtgcaatttttattcacagctcttccatgtagacttacctttcctcatagagctatcctggttaataacaggccaagattctcccattatcccctgttgtctcctgtagctttgataatgcctgggagattccttggtgtaagtgtcatggataccgactgtttttatgttggaatttgttccaacataattagaatctgtttggtgagttgaaaggtaagttggctcagagttgcacagtagggcattaaatgtttaagcaaagcatctgcccacactcccctttccaatctagtgccttccttgaactttttcctgagctgctacgtccctaatcccccttgttgggaggattttcgtatcacccttatgggacctgtcaccatgtcctgtactatttggaattggttttccagtctttcaacaaccgttgtggctaactatgttttagaagggctggaggtgtgggccctgtcttcgggtctcaggacccaaagatcctttagtcagttgttgggtcttccaagagccagacattaatacagattgaactccatcagtcccctaattgtcagcctttacctccctcccagagcaaggagtttagggattctaaagcttagtgtccacacatcattctaccagaccttagagctttagaagctcaatctaaaatactgtaactcagcataaactattactatcactcctttgaactcagtctccatgagcagtgttttgttggaaatacatagaacggcttaatgcctagagggtggtggatagtgaaggacggtcaaggttatatttttgactgcttagggattctttggatccaagaaacagaaatgttcaagcggaataaaggagggagtggagttgtggtaaggatgcagggtatttcgcagaacccaggacgggaagtgcctttggttcttgggtggagctggaactgcagagctttgcacctagtcctttctcccgcttcacagtctgcttatggtatatgtggcccccaaataggcactctagtcctcaagtctacaccaccttccaactctggggatcaccatgaacaaattctcaatttcccatacttaattttttttttttttgagatggagtctcgctgtgtcgcccaggctggagtgcagtggtgcagtctcaactcaccacaacctctgcctcccaggttcaagcagttctctgcctcaacctcccgagtagctgggattacaggcgcctgccaccatgcccagctaatgttcatatttttagtagagacagggtttcaccgtcttggctaggctggtcttgaactcctgaccctcatgatccacccacctcggcctcccaaagtgctaagattacaggcgtgagccaccgcgcccggcccatacttcgtattcttaaaaaaaactacactcagcccagcacattgatcaagtatctatctctgagcagttggccttgccagggagagcagagatgtggcaggctccttcagctggagacagggagcttctcagagaagtgagcagagactccacagacaccctaaaaaggcttctactcaagaagtaaagccactactcctgcctttttgcttagtggacaggaaggcacaggagtttgtctgggacatcatagaaattcttaggtttaacttaattctggtcattgtcttctttatttcctgtttttcttccctttgtcagtcttcgcatccaagatttcttccctccctcttgtgggccagcctgtcctgttccagagctagcctgttcctgggtagccttccttagcctccattcagcctcaggtcttttgccttcttccgtgtttatttagagagcagaatctaataacgggttccactgtagccactatccatggacttctgggtcctcttcaggtttgagtgcttgaaaatgttcattctctgggcttgtggcctgtctcctccactctcctcctcaccctctcgctccttcctgtgtgagggccgctctgcagtaatgttctcaggcaagccttcctaggcacctcagaaactactttgccagagccagtaagaatatataatattggagcagttgccaggatagaaattaaatatagattccagtttaggatagagtttttaccgagagctctttagacagtatacctgtgtcttctctggcaattgctttcattttagtcctatataaaagctttccttttctgtttttttttaaaactatgcttttgcttgcctaaatcttttgatcttatatttctctcatctcagagcctgtcctgagttgtaaggtatttcatactgccttacttaaaagttttttaaactactagagtcatttgatacacacagaagttacctaataatccaaagatgtccatcaagggaggaagggtgggtcatcagactttgcctttgatgttgtagactaggctcctgagttaagcagcagagggacagcagtgccatgtgccttcactgtgtcccaggaaatctgggttggttccagtgggaaataccagtatttcttggttctggaaagtagcaaaagagtaggagatggggaaatagggatggggagagcaagccccgcatgtccatggcgagtcaggtggggagcacgggtggaagggccggctgttgacagacagactaagctgtgtggtgctcttgccgccccttcctgggtacagagcttgagaaaaatgcagccgaccactccctgtgtttgtacagagcaaagcccaaaagccaacctcagatctcctgatttggcagctgaagaaatcagcagagtcctgattgcctgattcagtcccaaaaatgaatgtcaggccccgccccctccccaccaacattgcctctcctacattctccttctgcccctaaatcagacaggaggccagagaggagtattgctcaatgcgtgctatgtgcaactcctcaggccttgtgccacctccatgctgagccctgaagcagggtgtcctgggtgcctgtgtgtcagctccctcctctctacctacctctgaccttcttgtgggtgagggtggccatgcttatggccatcttaaaactggagaggcagagaactacttatgagtctgtagaccacgtgttgtcttccatggcctgtttctcctgctgtctgggtgagtgagcctgcaacgcaatgcccatgagagtaaatgcctcctgacctaccctgctcagcactgttctagtgtcttggccttgaaagaaaagcctgacttcctgctgacacatgtggtaggggcatggcagctatgaggcacctcctacgtctgttttctggctgtggtgacttgggatttttaaccttatatatctttttcctttactcaaaacaaaacaatttttagcacactgaaaaaaaaaaaaagccaaatgttttgtgcctttctaaggcagcactgtatcccaggctgcattttaggacttaatatggaaataccagagtctgagctcctctaccttgagtttcattagtccttagtgtctaggagacaggaaagaatgctctctgtgactggagaggtgacatgcaggtgcagtgtgtctggagtccctttcccctgctgtgagacttcagtggaggagagaagcattgtaccctgggatcatttggttggttccaatcacaagcttagttatcaggttgcatgccttgtctcctgcaaaagacagaatgtttcacaattcccaggtaaactctggaccattccaagtgtcctagccttctgatgacattaattacctagttgtgtcgaggagtataggatggactctcctgagaaggggaggttggtggctttgtcttttctttttgctggatcctgaactggtctagacctcctgcccccaccccccagcccccatcagatgtggctggcctttcatttgaaggcttcagacttaaagcattaagcagctagtgccctctgcagggcctggtttccccagggaagggcagcaaggaacatgggaccagaagcctgtcctcagtaatgtgactatagtgagctttagcaaaagtttttctatataatgacatcttacttatcttttaccctttcctcagttttcccctgcctttaactaataaagaattgggagacagaaattttaaagtcctccttattcaagattttgaaattcttagcctgggagtgctggagagaacctgatgctttctccagaatgaagagtcccaatttgtatatcagtgttaagaagaaaacaaaacaaacacataggtgagattttcgtggactattttaaaaatgtgtcattaatataaaaaatttatattagcagtatttaatcattctcacctgtaaagaataagaaaaacagaaggtaaatattcttacagagaatagcagagctttaagattcattttcattttaagtccattttattttgccagtgtattaatgtttagaagtctgttttactaatgttatttattaattttttttcatttccatacacagttagttaactaaagagctttttcaagcacccatgtctgtaaaaaaatatttttaaataaagtttcttttgttgtagcagaaaaaaaaaaaaaaaa

SEQ ID NO: 12568 - DNA, 3687 bp, Homo sapiens
gagggaaggcaggaaggaggcagccgaaggccgagctgggtggctggaccgggtgctggctgcgccgcgctgctttcggctcccacggcctctcccatgcgctgagggagcccggctgggccgggccggcggcgggaggggaggctcctctccatggtccagaagaccagcatgtcccggggcccttacccaccctcccaggagatccccatggaggtcttcgaccccagcccgcagggcaaatacagcaagaggaaagggcgattcaaacggtcagatgggagcacgtcctcggataccacatccaacagctttgtccgccagggctcagcggagtcctacaccagccgtccatcagactctgatgtatctctggaggaggaccgggaagccttaaggaaggaagcagagcgccaggcattagcgcagctcgagaaggccaagaccaagccagtggcatttgctgtgcggacaaatgttggctacaatccgtctccaggggatgaggtgcctgtgcagggagtggccatcaccttcgagcccaaagacttcctgcacatcaaggagaaatacaataatgactggtggatcgggcggctggtgaaggagggctgtgaggttggcttcattcccagccccgtcaaactggacagccttcgcctgctgcaggaacagaagctgcgccagaaccgcctcggctccagcaaatcaggcgataactccagttccagtctgggagatgtggtgactggcacccgccgccccacaccccctgccagtgccaaacagaagcagaagtcgacagagcatgtgcccccctatgacgtggtgccttccatgaggcccatcatcctggtgggaccgtcgctcaagggctacgaggttacagacatgatgcagaaagctttatttgacttcttgaagcatcggtttgatggcaggatctccatcactcgtgtgacggcagatatttccctggctaagcgctcagttctcaacaaccccagcaaacacatcatcattgagcgctccaacacacgctccagcctggctgaggtgcagagtgaaatcgagcgaatcttcgagctggcccggacccttcagttggtcgctctggatgctgacaccatcaatcacccagcccagctgtccaagacctcgctggcccccatcattgtttacatcaagatcacctctcccaaggtacttcaaaggctcatcaagtcccgaggaaagtctcagtccaaacacctcaatgtccaaatagcggcctcggaaaagctggcacagtgcccccctgaaatgtttgacatcatcctggatgagaaccaattggaggatgcctgcgagcatctggcggagtacttggaagcctattggaaggccacacacccgcccagcagcacgccacccaatccgctgctgaaccgcaccatggctaccgcagccctggctgccagccctgcccctgtctccaacctccagggaccctaccttgcttccggggaccagccactggaacgggccaccggggagcacgccagcatgcacgagtacccaggggagctgggccagcccccaggcctttaccccagcagccacccaccaggccgggcaggcacgctacgggcactgtcccgccaagacacttttgatgccgacacccccggcagccgaaactctgcctacacggagctgggagactcatgtgtggacatggagactgacccctcagaggggccagggcttggagaccctgcagggggcggcacgcccccagcccgacagggatcctgggaggacgaggaagaagactatgaggaagagctgaccgacaaccggaaccggggccggaataaggcccgctactgcgctgagggtgggggtccagttttggggcgcaacaagaatgagctggagggctggggacgaggcgtctacattcgctgagaggcaggggccacacggcgggaggaagggctctgagcccaggggaggggagggagcgaggggctcacacctgacatgtattcgcctccagggggcgctgtctccctcctttcagatgcctttgctcaaagcttggggtttctttggtgttaccatcccagctcccgggaggcccttaagccccagctgtcggtttttacctgcctgttgtggatggatgggggatacccacctttctgaagtgtcccctttctcccatcttaaggggctctcctccctcaccctcctagagaaaaggtgcacttccttaactctttctactcggggccctaagtgacggtcctaagtgggatggctctccttctcccaagctgcagtactggggaagggctgggcgcttttcctggaaagggaggccacagattctttcccatgggggctctcttccccagaccccagatccaaggtccctcaccctgcctgccccttcctcccagcttcctggcagcatcgtctggtcggtgaaagccatagcatggacaccccatggggagcttgtcttggggagggttctgggtggaagctggcaggcatacagcaccctctaccctccgtggccatggcaacgtccagggcccagaaccctgaggagtgagcggccgagacgctgctccccaccccccacctccatgcctcagcctttgcctaccccaggaatgagcttggcctccaacatcccttgcctgctgccattagtagagggggcccctctgcatctgagccccccatccctgtgccacctgggtgtggagcccatggaacactctggtccgcctcattttaaaccaaaaaactgctccttcaccctcaccctgaggccccaggggagaggacccgtgggatggtgcccaggggttgccttgggacctcggatctcctctggggggcttggctgctgctgttgctgctctgtatttgcctctcgtgattctgtttgttacccatgttcacttcccccaggagaggccttggtaccccctctcccctggggcatccctttgccttggcatccctgtagcccagcaaccctgcccctccccagcatcccagctgggccagagagagccgagtgtgccaacaaggactggggcctgcccggctgcccgcctcagggatgggcacctcatgcctgtctcgccacctcctgtgccaatgtcccaccctccacctgggggtggggtgcagcttccacttactgattagaagacaccactgccctcccttcccccctccctgtctggtgtcctgtgcccccatctgtctgtctatatttgtctgtactcccctaggagaagtattttgccatatataaaaccactgtcctgtcctttgtggctgcctcccaagcctgcttctttgtcctcgccacatagtcgtcagcgtaggcacctgggagctgctgatatgcacggggagttgaaagggtgggtgcctgaagatgttgtgccctgagtcattgactcaaaagaaaagatgatcctttgattttggccctctgatgtattgtgcccaagccaggagctgcttgggcagtcccagctccacactggccctgagccccttcacttacctgtctctccacaagtagagccaaaggcaatgggaagctcaatgttgctcagtgggtgagatccagacccactggtgcaatgtcttaaatacacatgactgtttttc

SEQ ID NO: 12569 - DNA, 5527 bp, Homo sapiens
gactaggcgctgttcttgctggctggtgccccagggcctggagaggtctgaagaaacctgggagccagcagcccggggctccactctgggttctgaaagcccattccctgctctgcggctcctcccaccccacctcttctcagccttgcagctcaagggttgatctcaggagtccaggacccaggagagggaagaatctgaggaacacagaacagtgagcgttgcccacaccccatctcccgtcaccacatctcccctcaccctcaccctccctgcctggccctggaccccatcccaggacctccctatcagctgacttcttccagtgtcttgcaggcccctctgggctcctccctcccctggcttttcctaccactccccctctatcggcgtctatctgtaggtgccctgggatttataaaactgggttccgaatgctgaataagagacggtaagagccaaggcaaaggacagcactgttctctgcctgcctgataccctcaccacctgggaacatcccccagacaccctcttaactccgggacagagatggctggcggagcctggggccgcctggcctgttacttggagttcctgaagaaggaggagctgaaggagttccagcttctgctcgccaataaagcgcactccaggagctcttcgggtgagacacccgctcagccagagaagacgagtggcatggaggtggcctcgtacctggtggctcagtatggggagcagcgggcctgggacctagccctccatacctgggagcagatggggctgaggtcactgtgcgcccaagcccaggaaggggcaggccactctccctcattcccctacagcccaagtgaaccccacctggggtctcccagccaacccacctccaccgcagtgctaatgccctggatccatgaattgccggcggggtgcacccagggctcagagagaagggttttgagacagctgcctgacacatctggacgccgctggagagaaatctctgcctcactcctctaccaagctcttccaagctccccagaccatgagtctccaagccaggagtcacccaacgcccccacatccacagcagtgctggggagctggggatccccacctcagcccagcctagcacccagagagcaggaggctcctgggacccaatggcctctggatgaaacgtcaggaatttactacacagaaatcagagaaagagagagagagaaatcagagaaaggcaggcccccatgggcagcggtggtaggaacgcccccacaggcgcacaccagcctacagccccaccaccacccatgggagccttctgtgagagagagcctctgttccacatggccctggaaaaatgaggattttaaccaaaaattcacacagctgctacttctacaaagacctcaccccagaagccaagatcccctggtcaagagaagctggcctgattatgtggaggagaatcgaggacatttaattgagatcagagacttatttggcccaggcctggatacccaagaacctcgcatagtcatactgcagggggctgctggaattgggaagtcaacactggccaggcaggtgaaggaagcctgggggagaggccagctgtatggggaccgcttccagcatgtcttctacttcagctgcagagagctggcccagtccaaggtggtgagtctcgctgagctcatcggaaaagatgggacagccactccggctcccattagacagatcctgtctaggccagagcggctgctcttcatcctcgatggtgtagatgagccaggatgggtcttgcaggagccgagttctgagctctgtctgcactggagccagccacagccggcggatgcactgctgggcagtttgctggggaaaactatacttcccgaggcatccttcctgatcacggctcggaccacagctctgcagaacctcattccttctttggagcaggcacgttgggtagaggtcctggggttctctgagtccagcaggaaggaatatttctacagatatttcacagatgaaaggcaagcaattagagcctttaggttggtcaaatcaaacaaagagctctgggccctgtgtcttgtgccctgggtgtcctggctggcctgcacttgcctgatgcagcagatgaagcggaaggaaaaactcacactgacttccaagaccaccacaaccctctgtctacattaccttgcccaggctctccaagctcagccattgggaccccagctcagagacctctgctctctggctgctgagggcatctggcaaaaaaagacccttttcagtccagatgacctcaggaagcatgggttagatggggccatcatctccaccttcttgaagatgggtattcttcaagagcaccccatccctctgagctacagcttcattcacctctgtttccaagagttctttgcagcaatgtcctatgtcttggaggatgagaaggggagaggtaaacattctaattgcatcatagatttggaaaagacgctagaagcatatggaatacatggcctgtttggggcatcaaccacacgtttcctattgggcctgttaagtgatgagggggagagagagatggagaacatctttcactgccggctgtctcaggggaggaacctgatgcagtgggtcccgtccctgcagctgctgctgcagccacactctctggagtccctccactgcttgtacgagactcggaacaaaacgttcctgacacaagtgatggcccatttcgaagaaatgggcatgtgtgtagaaacagacatggagctcttagtgtgcactttctgcattaaattcagccgccacgtgaagaagcttcagctgattgagggcaggcagcacagatcaacatggagccccaccatggtagtcctgttcaggtgggtcccagtcacagatgcctattggcagattctcttctccgtcctcaaggtcaccagaaacctgaaggagctggacctaagtggaaactcgctgagccactctgcagtgaagagtctttgtaagaccctgagacgccctcgctgcctcctggagaccctgcggttggctggctgtggcctcacagctgaggactgcaaggaccttgcctttgggctgagagccaaccagaccctgaccgagctggacctgagcttcaatgtgctcacggatgctggagccaaacacctttgccagagactgagacagccgagctgcaagctacagcgactgcagctggtcagctgtggcctcacgtctgactgctgccaggacctggcctctgtgcttagtgccagccccagcctgaaggagctagacctgcagcagaacaacctggatgacgttggcgtgcgactgctctgtgaggggctcaggcatcctgcctgcaaactcatacgcctggggaaaccaagtgtgatgacccctactgagggcctggatacgggagagatgagtaatagcacatcctcactcaagcggcagagactcggatcagagagggcggcttcccatgttgctcaggctaatctcaaactcctggacgtgagcaagatcttcccaattgctgagattgcagaggaaagctccccagaggtagtaccggtggaactcttgtgcgtgccttctcctgcctctcaaggggacctgcatacgaagcctttggggactgacgatgacttctggggccccacggggcctgtggctactgaggtagttgacaaagaaaagaacttgtaccgagttcacttccctgtagctggctcctaccgctggcccaacacgggtctctgctttgtgatgagagaagcggtgaccgttgagattgaattctgtgtgtgggaccagttcctgggtgagatcaacccacagcacagctggatggtggcagggcctctgctggacatcaaggctgagcctggagctgtggaagctgtgcacctccctcactttgtggctctccaagggggccatgtggacacatccctgttccaaatggcccactttaaagaggaggggatgctcctggagaagccagccagggtggagctgcatcacatagttctggaaaaccccagcttctcccccttgggagtcctcctgaaaatgatccataatgccctgcgcttcattcccgtcacctctgtggtgttgctttaccaccgcgtccatcctgaggaagtcaccttccacctctacctgatcccaagtgactgctccattcggaaggccatagatgatctagaaatgaaattccagtttgtgcgaatccacaagccacccccgctgaccccactttatatgggctgtcgttacactgtgtctgggtctggttcagggatgctggaaatactccccaaggaactggagctctgctatcgaagccctggagaagaccagctgttctcggagttctacgttggccacttgggatcagggatcaggctgcaagtgaaagacaagaaagatgagactctggtgtgggaggccttggtgaaaccaggagatctcatgcctgcaactactctgatccctccagcccgcatagccgtaccttcacctctggatgccccgcagttgctgcactttgtggaccagtatcgagagcagctgatagcccgagtgacatcggtggaggttgtcttggacaaactgcatggacaggtgctgagccaggagcagtacgagagggtgctggctgagaacacgaggcccagccagatgcggaagctgttcagcttgagccagtcctgggaccggaagtgcaaagatggactctaccaagccctgaaggagacccatcctcacctcattatggaactctgggagaagggcagcaaaaagggactcctgccactcagcagctgaagtatcaacaccagcccttgacccttgagtcctggctttggctgacccttctttgggtctcagtttctttctctgcaaacaagttgccatctggtttgccttccagcactaaagtaatggaactttgatgatgcctttgctgggcattatgtgtccatgccagggatgccacagggggccccagtccaggtggcctaacagcatctcagggaatgtccatctggagctggcaagacccctgcagacctcatagagcctcatctggtggccacagcagccaagcctagagccctccggatcccatccaggcgcaaagaggaataggagggacatggaaccatttgcctctggctgtgtcacagggtgagccccaaaattggggttcagcgtgggaggccacgtggattcttggctttgtacaggaagatctacaagagcaagccaacagagtaaagtggaaggaagtttattcagaaaataaaggagtatcacagctcttttagaatttgtctagcaggctttccagtttttaccagaaaacccctataaattaaaaattttttacttaaatttaagaattaaaaaaatacaaaaaagaaaaaatgaaaataaaggaataagaagttacctactccaaaaaaaaaaa

SEQ ID NO: 12570 - DNA, 5395 bp, Homo sapiens
gactaggcgctgttcttgctggctggtgccccagggcctggagaggtctgaagaaacctgggagccagcagcccggggctccactctgggttctgaaagcccattccctgctctgcggctcctcccaccccacctcttctcagccttgcagctcaagggttgatctcaggagtccaggacccaggagagggaagaatctgaggaacacagaacagtgagcgttgcccacaccccatctcccgtcaccacatctcccctcaccctcaccctccctgcctggccctggaccccatcccaggacctccctatcagctgacttcttccagtgtcttgcaggcccctctgggctcctccctcccctggcttttcctaccactccccctctatcggcgtctatctgtaggtgccctgggatttataaaactgggttccgaatgctgaataagagacggtaagagccaaggcaaaggacagcactgttctctgcctgcctgataccctcaccacctgggaacatcccccagacaccctcttaactccgggacagagatggctggcggagcctggggccgcctggcctgttacttggagttcctgaagaaggaggagctgaaggagttccagcttctgctcgccaataaagcgcactccaggagctcttcgggtgagacacccgctcagccagagaagacgagtggcatggaggtggcctcgtacctggtggctcagtatggggagcagcgggcctgggacctagccctccatacctgggagcagatggggctgaggtcactgtgcgcccaagcccaggaaggggcaggccactctccctcattcccctacagcccaagtgaaccccacctggggtctcccagccaacccacctccaccgcagtgctaatgccctggatccatgaattgccggcggggtgcacccagggctcagagagaagggttttgagacagctgcctgacacatctggacgccgctggagagaaatctctgcctcactcctctaccaagctcttccaagctccccagaccatgagtctccaagccaggagtcacccaacgcccccacatccacagcagtgctggggagctggggatccccacctcagcccagcctagcacccagagagcaggaggctcctgggacccaatggcctctggatgaaacgtcaggaatttactacacagaaatcagagaaagagagagagagaaatcagagaaaggcaggcccccatgggcagcggtggtaggaacgcccccacaggcgcacaccagcctacagccccaccaccacccatgggagccttctgtgagagagagcctctgttccacatggccctggaaaaatgaggattttaaccaaaaattcacacagctgctacttctacaaagacctcaccccagaagccaagatcccctggtcaagagaagctggcctgattatgtggaggagaatcgaggacatttaattgagatcagagacttatttggcccaggcctggatacccaagaacctcgcatagtcatactgcagggggctgctggaattgggaagtcaacactggccaggcaggtgaaggaagcctgggggagaggccagctgtatggggaccgcttccagcatgtcttctacttcagctgcagagagctggcccagtccaaggtggtgagtctcgctgagctcatcggaaaagatgggacagccactccggctcccattagacagatcctgtctaggccagagcggctgctcttcatcctcgatggtgtagatgagccaggatgggtcttgcaggagccgagttctgagctctgtctgcactggagccagccacagccggcggatgcactgctgggcagtttgctggggaaaactatacttcccgaggcatccttcctgatcacggctcggaccacagctctgcagaacctcattccttctttggagcaggcacgttgggtagaggtcctggggttctctgagtccagcaggaaggaatatttctacagatatttcacagatgaaaggcaagcaattagagcctttaggttggtcaaatcaaacaaagagctctgggccctgtgtcttgtgccctgggtgtcctggctggcctgcacttgcctgatgcagcagatgaagcggaaggaaaaactcacactgacttccaagaccaccacaaccctctgtctacattaccttgcccaggctctccaagctcagccattgggaccccagctcagagacctctgctctctggctgctgagggcatctggcaaaaaaagacccttttcagtccagatgacctcaggaagcatgggttagatggggccatcatctccaccttcttgaagatgggtattcttcaagagcaccccatccctctgagctacagcttcattcacctctgtttccaagagttctttgcagcaatgtcctatgtcttggaggatgagaaggggagaggtaaacattctaattgcatcatagatttggaaaagacgctagaagcatatggaatacatggcctgtttggggcatcaaccacacgtttcctattgggcctgttaagtgatgagggggagagagagatggagaacatctttcactgccggctgtctcaggggaggaacctgatgcagtgggtcccgtccctgcagctgctgctgcagccacactctctggagtccctccactgcttgtacgagactcggaacaaaacgttcctgacacaagtgatggcccatttcgaagaaatgggcatgtgtgtagaaacagacatggagctcttagtgtgcactttctgcattaaattcagccgccacgtgaagaagcttcagctgattgagggcaggcagcacagatcaacatggagccccaccatggtagtcctgttcaggtgggtcccagtcacagatgcctattggcagattctcttctccgtcctcaaggtcaccagaaacctgaaggagctggacctaagtggaaactcgctgagccactctgcagtgaagagtctttgtaagaccctgagacgccctcgctgcctcctggagaccctgcggttggctggctgtggcctcacagctgaggactgcaaggaccttgcctttgggctgagagccaaccagaccctgaccgagctggacctgagcttcaatgtgctcacggatgctggagccaaacacctttgccagagactgagacagccgagctgcaagctacagcgactgcagctggtcagctgtggcctcacgtctgactgctgccaggacctggcctctgtgcttagtgccagccccagcctgaaggagctagacctgcagcagaacaacctggatgacgttggcgtgcgactgctctgtgaggggctcaggcatcctgcctgcaaactcatacgcctggggaaaccaagtgtgatgacccctactgagggcctggatacgggagagatgagtaatagcacatcctcactcaagcggcagagactcggatcagagagggcggcttcccatgttgctcaggctaatctcaaactcctggacgtgagcaagatcttcccaattgctgagattgcagaggaaagctccccagaggtagtaccggtggaactcttgtgcgtgccttctcctgcctctcaaggggacctgcatacgaagcctttggggactgacgatgacttctggggccccacggggcctgtggctactgaggtagttgacaaagaaaagaacttgtaccgagttcacttccctgtagctggctcctaccgctggcccaacacgggtctctgctttgtgatgagagaagcggtgaccgttgagattgaattctgtgtgtgggaccagttcctgggtgagatcaacccacagcacagctggatggtggcagggcctctgctggacatcaaggctgagcctggagctgtggaagctgtgcacctccctcactttgtggctctccaagggggccatgtggacacatccctgttccaaatggcccactttaaagaggaggggatgctcctggagaagccagccagggtggagctgcatcacatagttctggaaaaccccagcttctcccccttgggagtcctcctgaaaatgatccataatgccctgcgcttcattcccgtcacctctgtggtgttgctttaccaccgcgtccatcctgaggaagtcaccttccacctctacctgatcccaagtgactgctccattcggaaggaactggagctctgctatcgaagccctggagaagaccagctgttctcggagttctacgttggccacttgggatcagggatcaggctgcaagtgaaagacaagaaagatgagactctggtgtgggaggccttggtgaaaccaggagatctcatgcctgcaactactctgatccctccagcccgcatagccgtaccttcacctctggatgccccgcagttgctgcactttgtggaccagtatcgagagcagctgatagcccgagtgacatcggtggaggttgtcttggacaaactgcatggacaggtgctgagccaggagcagtacgagagggtgctggctgagaacacgaggcccagccagatgcggaagctgttcagcttgagccagtcctgggaccggaagtgcaaagatggactctaccaagccctgaaggagacccatcctcacctcattatggaactctgggagaagggcagcaaaaagggactcctgccactcagcagctgaagtatcaacaccagcccttgacccttgagtcctggctttggctgacccttctttgggtctcagtttctttctctgcaaacaagttgccatctggtttgccttccagcactaaagtaatggaactttgatgatgcctttgctgggcattatgtgtccatgccagggatgccacagggggccccagtccaggtggcctaacagcatctcagggaatgtccatctggagctggcaagacccctgcagacctcatagagcctcatctggtggccacagcagccaagcctagagccctccggatcccatccaggcgcaaagaggaataggagggacatggaaccatttgcctctggctgtgtcacagggtgagccccaaaattggggttcagcgtgggaggccacgtggattcttggctttgtacaggaagatctacaagagcaagccaacagagtaaagtggaaggaagtttattcagaaaataaaggagtatcacagctcttttagaatttgtctagcaggctttccagtttttaccagaaaacccctataaattaaaaattttttacttaaatttaagaattaaaaaaatacaaaaaagaaaaaatgaaaataaaggaataagaagttacctactccaaaaaaaaaaa

SEQ ID NO: 12571 - DNA, 3016 bp, Homo sapiens
gaattcgcggccgctcgacgctcagcagagctaccagctgccctgttggcttcgctggtcggatcgtcctcctggccccgccaaacaggcgagcggccccgactgtggggcatggcagtagtctcctcgttctccgccgccgctagcctagctgagtcgccggcttctgcgctaggggctcccaccgcctccgcaggctaaggagccgctgccaccaacgagctgtgagggttactatgctccctctttgccgccgtctcctcctcttgcccgcgcaggcacccctctggctgctcagtcctgcctcagtgtcaaaccagaagagaagtaaaattcaacaaaaatttatgtgtggagttccttcttaaaagaagaaaaaagtgattatttagactatggatcggagcaaacggaattcaattgcaggatttcctccacgtgtggagcgtcttgaagagtttgaaggaggtggtggaggagaaggaaatgtgagccaggtgggaagagtttggccatcttcgtatcgagctcttataagtgccttttccagactgacgcgtttggatgatttcacctgtgaaaaaatagggtctggcttcttttctgaagtgttcaaggtacgacaccgagcttctggtcaggtgatggctcttaagatgaacacattgagcagtaaccgggcaaacatgctgaaagaagtacagctcatgaatagactctcccatcccaacatccttaggtatatcaactccgggaacctggaacagttgctagacagtaacctgcatttgccttggactgtgagggtaaaactggcctatgacatagcagtgggcctcagctaccttcacttcaaaggcatttttcatcgggacctcacatctaagaactgcctgataaagagggatgagaatggttactctgcagtggtagctgactttggcctggctgagaagatccccgatgtcagcatggggagtgagaagctggccgtggtgggttccccattctggatggcacctgaggttctccgagatgagccctataatgaaaaggcagatgtgttctcttatggtatcatcctctgcgagatcatcgcccgcatccaggccgatccggactatcttccccgcacagagaatttcgggctggactatgatgctttccagcacatggtgggagactgtcccccagattttctgcaacttactttcaactgctgtaacatggatcccaaactgcgcccatcttttgtggagattgggaagaccctggaggaaattctgagccgcctacaggaagaagagcaggagagggataggaagctgcagcccacagccaggggactcttggagaaagcacctggggtgaagcgactaagctcactggatgacaagatcccccacaagtcaccatgcccaagacgtaccatctggctgtctcgaagccagtcagatatcttttcccgtaagcccccacgtacagtgagtgtcttggacccatactaccggccacgagatggtgctgcccgcacccccaaagtcaacccttttagtgctcgccaggacctcatggggggcaagatcaagttttttgacctgcccagcaagtctgtcatctctctggtatttgacctggatgcaccagggcccggaactatgcccctggctgactggcaggagcccctggccccacctattcgccggtggcgttccttgcctggttcgcctgagttcttgcatcaagaggcttgtccatttgtgggccgggaagaatcgctatctgatgggcccccaccacgcctaagtagtctcaagtacagagttaaagagatcccaccattccgggcatctgccctaccagctgctcaagcccatgaggctatggactgctccattctccaggaagaaaatggttttgggtccaggccccaggggaccagtccatgccctgcgggtgcttctgaggagatggaggtagaagaaaggccagcaggctcaactccagccaccttctccacctcaggcataggcctgcaaacccagggaaagcaggatgggtgagggggtttagtccctgcctcaccttggggatggaccttcagctgaaaccatatggccccctaggtgcacagccttgattcttccctggagcctacagagcaggcaggctaggccaagccaggctcaacttctgggctcccagtgcccattggctgtgtatgacgggaggcagcagtgagaggccttcctagttagggccaacagctgataccaagcctctgaaatccagcaaggaggtctgcctcccaccagaccctctccagtgtacttccccagataggaccagaggatgtctagttctaggctgagctggcaggcagctattaccccggttctttccccaccccaggtctgtctcttgccttttcttggggcatataagctactgagtggaacatggagctgatcaagaggccgtaatggtcatggctgtttccagacctgaatattgggtgcttcttgccagtattctaagacatttgagtaattgctgtttgcacttactgcatggtcagaccacgtcactacatttctatgcaaggggacagcaaggcagcgtggtggtcatggctcttagctaacctattcaaagaccttttcctgttgattaatctattttcatatttataaaggagtcttaatgttctgccccataagactttcaaccttgtggttgggagtggggctggttttgtaggccctagggcctgcttctatgtatttatcaacatgtgatacattcaattggttaaatggtttatacagggactgatttgcttcccttcctgccatggctggagctttgggaacagtctgtccttacagagctgcaataagaaataaccaaagatgaagctggtcaaatattttcataacttgcttctgttgattttttttttgtaaaactttcccaagacattttcagacttaaaaataaagtcagtgttacaggt

SEQ ID NO: 12572 - DNA, 1987 bp, Homo sapiens
agccgccgccgtctccgccgtcgctggggcagctgccgcggtggtcgcctctggcagtgccgctagctttcaggcagtcgcctctcctcccgacatcccgccttgaggaggctgaggcggaatcgcggctggcggcggggggacggaccggccctgcagtggccgcagtgacagcccggacccggccctccgcccgctctcgcctcggcgcccgcagccacgatgaaccggggcggcggcagcccgtcggccgccgccaactacctgctctgtaccaactgccggaaagtgctgcggaaggataaaagaatcagagtgtctcaacccttgacaagaggaccaagtgcctttattccagagaaggaagttgtccaagcaaacacagtggatgaacgtactaactttcttgtggaagaatactctacatccggtcgtctggacaacatcacacaggtcatgagtttacacactcagtacctggagtctttcttgcggagccagttttacatgttgcgcatggatggtccccttcctctaccatacaggcactatattgcaataatggctgcagctagacatcagtgttcttacttaataaacatgcatgtggatgaatttttaaagactggaggtattgctgagtggttgaatggtttggaatatgtgccacaaagactgaaaaatcttaatgaaattaataagctgctagcacatcgaccttggctgatcacaaaagagcacattcagaaacttgtcaaaactggagaaaataattggtctctgcctgaactggtacatgctgtggtcctcctggcacattatcatgctttggcaagctttgtttttggtagtggtatcaatccagagagagatccagaaatctccaatggattcaggctaatatcagtcaacaatttctgcgtttgtgatcttgctaatgacaacaacatagagaatgcatctctttcaggcagcaactttgggattgtggattctctaagtgagctagaggccttaatggaaaggatgaaaagacttcaagaagaaagggaagatgaagaggcgtctcaagaagaaatgagcactcgttttgaaaaggagaagaaagaaagtctttttgtggtctctggagatacttttcattcatttcctcattcagattttgaggatgacatgattataacatctgatgtctctcgatatattgaagaccctggttttgggtatgaagactttgccagacgaggagaagagcatttgccaacattccgagctcaggactatacctgggaaaatcatgggttctccctggtgaacagactttattctgacattggacatcttcttgatgaaaagtttcggatggtctacaatctcacatataacactatggccacccatgaggatgttgacacaaccatgctgcgcagagctttatttaactatgttcactgtatgtttggaatcaggtatgatgactatgattatggagaagttaatcaattacttgaaagaagcctgaaggtttacattaagacagtgacctgctatcctgagagaactacaaaacgcatgtatgatagttactggcggcagttcaaacactcagaaaaagttcatgtcaatctacttttaatggaagcacgaatgcaagctgaacttctttatgctcttcgtgccataactcggcatttgacctgaagtatcacccaaggaaaatgtcatacatgtgtaaagacctttcacataagataaacattgaagctatttgtgatatagcatcaaaaattattcagttctctagtgtcaaagtttagccgtttgtttttttttttttgttttttgcggctgtaatgtgcaatgatgtgttttattttccttgatgcttaacattactaacaattgcaaaaataatactgaggagcactactttgcattgtttgtagttggagttttggatactgatcataaatcatgaatctggcgt

SEQ ID NO: 12573 - DNA, 3910 bp, Homo sapiens
cggggcagcctaggccgggcgagggccatgctgagcctcgcagccaagctggtggccttcttctggaggacggcggacacccctagggaggaagccgggcagctggagcccgagctcgcggaaggtgacactaagctgaaaactgtacggggtgtcgtgacaaggtactgcagcgattatggcatgattgatgatatgatctacttctccagtgatgctgtgactagcagagtgcttctgaatgttggacaggaagtgattgcagttgtggaagaaaataaagtgtccaatggactgaaagcaatcagggtagaagctgtctctgataagtgggaagacgacagcagaaaccatgggagtccctcagactgcggcccccgagtgttgattggctgtgtgacttccctggtggagggcgcaggctgtatcagtcagaccacctacttctctctggagagtgtgtgcgaaggcttcgagccctgcaagggagactgggtggaggctgagtaccggatccggcctggcacgtggagcagcgaagccacctcagtgaagccactgagatacaagcgcgtggacaaggtctgcatctctagcctctgtggaaggaacggggtgttagaggaaagcatcttctttaccttggactccttgaaactgccagatgggtacacaccccggagaggtgacgtggtcaatgcagtggtggtggagagcagccagtcatgctatgtctggagggcgctttgtatgaccctagtgaagaggcgagacgccgcccctgttcatgaggccactcatttctatggaacgattttgctgaagaacaaaggtgatattgaagttacacaggtgacgcattttggaaccctaaaggaaggaagaagtaaaaccatggtgatctggatagagaataaaggagacattcctcaaaacttagtcagctgtaaactggctggctgggataaatctaaacaattcagattccaaatgctggataaagaccagatgtgccccgtggtatcttttgtttctgttcctgagaaggagaattcatcagatgaaaatattaattcattaaatagccacacaaaaaacaaaacctctcagatgtcggagagcagtttggtgaacaacagaggaatctctccaggtgattgtacctgtaaaggagaaaatggagaaaaagacaacattctatcaaggaagcagatgacagagcctgagcctggggggcttgtccctccagggggaaaaaccttcattgtggtcatctgtgacggaaaaaatcctggccgctgcaaggagctccttttgctttgtttttccgatttcctaattgggcgataccttgaagtaaatgttatcagtggggaggagtcactaattgctgcgcgcgaaccattttcttggaaaaagcttaaaagttcacaagcgttaacatccgcaaaaactacagttgttgtgaccgcacagaaaaggaactcaagacgacaacttccaagttttcttccccaatatccaatcccagatagacttagaaaatgtgtggaacaaaaaattgacatcctgactttccagccattacttgcagagcttctgaacatgtcaaattacaaggagaagttttcgactttgctgtggcttgaggagatttatgcagaaatggaactgaaagagtataacatgagcgggatcatcttaagaaggaatggggatctgctggttctggaggtcccagggttggccgaagggaggccttctctctacgcaggtgataaactgattttaaaaactcaagagtacaatggacatgccatcgaatacatcagctacgtgactgagattcatgaagaagatgtaactcttaaaattaatccagaatttgaacaagcctataactttgaacctatggatgtggaatttacatataataggaccacaagcagacggtgtcactttgcacttgaacacgtcatccacttaggtgtaaaagtgttgtttccagaagaaattattttacagtctccacaagtgacgggaaattggaaccatgcacaagacaccaaaagcagtggacagtccaccagcaaaaagaataggaaaacaatgacggaccaagctgagcatggaacagaggagaggcgtgttggtgacaaggacctgccggtgctggcaccctttactgcagagatgagcgattgggtagatgaaattcagacccctaaagcaagaaagatggagtttttcaacccagtgctaaatgaaaatcagaagttagcagttaaaaggattctgagtggtgactgccgtcccctcccgtatattctctttggacctcctggtactggaaagacagtgacaataatagaggctgttttacaggtacactttgccttgccggacagtcggattttagtctgtgcgccctccaacagtgctgctgacctcgtgtgtctgcggctgcacgagagcaaggtgctacagccggccaccatggtccgggtgaacgccacctgcaggttcgaggagatagttattgacgccgtcaaaccgtattgcagagacggagaagacatctggaaagcctcacgcttccggataatcatcaccacatgcagcagctcagggctgttttaccaaataggagtgagagttgggcacttcactcacgtgtttgtggacgaggctgggcaggcaagtgagccggaatgcctcattcctctggggctgatgtcggacatcagtggccagatcgtgctggcaggagaccccatgcagctcggaccagtcattaagtccagactcgccatggcctatgggctgaacgtgtcctttttggaacggctgatgtctcgacccgcgtaccagagggacgaaaatgctttcggtgcttgtggcgcacataatcccctgttggtcacaaagctggtgaagaactaccggtcccacgaggccctgctgatgctgccctcacggctgttctaccacagggaactcgaggtctgtgcggaccccacagtggtgacctccttgctgggctgggagaagttgcctaagaaaggcttccctctcatcttccatggtgtgcggggcagcgaggcacgggagggaaaaagcccatcgtggttcaacccggccgaggccgtccaggtcctgcgctactgctgcctcctggcccacagcatctccagtcaggtgtctgccagcgacattggcgtcatcacgccctaccggaagcaggtggagaaaatcagaattcttttgcgtaatgttgatctgatggatataaaggttggatcagtagaggagtttcaaggacaagagtatctggtcatcatcatttcgaccgtacggtcaaatgaagatagatttgaagatgatcgatattttttgggtttcttgtccaactcaaaaagatttaatgttgcaatcaccagacccaaagctttgctgatagtgctgggaaacccccatgttctcgttcgagacccctgttttggtgctttgctggaatacagtattacaaacggtgtttacatgggatgcgatttacctcctgcactgcagtctctgcaaaactgtggcgagggggtggcagacccctcctacccagtggtgccagaatccacaggaccagagaagcatcaggagcccagctgatctgcagtggctgacagcagggaggccatgtgctcagcctggccacgttgccgttacagtctgctccgtggctcctgtggcctgcccttgtctcgcagccaggcagggtcgtgtgtgggtgtggggctgccaggttggacgcagctgctgctgccctgactttggcatatgccagcctgttcctgccacagggcagtcactgccgcctaccctgaaataaaccctcgagtgacccccaaaaaaaaaa

SEQ ID NO: 12574 - DNA, 3018 bp, Homo sapiens
ataaaaccggcccggttctgtggaaagtgggcggcggagccagggtccctggaatggcggagactctgtcaggcctaggtgattctggagcggcgggcgcggcggctctgagctccgcctcgtcagagaccgggacgcggcgcctcagcgacctgcgagtgatcgatctgcgggcggagctgaggaaacggaatgtggactcgagcggcaacaagagcgttttgatggagcggctgaagaaggcaattgaagatgaaggtggtaatcctgacgaaattgaaattacctccgagggaaacaagaaaacatcaaagaggtctagcaaagggcgcaaaccagaagaagagggtgtggaagataacgggctggaggaaaactctggggatggacaggaggatgttgagaccagtctggagaacttgcaggacatcgacatcatggatatcagtgtgttggatgaagcagaaattgataatggaagcgttgcagattgtgtcgaagacgatgatgctgataacctccaggagtccctgtcggatagtagagagctagtcgagggggaaatgaaagagcttccggagcagcttcaggaacatgctatagaggacaaagaaactataaacaatttagatacttcatcatctgacttcactatattacaggaaattgaagagccatccctggagccagaaaatgagaaaatactcgacattttgggggaaacttgtaaatctgagccagtaaaagaagaaagttccgagctggagcagccatttgcacaggacacaagtagcgtggggccagacagaaagcttgcggaggaagaggacctatttgacagcgcccatccggaagagggtgatttagatttggccagcgagtcaacagcacacgctcagtcgagcaaggcagacagcctgttagcggtagtgaaaagggagcccgcggagcagccaggcgatggcgagaggacggactgtgagcctgtagggctagagccggcagttgagcagagtagtgcggcctccgagctcgcggaggcctctagcgaggagctcgcagaagcacccacggaagccccaagcccagaagccagagatagcaaagaagacgggaggaagtttgattttgacgcttgtaatgaagtccctccggctcctaaagagtcctcaaccagtgagggcgctgatcagaaaatgagttctcccgaagatgactcggatacaaaaaggctttccaaagaggaaaagggtcgcagcagttgtggtagaaatttctgggttagtggactctcttctacaaccagagctacagatttgaagaatcttttcagcaaatatgggaaggtggtgggcgccaaggttgtgacaaatgcccggagtcctggagctcgctgttacggttttgtcacgatgtccacagcagaagaggccacaaaatgcattaaccacctgcacaagacggagctccacggaaagatgatctccgtggagaaagccaaaaatgaacctgtgggaaagaaaacctctgacaaaagagacagtgacgggaaaaaggagaagtcgagcaacagtgacagatctacaaaccttaagagggatgataaatgtgacagaaaagatgatgctaagaagggtgacgacggaagtggagaaaagagtaaggaccaagatgatcagaaacctggcccctcagagcgatctcgagccacaaagtcaggaagtcgagggaccgaacggactgtagtaatggataaatccaaaggggtgcctgtgattagtgtaaaaacgtccgggtccaaagagagagcttccaaaagccaggatcgcaaatcagccagcagagagaagcggtccgtcgtgtcctttgataaggtcaaggagcctcggaagtcaagagactcagagtcccatagcagggtgcgtgaacgcagtgaacgcgaacaacgcatgcaggcgcagtgggagcgcgaggagcgtgagcggctggagattgcccgagagaggctggccttccagcgccagcggctggagcgggagcgcatggagcgggaacggctggagcgcgaacgcatgcacgtggagcacgagcgcaggcgcgagcaggagcgcatccaccgtgagcgcgaggagctgaggcgccagcaggaactgcgctatgagcaggagcggcggcccgcggtgcggcggccctacgacctggaccggcgagatgatgcctattggccggaagccaagcgggccgccctggatgagcgctaccattctgactttaaccgccaggaccgcttccacgactttgaccacagggaccgcggccgctaccccgaccactcggtggacaggagagaaggttcaaggtcaatgatgggagaacgagaaggacagcattacccagaacgccatggaggaccagagcgccacggccgggactcccgcgatggctgggggggctatggctctgacaagaggatgagcgagggccgggggctgcctcctccccccagacgtgactggggggaccatggccgaagagaggatgaccggtcatggcagggcacggccgacgggggcatgatggacagggatcacaagaggtggcaaggtggcgagagaagcatgtccggtcactccgggcctggccacatgatgaaccgaggaggaatgtcagggcgcggcagctttgccccaggcggggcctcccggggccaccccatcccacacggtggcatgcagggcgggtttggaggccagagccgggggagcaggcccagcgatgcccgcttcactcgccgctactgagtacttggaatcctgtgtcctgtctcgtggcaacaaggctatgttctgttaggagttaccttaaactgtgtaaaaatatttttttttaatctgctgccatattgtagctcaatacaatgtgaatttgtttttcgttttggggttttttttttttgtaataaatgtgtttccgttcacataccctttaaaaaaaaaaaaaaaaaaaaaaaaaaaaaaa

SEQ ID NO: 12575 - DNA, 4626 bp, Homo sapiens
gaattcccctccatcctgcgtccatggccaccgctgcgactgaggagcccttcccttttcacggtctcctgccgaagaaggagaccggagccgcctccttcctctgccgctacccggagtatgatgggcggggggtgctcatcgcagtcctggacacgggggtcgacccgggggctccgggcatgcaggttacaactgatggaaaaccaaaaatcgttgatatcattgatacaacaggaagtggcgatgtgaatactgctacagaagtagagccaaaggatggtgagattgttggcctttcaggaagagtgcttaagattcctgcaagctggacaaatccctcaggcaaatatcatattggcataaaaaatggctatgacttctatcctaaggcactcaaggaaaggatacagaaagaacggaaggaaaaaatctgggaccctgttcacagagtggcccttgcagaagcctgtagaaaacaggaagaatttgatgttgccaacaacggctcttctcaagcaaataaactaatcaaggaggaacttcaaagtcaagtggaattgctaaattcttttgagaagaaatacagcgatcctggccctgtatatgactgcttggtatggcatgatggcgaagtctggagagcctgcattgattctaatgaagatggggacttgagtaaatctaccgtgttgagaaactacaaagaagcccaagaatatggctcttttggcacagctgagatgttgaattactccgttaatatatacgatgatagaaacctgctctccattgtgaccagtggaggagctcatgggacacatgtagctagtatagctgctggacactttccagaagaacctgaacggaatggggtagctcctggtgctcaaattctttccatcaagattggtgatacaagactaagcacaatggaaacaggcacaggcctcataagagctatgatagaagttataaatcataagtgtgatcttgtcaactacagttacggagaagcaactcactggccaaattctgggagaatttgtgaagtaattaatgaagcagtatggaagcataatataatttatgtttcaagtgctggaaataatggtccatgcctgtctacagttggttgtccaggtggaactacatcaagtgtgataggtgttggtgcttatgtttctcctgatatgatggttgctgagtattcactgagagagaaattacctgcaaatcaatatacttggtcttctagaggacctagtgctgacggggcccttggtgtgagtatcagtgcgccaggaggagccattgcttctgttcctaactggacactgagagggacgcagctgatgaatggaacatctatgtcttcccccaatgcatgtggaggcattgccctgatcctttcaggtctgaaagctaataacattgactacacagttcattcagtcagaagagctctagaaaacactgcagtgaaggctgacaatatagaagtatttgctcaaggacatggtattattcaggttgataaagcctatgactacctcgttcagaatacatcatttgctaataaattaggttttactgttactgttggaaataaccgtggcatctacctccgagatcctgttcaggtggctgcaccttcagatcatggcgttggcattgaacctgtatttccggagaacacagaaaactctgaaaaaatatcccttcagcttcatttagctctgacttcaaattcatcttgggttcagtgtcccagccatttggaactcatgaatcaatgtagacacataaacatacgtgtggatcccaggggcttaagagaaggattgcattatacagaggtatgtggctatgatatagcatcccctaacgcaggtccgctcttcagagttccgatcactgcagttatagcagcaaaagtaaatgaatcatcacattatgatctagcctttacagatgtacactttaaacctggtcaaattcgaaggcattttattgaggttcctgagggtgcaacatgggctgaagtgacagtgtgttcgtgttcttctgaggtgtcagcaaagtttgttctacatgcagtccagcttgtgaagcaaagagcatatcgaagccatgaattctataagttttgttctcttccagagaaaggaacactgactgaagcttttcctgtcctaggtggaaaagcaattgaattttgcattgctcgttggtgggcaagtctcagtgatgtcaacattgattataccatttctttccatgggatagtgtgtactgctcctcagttaaacattcatgcatcggaaggaatcaaccgctttgatgttcagtcctccttgaaatacgaagatctggctccctgcataactttgaagaactgggtccaaacactgcgcccagtgagtgcaaaaacaaaacctttaggatcaagagatgttttgccaaataaccgtcaactttatgagatggtcctgacatataactttcatcaacccaagagtggggaagtaactccaagctgcccactactttgtgaactattatatgaatctgaatttgacagccaactgtggattatttttgaccagaacaaaagacagatgggttcaggcgatgcctatccacatcagtattctttgaaactggagaaaggagattatacaattcgactacagattcgccatgagcaaatcagtgatttggaacgccttaaagaccttccatttattgtttctcatagattgtctaataccttgagcttagatattcatgaaaatcatagttttgcacttctagggaagaagaaatcaagcaatttgacattaccacccaaatataaccagccattctttgttacttccttacctgatgataaaatacctaaaggggcaggacctggatgctatcttgcaggatccttaacattgtcaaagactgaactaggaaagaaagctgatgtaatccctgttcattactacttaatacctccaccaacaaagactaagaatggcagcaaagataaggaaaaagattcagaaaaagagaaagatttaaaagaagagtttactgaagcattacgagatcttaaaattcagtggatgacaaagctggattctagtgacatttataacgaattgaaagaaacatatcctaattatcttcctctgtacgttgcacgacttcatcaattggatgctgaaaaggaacgaatgaaaagacttaatgaaattgttgatgcggcaaatgctgttatttctcatatagatcaaacagccctagcagtttatattgcaatgaagactgatcccaggcctgatgcagctactataaaaaatgacatggacaaacaaaaatccaccctcgtagatgccctttgtaggaaaggttgtgccctggcagaccatcttcttcacacccaggctcaagacggagccatttccactgatgcagaaggaaaggaggaggaaggagaaagtcctttggattctctggcagaaacattttgggaaactactaaatggactgatctctttgacaataaggttttgacatttgcatataaacatgcattagtaaataaaatgtatgggagaggccttaaatttgcaactaaacttgtggaagaaaaaccaacaaaagaaaactggaaaaattgtattcaactgatgaagttacttggatggacccattgtgcatcttttactgaaaactggctccccatcatgtatcctcccgattattgcgtattctaaaataggaaacaagactttaaattttaaaaaaggaagttttatagtgaatgggtataaaaacaaatttgtggcatttttagtctaatgcatgttttcatccactatccagtactgattattaaaatgacatgtatttatcagagaattcactgacgtgtggcttaatacatgtaaatctagacctctgacatcatggtgttttcttaatgcctcacattgctggcacggggatgtgccctgcctgccagcacctaggacttcgagttgggttgcagcttatgacatgcatgataggttttggaaggtaacttttaactgcaaacctataaagtactattttttattttataaatgaacagggttttaacgtgctcaactttaatttttttcaattgtatgaaggccttaaaaaagctacattaagcgtagctaaaattatttattggactaaaaactaacagaacttcatttccagaattttttttttttttttttttttggcaaatgtttacattcaattaaggggaaaaagtagaaccagcacaaatgagtggcagttgctggagcataactgcttcaataaatcttcatcttggggtaattacaggcaagtcattttcacatcctcttgaggttcagagcatcagaatgaactctatgaatacatgtgtaagtgccagacagctgaatctttatcaggtattgtaaagatacacatatgatatgtttattaaaattgaaataatgtaaaacacatgaataaatttgcaaaaccaagatcacagtacaccatatgcactctggtaccttaatttttttttataaataataaaagtgaatattgaagcttctt

SEQ ID NO: 12576 - DNA, 4188 bp, Homo sapiens
gccggggaacaagccacaggagagcgactcaggaacaagtgtgggagaggaagcggcggcggcggcgccgggcccgggggtggtgacagcaggtctgaggttgcatcataaatacaaaggactgaagttataaaagagaaaagagaagtttgctgctaaaatgaatctgagcaatatggaatattttgtgccacacacaaaaaggtactgaagatttaccccccaaaaaaaattgtcaatgagaaataaagctaactgatatcaaaaagcagagcctgctctactggccatcatgcgtaaaggggtgctgaaggacccagagattgccgatctattctacaaagatgatcctgaggaactttttattggtttgcatgaaattggacatggaagttttggagcagtttattttgctacaaatgctcacaccaatgaggtggtggcaattaagaagatgtcctatagtgggaagcagacccatgagaaatggcaagatattcttaaggaagttaaatttttacgacaattgaagcatcctaatactattgagtacaaaggctgttacttgaaagaacacactgcttggttggtgatggaatattgcttaggctcagcctctgatttattagaagttcataaaaaaccacttcaggaagtggagatcgctgccattactcatggagccttgcatggactagcctacctacattctcatgcattgattcatagggatattaaagcaggaaatattcttctaacagagccaggtcaggtaaaactagctgattttggatctgcttcaatggcttctcctgccaactccttcgtgggcacaccttactggatggctccagaggtgatcttagctatggatgaaggacagtatgatgggaaagttgatatttggtcacttggcatcacttgtattgaattggcggaacggaagccgccccttttcaacatgaatgcaatgagtgccttatatcacattgcccagaatgactccccaacgttacagtctaatgaatggacagactcctttaggagatttgttgattactgcttgcagaaaatacctcaggaaaggccaacatcagcagaactattaaggcatgactttgttcgacgagaccggccactacgtgtcctcattgacctcatacagaggacaaaagatgcagttcgtgagctagataacctacagtaccgaaaaatgaaaaaaatacttttccaagagacacggaatggacccttgaatgagtcacaggaggatgaggaagacagtgaacatggaaccagcctgaacagggaaatggacagcctgggcagcaaccattccattccaagcatgtccgtgagcacaggcagccagagcagcagtgtgaacagcatgcaggaagtcatggacgagagcagttccgaacttgtcatgatgcacgatgacgaaagcacaatcaattccagctcctccgtcgtgcataagaaagatcatgtattcataagggatgaggcgggccacggcgatcccaggcctgagccgcggcctacccagtcagttcagagccaggccctccactaccggaacagagagcgctttgccacgatcaaatcagcatctttggttacacgacagatccatgagcatgagcaggagaacgagttgcgggaacagatgtcaggttataagcggatgcggcgccagcaccagaagcagctgatcgccctggagaacaagctgaaggctgagatggacgagcaccgcctcaagctacagaaggaggtggagacgcatgccaacaactcgtccatcgagctggagaagctggccaagaagcaagtggctatcatagaaaaggaggcaaaggtagctgcagcagatgagaagaagttccagcaacagatcttggcccagcagaagaaagatttgacaactttcttagaaagtcagaagaagcagtataagatttgtaaggaaaaaataaaagaggaaatgaatgaggaccatagcacacccaagaaagagaagcaagagcggatctccaaacataaagagaacttgcagcacacacaggctgaagaggaagcccaccttctcactcaacagagactgtactacgacaaaaattgtcgtttcttcaagcggaaaataatgatcaagcggcacgaggtggagcagcagaacattcgggaggaactaaataaaaagaggacccagaaggagatggagcatgccatgctaatccggcacgacgagtccacccgagagctagagtacaggcagctgcacacgttacagaagctacgcatggatctgatccgtttacagcaccagacggaactggaaaaccagctggagtacaataagaggcgagaaagagaactgcacagaaagcatgtcatggaacttcggcaacagccaaaaaacttaaaggccatggaaatgcaaattaaaaaacagtttcaggacacttgcaaagtacagaccaaacagtataaagcactcaagaatcaccagttggaagttactccaaagaatgagcacaaaacaatcttaaagacactgaaagatgagcagacaagaaaacttgccattttggcagagcagtatgaacagagtataaatgaaatgatggcctctcaagcgttacggctagatgaggctcaagaagcagaatgccaggccttgaggctacagctccagcaggaaatggagctgctcaacgcctaccagagcaaaatcaagatgcaaacagaggcacaacatgaacgtgagctccagaagctagagcagagagtgtctctgcgcagagcacaccttgagcagaagattgaagaggagctggctgcccttcagaaggaacgcagcgagagaataaagaacctattggaaaggcaagagcgagagattgaaacttttgacatggagagcctcagaatgggatttgggaatttggttacattagattttcctaaggaggactacagatgagattaaattttttgccatttacaaaaaaaaaaaaaaaaagaaaacagaaaaaaattcagaccctgcaaaaccacattccccattttaacgggcgttgctctcactctctctctctcttactcttactgacatcgtgtcggactagtgcctgtttattcttactccatcaggggcccccttcctccccccgtgtcaactttcagtgctggccaaaacctggccgtctcttctattcacagtacacgtcacagtattgatgtgattcaaaatgtttcagtgaaaactttggagacagttttaacaaaaccaataaaccaacaacaaaaaaagtggatgtatattgctttaagcaatcactcattaccaccaatctgtgaaagtaaagcaaaaaataataataataaatgccaagggggagagagacacaatatccgcagccttacaccttaactagctgctgcattattttattttattttatttttttggtatttattcatcaggaataaaaaaaacaaagttttattaaagattgaaaatttgatacattttacagaaactaattgtgatgtacatatcagtggtgacatattattacttttttggggacgggggtgggtggggtgaagagatcttgtgattttagactgctgcagagttaacttgtctcagcatatctgatgtatcataatcatttctgctgtgcagaggagggatacacttaggggctcacagatcccagtagcacaattgggctttggcaaatgggtattttgtgtatagaggaatttaaggagaggtattacttattttcatattgtattttaactgtttctcggatcaaattttttaacttcttcttcgtgttcttccccacctccttccttttccagttcagtatttggagttcaacactgtctctcaatcagatcatctggatctttttctttatctcccttccccttcctaagtcccatttcttggtcataaatattgcattattcacactttcaaactgtgtattttcttacaataaaaaatgatgaaaaaaaaaaaggctttacttcttttgcatgcactttaaaaacaaaacaaaacatttttcaggttccaaggaagagcatgataactgtcagagcttttaattatatttgtaaataaaagtgttcatcacaaaaaaaaaaaaaaaaaaaaaaaaa

SEQ ID NO: 12577 - DNA, 6996 bp, Homo sapiens
atggaccaaggcccttggcggtgcgttgcgcacccccggggcgccgcgactgaagtagcaatggacgcgctggagtcgttgttggacgaagtcgctctggaggggctcgatggcctgtgtctgccagcgctgtggagccggctggagacgcgagtgccgcccttcccgctgcctttggaaccctgcacgcaggagtttctctggcgggccctcgccacgcacccgggcatcagcttctatgaggagcctcgggagcgacccgacctacagctccaggaccggtatgaagaaattgatttggaaactggaattttggagtctaggagggacccggtggctttggaggatgtctaccccattcatatgatcttagagaataaggatggcatccagggctcatgccgctactttaaggagaggaaaaacattaccaatgacatcagaaccaagtccttgcagcctcgctgtacaatggtggaaccctttgacaggtgggggaagaaactgatcatcggttccctcccagcccatgcggtacaggcccttgatagcccaggagggggatcccgacctgaagctgcccgacttctcctactgcatcctggaacggctaggccggtccaggtgcaaggggagctccagcgagaccttcacaccactgctttcaaggttgatgctgggaagctgcactatcacagaaaaattttgaacaaaaacgggctgattacaatgcagtcccatgtgatccgattacccactggagcccagcaacactcaatcctcctcctactgaaccggtttcatgtggacaggaggagcaaatacgacatcctcatggagaagctttcggtcatgctgagcacacggactaaccacatagagacgctgggaaagctgagggaagagctggggctgtgcgaaaggacgtttaagcgtctgtaccagtatatgctgaacgccgggctagccaaggtggtgtctcttcgcttgcaagagatccaccctgaatgtggaccttgtaagacaaagaaagggaccgacgtcatggttcggtgcctcaagctgctgaaggaatttaaacggaatgaccatgatgatgacgaggacgaggaggtcatctccaagacagtgcctccagtggacattgtgttcgagcgggatatgctcacacagacctacgacctcattgagcgcagaggcacgaaaggaatttcccaagctgaaatccgagtggctatgaatgtgggaaaactagaagcaagaatgctgtgccgacttcttcaaagattcaaagttgtcaagggattcatggaagacgaaggtcggcagcgaaccaccaagtacatttcctgcgtgtttgcagaggagagcgacctaagccggcagtaccaaagagagaaggcccgcagcgagctcttgaccaccgtgagcctggcgtctatgcaggaggagtcgcttctgcctgaaggcgaggacaccttcctctctgagtcggacagtgaggaggagaggagcagcagcaagcggagaggcagagggtcccagaaagacacaagagcctctgcaaacctccggcccaagacccagcctcatcactccaccccaaccaagggtgggtggaaagttgtaaacctacacccattgaaaaagcagccgccctccttcccaggagctgctgaagagagagcctgccagagccttgccagcagggacagcctcttagataccagcagcgtctcagaacccaacgtgtcctttgtctcccactgtgcggacagcaacagtggtgacatagctgtgatcgaggaggtccggatggaaaacccaaaggagagtagcagttccctgaagactgggaggcacagctcaggccaagacaaaccacacgaaacttaccgactgctgaaacgcaggaatctgatcatagaagctgtcaccaatcttcgcttaatcgagagtttattcacgattcagaagatgatcatggatcaggagaagcaggaaggcgtgtccaccaagtgctgcaagaagtccattgtccgcttggtgcggaacctgtctgaggaaggtctcttgcgattgtatcggaccactgtcattcaagatggcatcaagaagaaggtggatctggtggtgcacccgtccatggaccagaacgaccctctagtgagaagtgccatcgagcaggtccgcttccggatctccaattcaagcacagccaacagggttaaaacttcccagcctccagtgccccaaggggaggcagaagaagacagtcaaggaaaagagggcccaagtggatcaggggactctcagctgagtgcttcctctagatcagaaagtggacggatgaaaaaaagtgataataaaatgggcataaccccgcttagaaattatcaccccattgtagttcccggactggggcgttctctaggatttctgcccaaaatgcctcgcctgcgggtggtccacatgtttctgtggtacctcatctacgggcaccctgccagcaacaccgtggagaagccaagcttcatcagtgaacggagaacgataaagcaggagtcaggcagggcaggcgtccggccgtcctcctctggaagtgcctgggaggcctgctctgaagccccatctaaaggcagccaagatggtgtcacctgggaggctgaagtggagcttgccacggagacagtgtatgtcgacgatgcctcgtggatgcgctacatccccccaatcccagtccacagggacttcggctttggctgggctctcgtcagcgacatcctcctctgccttcccctctccatcttcatccagattgtgcaagtcagctacaaggtggacaacctggaggaatttctgaacgacccgctgaagaagcacacgctgatccgctttctccccaggcccattcggcagcagcttctgtacaagaggcgttacattttttcggtggtggagaaccttcagaggctgtgctacatgggggtgctacagtttggtcccacggaaaagtttcaggataaagatcaggtctttatcttcttgaagaagaatgcagtcattgttgacactaccatctgcgacccacattacaacctgggccgcaggaggcggcccttcgagaggcgcctctatgtcctgaactcaatgcaggatgtggaaaactactggtttgacctgcagtgcgtctgcctcaacaccccactaggcgtggtgcgctgcccgcgcgtcaggaagaacagcagcacagaccagggcagcgacgaggagggcagcctgcagaaggagcaggagagcgccatggacaagcacaacctggagcgcaagtgcgccatgctggagtacaccactggaagccgtgaggtggtggatgaaggcttgatccctggagatgggctgggtgccgcagggctcgattccagcttctacggacacctcaagcgcaactggatctggaccagctacatcatcaaccaggccaaaaaggagaacactgccgcagagaatggactcacagtgaggctccagacatttctgtccaagcgcccaatgcccctcagtgccagaggcaacagcaggttgaatatttggggggaagcaagagtaggctccgagctctgtgctggctgggaagagcagtttgaggtggaccgagagccctcgctggaccgaaaccggagagtgaggggtgggaaaagccagaagcggaagcggctgaagaaggaccctgggaagaagatcaagagaaagaagaaaggagagttcccaggagaaaaaagcaaaaggctgcgctaccatgatgaagccgaccagagtgccctgcatcggatgacgcggcttcgtgtcacctggtctatgcaggaggatgggctgcttgtgctgtgccgcattgccagcaatgtcctcaacaccaaggtgaagggtccatttgtcacctggcaggtggtacgggacattttgcatgccacgtttgaagagtctttggataaaacatctcattcccttggacgaagagctcgctacatagtcaaaaacccacaggcctatctcaactataaagtgtgcctggccgaggtgtaccaggataaagcacttgttggagatttcatgaatcgaagaggtgactatgatgacccaaaggtttgtgccaacgagtttaaagaatttgtggagaagcttaaagaaaagttcagttcagccctaaggaattctaaccttgaaatcccagacacactccaggagctgttcgccaggtaccgagttttggcaattggggatgaaaaagatcaaaccaggaaagaggatgaacttaacagcgtggatgacatccactttctggtgcttcagaacctgatccagagcacgctggccctctcagacagtcagatgaagtcctaccagtcattccagactttccgcctctatcgggagtacaaggaccacgttcttgtgaaggccttcatggagtgccagaagaggagcttggtcaaccggcgccgggtcaaccacacgctgggccccaagaagaaccgggccctccccttcgtgccaatgtcctaccagctatcccagacctactacaggatttttacgtggcgatttccaagcaccatctgcacggagtcattccagtttttggacagaatgcgggctgccggcaagttggaccagcctgatcgtttctctttcaaagaccaggataataacgagcccacaaacgacatggtggccttttcactggacggccctggaggaaattgtgtggccgtcctgaccctcttctctctgggcctcatttctgtggatgtcaggatcccggagcagatcatcgtggtagacagctcaatggtggagaatgaggtcatcaaaagcttggggaaggacggcagcctggaggatgacgaggatgaagaggatgacttggacgaaggtgtagggggcaagcgccggagcatggaggtgaaacctgcgcaagcctcccacaccaactacctgctgatgaggggctactactcccccggcatcgtcagcacccgcaacctcaaccccaacgacagcattgtggtcaactcctgccagatgaagttccagctccgctgcacccctgtgcccgcccggctcaggcccgctgccgctcctctggaagagctaacaatgggaacctcctgcctccctgatacgttcaccaagctgataaacccccaggaaaacacctgcagcttggaggagtttgtcctccagctggagctgtctgggtatagtcccgaagacctgactgctgccttggagatcttggaagccattatagccacgggttgttttgggattgacaaggaggagctgcgcagacggttctcggccttggagaaggcaggtggtgggcgcaccaggacattcgcagattgcatccaggccctcctggagcagcatcaggtgctggaggtcggtggcaacactgcgcgcctggtagccatgggctctgcctggccttggctcctgcactccgtgcggctgaaagacagagaagacgccgacatccagagagaagacccccaggccagacccctggaggggtcttccagtgaggacagcccccccgaggggcaggcacctccttctcacagcccccggggcaccaagaggcgcgccagctgggccagtgagaatggggagaccgacgccgagggcacccagatgacccctgccaagaggccagcgctccaggactcaaatttggcccccagccttgggcccggagctgaagatggggcagaagcccaggccccatctccacccccagctcttgaagacaccgctgcagcgggagcagcacaggaagaccaagagggtgtcggtgagttcagttccccaggccaagagcagctgagcggccaggcgcagcctccagagggctctgaagaccccagagggttcacagagagtttcggagctgccaacatctcccaggcagcacgggaaagggactgtgagagtgtctgcttcatcggccggccgtggcgtgtcgtggatggccacctgaaccttcctgtatgcaagggtatgatggaggccatgctgtaccacatcatgaccaggcctggcatccccgagagctccctgctgcgccactaccagggggtcctgcagcccgtcgccgtgctggagttgctccagggcctggagtccctcggctgcatccggaagcgctggctgagaaagccaaggcctgtctcgctcttctctacacccgtggtggaagaggtggaagtgccctccagcctggacgagagccccatggctttctatgagcccaccttggactgtaccctccggctgggccgtgtgttcccccacgaggtcaactggaacaagtggatccacctctaggacccctgtgggcgtcccctccctcccagccaccgcctgccacaccactcctgcctggtgctcggcagaccccactgtgccctggccttgggtctgccgagcctcctgcagcaggggacgggtgctttggccagagtcacagactgacacgtttcccactgtactggaactctggaaagaggggctccccgacctgcccatcccccaggctcttctgggccttccccttgggaactggcctcatcacactgggagttggtgcttcttgtctctgggtctccagagtttgccccgcctgtgcacacctcacattccagactctagccatctcggcaggatctcctggctccttgagtgcccaggtgccaccaagaggaagggccttgtgggatacaccttgcagaatagggatcggtgtgccccgctgcgaggggccccccatgggggctgtggcccctccgcaggcaggacatcccaacccctggctgggactgaaccacccagagcggagcggctcccttttcagccttgtgagtcacctggcaggccccagctgggctggctgtccgtgtccctcagcctggctggtgattccttgcaggaggg

SEQ ID NO: 12578 - DNA, 1890 bp, Homo sapiens
cccgcgagcggacgcggcagcgcctctgtctcgctttttcttatttttcccccctttcccctttctttttttttttttcttttcttttctcccctccccccctttcaccatttcccctcggaggcgctttccccgggcaggggcagagccggtctcaccccccgcctctccccggcccccgccgccctatggcgagagggagccccctcccaacccgggctcgagcggcggcggcctcaggccgggggtcatcatggaactaattcgctgaccgacccagcggccgcagccgtgcgtcccgctcgagcgccagcgcccgcgcccgcgccccccgatccgcttcccctttctccctcctcagttggccgagtcgtcccgcgcgcaccgcctccgcgcgcctatgagaatgaggtggtaacgggcccccggatgaccccgcgtcaccactgtgaggcctacagctctgccggggaggaggaggaggaggaagaggaggagaaggtagctacagcaagctgggtagcaggcagatccaaaggatatcatgaagtttccagggcctttggaaaaccagagattgtctttcctgttggaaaaggcaatcactagggaagcacagatgtggaaagtgaatgtgcggaaaatgccttcaaatcagaatgtttctccatcccagagagatgaagtaattcaatggctggccaaactcaagtaccaattcaacctttacccagaaacatttgctctggctagcagtcttttggataggtttttagctaccgtaaaggctcatccaaaatacttgagttgtattgcaatcagctgttttttcctagctgccaagactgttgaggaagatgagagaattccagtactaaaggtattggcaagagacagtttctgtggatgttcctcatctgaaattttgagaatggagagaattattctggataagttgaattgggatcttcacacagccacaccattggattttcttcatattttccatgccattgcagtgtcaactaggcctcagttacttttcagtttgcccaaattgagcccatctcaacatttggcagtccttaccaagcaactacttcactgtatggcctgcaaccaacttctgcaattcagaggatccatgcttgctctggccatggttagtctggaaatggagaaactcattcctgattggctttctcttacaattgaactgcttcagaaagcacagatggatagctcccagttgatccattgtcgggagcttgtggcacatcacctttctactctgcagtcttccctgcctctgaattccgtttatgtctaccgtcccctcaagcacaccctggtgacctgtgacaaaggagtgttcagattacatccctcctctgtcccaggcccagacttctccaaggacaacagcaagccagaagtgccagtcagaggtacagcagccttttaccatcatctcccagctgccagtgggtgcaagcagacctctactaaacgcaaagtagaggaaatggaagtggatgacttctatgatggaatcaaacggctctataatgaagataatgtctcagaaaatgtgggttctgtgtgtggcactgatttatcaagacaagagggacatgcttccccttgtccacctttgcagcctgtttctgtcatgtagtttcaacaagtgctacctttgagtgtaaactaaggtagactactttgggaatgagaacatgcaaaatcaggaaaggctgtagaaggaaatataccttaacaggctgatttggagtgagccagaaaaaaaaaataaaactctcattatttgtgtggctaattataattcagcgttatttaagcacataaagaccaaaaaaaaaaaaaaaaaaa

SEQ ID NO: 12579 - DNA, 2867 bp, Homo sapiens
aaggctagcctctctcagtgggtgactgagctgtcttcagtggaagcccgaggcagatgccacgcaattctggagctggatacggctgcccacacggggaccccagcatgctggacagcagagagaccccacaggagagccggcaggacatgattgtgaggaccacccaagaaaaattgaaaaccagctcactgactgacaggcagccactctccaaagagtccctgaaccatgctctcgagctctcagtgccagagaaggtgaataatgcccagtgggatgctccagaggaggcgctgtggacgactcgggccgatgggcgggtgcgcctgcgcatagaccccagctgcccacagcttccctacactgtgcatcggatgttctacgaggccctggataagtatggggacctcatcgctttgggcttcaagcgccaggacaagtgggaacacatctcctactcccaatactacctgctcgcccgcagagccgccaagggcttcctgaagctcggcctgaagcaggcccacagtgtggccatcctcggcttcaactccccggagtggttcttctcggcagtgggcacagtatttgcaggtggcatcgtcactggcatctacaccaccagctccccagaggcctgccagtacatcgcttatgactgctgcgccaatgtcatcatggtcgacacgcagaagcagctggaaaagatcctgaagatctggaaacagttgccacatctaaaggcagtcgtgatatataaagaacctcctccaaacaagatggccaatgtgtacacgatggaggaattcatggagctggggaatgaagtgcctgaggaagccctggacgccatcattgacacccagcagcccaaccagtgctgtgtgctagtctacacttccggcaccactgggaaccccaagggcgtgatgctgagtcaagacaatatcacgtggacggcacggtacggcagccaggccggtgacatccggccggcagaagtccagcaggaggtggtagtcagctacctgcccctcagccatattgccgcccagatctacgacctgtggacaggcatccagtggggggcccaggtttgctttgccgaacccgacgccctgaaggggagcctggtgaacacgctgcgggaggtggagcccacatcacacatgggggtgccccgggtatgggagaagatcatggagcgcatccaggaggtggcggctcagtctggcttcatccggcgaaagatgctgctgtgggccatgtcggtgaccttggagcagaacctcacctgccccggcagcgacctgaagcccttcacaaccagactggcagattacctggtgctagccaaggttcgccaggcactgggatttgccaagtgtcaaaagaacttctatggagcggcccccatgatggcagagacacagcacttcttcctgggtctcaacatccgcttgtatgcgggctacggcctcagtgagacctcaggcccccacttcatgtccagtccctacaactaccggctgtacagctcaggcaagttggtgcccggctgtcgggtgaagctggtgaaccaggacgcagagggcattggcgagatctgcctgtggggccgcaccatattcatgggctacctgaacatggaggacaagacttgtgaggccatcgacgaggaaggctggctgcacacgggtgatgctggccgcctggacgccgatggcttcctctacatcactgggcgcctcaaagaattaatcatcacagctggtggggagaatgtgccccctgtgcccatcgaggaggccgtgaagatggagctgcccatcatcagcaacgccatgctcattggggaccagaggaagttcctgtccatgctgctcaccttgaagtgcactctggacccagacacctctgaccagactgataatctgactgaacaagctatggagttctgccagagggtgggcagcagagccaccacagtgtccgagatcatagagaagaaggatgaggccgtgtaccaggccatcgaagaggggatccggagggtcaacatgaacgcggcggcccggccctaccacatccagaagtgggccattctcgagagagacttctccatttcgggtggagagttgggtcccacgatgaaactgaaacggctcacagttttggagaagtacaaaggtatcattgactccttttaccaagagcaaaaaatgtaatcagggcctatgcctgcagtttctatagaatagagggcaggcgttccgagcctcttcctgagccccaggtctcttcagtctgggcacaggcatttctgccaagtctgttagatctccaggtcagggcacagcactggctctacatttaccaggtcttacgccaacaatagctgacaattccaagaagcttcacgtgtgggtagttttaattcagtttaagtattgctttttgttcaggtgacaaatgagatcagctctccttccagaacgaaagggctgataatttttggccttagttccaggtagattaaaaagctgctagctcacatacaggacagccagcagtaggctgtggagcgggtaggagagagatggctgatactgctcacgtgcgctgcaggaaaagcaatcagtcacaactcacctagcgacctgacttactctggaatcttggcgggcatcgccgaccctattattccattaccaggcactccgccacccacatgccaactgacttgatgcttaataaaactgctgctgcctgtttgattctatttaatgtataatttgaatattaaaccttttaacagaactgtcaaaaaaaaaaaaaaaaaaaaaaaaaaaaaaaaaaaaaaa

SEQ ID NO: 12580 - DNA, 4815 bp, Homo sapiens
ccgggggtggcgaggggaaggcgacatttgcttggcgctgcctccgtgcagagcggccgggagggctttgcagcggccgccgacgcggcgggaggagggggctgaggcggcttcggagttggccggagaaggtgggcatttctcgcttttcctccccttcctgcgctctccccctccctcctgccccgcaccccacgtgaagcagaatataaaggggggtgtgaggctagaggggaaagtgaatggcgaaggactgaagggatccccccttcgggtccccggccgccctgttcaccctcgttcatcctcctttccgaagctcgctctcgaaggcaggagcgaccggcgcctttggctgaggaggaggagaaggaggaatcgcgccaggcggagcgtcaggtcccgttttcctctccggcgtctccaatacaaagattacggtgcagaaggaaattgcactcgtctcctccgcgcccccggtacccaacacaatgcaccagccgcctgagtccaccgccgcggccgccgccgctgcagacattagcgctaggaagatggcgcacccggcaatgttccctcgaaggggcagcggtagtggcagcgcctctgctctcaatgcagcaggtaccggcgtcggtagtaatgccacatcttccgaggattttccgcctccgtcgctgcttcagccgccgccccctgcagcatcttctacgtcgggaccacagcctccgcctccacaaagcctgaacctcctttcgcaggctcagctgcaggcacagcctcttgcgccaggcggaactcaaatgaaaaagaaaagtggcttccagataactagcgttactcctgctcagatctccgctagtatcagctctaacaacagtatagcagaggacactgagagctatgatgatctggatgaatctcacacggaagatctctcttcttcggagatccttgatgtgtcactttccagggctactgacttaggggagcccgaacgcagctcctcagaagagaccctaaataacttccaggaagccgagacacctggggcagtctctcccaaccagccccaccttcctcagcctcatttgcctcaccttccacaacagaatgttgtgatcaatgggaatgctcatccacaccacctccatcaccaccatcagattcatcatgggcaccacctccaacatggtcaccaccatccatctcatgttgctgtggccagtgcatccattactggtgggccaccctcaagcccagtatctagaaaactctctacaactggaagctctgacagtatcacaccagttgcaccaacttctgctgtatcatccagtggttcacctgcatctgtaatgactaatatgcgtgctccaagtactacaggtggaataggtataaattctgttactggcactagtacagtaaataatgttaacattactgctgtgggtagttttaatcctaatgtgacaagcagcatccttggtaatgttaatataagtacaagcaatattcctagtgctgctggtgtgagtgttgggcctggagttaccagtggtgttaatgtgaatatcttgagtggcatgggcaatggtactatttcttcctctgctgctgttagcagtgttcctaatgcagctgcagggatgactgggggatcggtttcaagtcagcagcaacaaccaacagttaacacttcgaggttcagagttgtgaagttagattctagttctgagccctttaaaaaaggtagatggacttgcactgagttctatgaaaaagaaaatgctgtacctgctacagaaggtgtgctgataaataaagtggtggagactgtaaagcaaaatccgatagaagtgacttctgaaagggagagcactagtgggagttcagtgagcagtagtgtcagcacactgagtcactatacagagagtgtgggaagtggagagatgggagcccctactgtggtggtgcagcagcagcagcagcaacaacaacaacaacagcaacaaccagctctccaaggtgtgaccctccaacagatggattttggtagcactggtccacagagtattccagcagttagtataccacagagtatttctcagtcacagatctcacaagtacaattacagtctcaagaactgagctatcagcaaaagcaaggtcttcagccagtacctctgcaagccactatgagtgctgcaactggtatccagccatcgcctgtaaatgtggttggtgtaacttcagctttaggtcagcagccttccatttccagtttggctcaaccccagctaccatattctcaggcggctcctccagtgcaaactccccttccaggggcaccaccaccccaacagttacagtatggacaacagcaaccaatggtttctacacagatggccccaggccatgtcaaatcagtgactcaaaatcctgcttcagagtatgtacaacagcagccaattcttcaaacagcaatgtcctccggacagcccagttctgcaggagtaggagcaggaacaacagtgattcctgtggctcagccacagggtatccagctgccagtgcagcccacagcagtcccagcacaacctgcaggggcatctgtccagcctgttggccaggctccggcagcagtgtctgctgtacctactggcagtcagattgcaaatattggtcagcaagcaaacatacctactgcagtgcagcagccctctacccaggttccaccttcagttattcagcagggtgctcctccatcttcgcaagtggttccacctgctcaaactgggattattcatcagggagttcaaactagtgctccaagccttcctcaacaattggttattgcatcccaaagttccttgttaactgtgcctccccagccacaaggagtagaaccagtagctcaaggaattgtttcacagcagttgcctgcagttagttctttgccctctgctagtagtatttctgttacaagtcaggttagttcaactggtccttctggaatgccttctgccccaacaaacttggttccaccacaaaatatagcacaaacccctgctacccaaaatggtaatttggttcaaagtgttagtcaacctcccttgatagcaactaatacaaatttgcctttggcacaacagataccactaagttctacccagttctccgcacaatcattagctcaggcaattggaagccaaattgaagatgccaggcgtgcagcggagccctccttagttggcttacctcagactatcagtggtgacagtgggggaatgtcagcagtttcagatgggagtagcagcagcctagcagcctctgcttctcttttcccgttgaaggtgctaccgctgacgacacccctggtggatggcgaggatgagagctcctctggtgcaagtgtggtagctattgacaacaaaatcgagcaagctatggatctagtgaaaagccatttgatgtatgcggtcagagaagaagtggaggtcctcaaagagcaaatcaaagaactaatagagaaaaattcccagctggagcaggagaacaatctgctgaagacactggccagtcctgagcagcttgcccagtttcaggcccagctgcagactggctccccccctgccaccacccagccacagggcaccacacagccccccgcccagccagcatcgcagggctcaggaccaaccgcatagctgcctatgcccccgcagaactggctgctgcgtgtgaactgaacagacggagaagatgtgctagggagaatctgcctccacagtcacccatttcattgctcgctgcgaaagagacgtgagactgacatatgccattatctctttttccagtattaaacactcatatgcttatggcttggagaaatttcttagttgggtgaattaaaggttaatccgagaattagcatggatataccgggacctcatgcagcttggcagatatctgagaaatggtttaattcatgctcaggagctgtgtgcctttccatcccttccggctccctacccctcacttccaagggttctctctcctgcttgcgcttagtgtcctacatggggttgtgaagcgatggagctcctcactggactcgcctctctcctctcctccccccaggaggaacttgaaaggagggtaaaaagactaaaatgagggggaacagagttcactgtacaaatttgacaactgtcaccaaaattcataaaaaacaatagtactgtgcctctttcttctcaaacaatggatgacacaaaactatgagagtgacaaaatggtgacaggtagctgggacctaggctatcttaccatgaaggttgttttgcttattgtatatttgtgtatgtagtgtaactattttgtacaatagaggactgtaactactatttaggttgtacagattgaaatttagttgtttcattggctgtctgaggaggtgtggacttttatatatagatctacataaaaactgctacatgacaaaaaccacacctaaagaaattttaagaatttggcacagttactcactttgtgtaatctgaaatctagctgctgaatacgctgaagtaaatccttgttcactgaagtctttcaattgagctggttgaatactttgaaaaatgctcagttctaactaatgaaatggatttcccagtaggggtttctgcatatcacctgtatagtagttatatgcatatgtttctgtgcatgttctctacacaattgtaaggtgtcactgtatttaactgttgcacttgtcaactttcaataaagcatataaatgttgat

SEQ ID NO: 12581 - DNA, 3767 bp, Homo sapiens
gataagttggcgcgtcacctagacgtcagcctcttacctctcggacgtcccgtcccaggagcaaaactctagtgactttgggcccgcccccgtgagagtggagggcggccgatgagggcggttctgaagggaacaagaccaatgagacgagcccggggcggggcgcggggccggagggtggggcgggtggcggcggtggcagtccgaggtctggctccgcgcagtatatgacagtacgtcagcagcgggatggccctagcagtggcggcggctgcagaagcccaagcagccgcggccgcagtggaggctagagccggagcggcggcggcggcggcaccccggggagtttaagatggcggcgggggggacagggggcctgcgggaggagcagcgctatgggctgtcgtgcggacggctggggcaggacaacatcaccgtactgcatgtgaagctcaccgagacggcgatccgggcgctcgagacttaccagagccacaagaatttaattccttttcgaccttcaatccagttccaaggactccacgggcttgtcaaaattcccaaaaatgatcccctcaatgaagttcataactttaacttttatttgtcaaatgtgggcaaagacaaccctcagggcagctttgactgcatccagcaaacattctccagctctggagcctcccagctcaattgcctgggatttatacaagataaaattacagtgtgtgcaacaaacgactcgtatcagatgacacgagaaagaatgacccaggcagaggaggaatcccgcaaccgaagcacaaaagttatcaaacccggtggaccatatgtagggaaaagagtgcaaattcggaaagcacctcaagctgtttcagatacagttcctgagaggaaaaggtcaacccccatgaaccctgcaaatacaattcgaaagacacatagcagcagcaccatctctcagaggccatacagggacagggtgattcacttactggccctgaaggcctacaagaaaccggagctacttgctagactccagaaagatggtgtcaatcaaaaagacaagaactccctgggagcaattctgcaacaggtagccaatctgaattctaaggacctctcatataccttaaaggattatgtttttaaagagcttcaaagagactggcctggatacagtgaaatagacagacggtcattggagtcagtgctctctagaaaactaaatccgtctcagaatgctacaggcaccagccgttcagaatctcctgtatgttctagtagagatgctgtatcttctcctcagaaacggcttttggattcagagtttattgatcctttaatgaataaaaaagcccgaatatctcacctgacgaacagagtaccaccaacactaaatggtcatttgaatcccaccagtgaaaaatcggctgcaggcctcccactgccccctgcggctgctgccatccccacccctccaccgctgccttcaacctatctgcccatctcacatcctcctcagattgtaaattctaactccaactcccctagcactccagaaggccgggggactcaagacctacctgttgacagttttagtcaaaacgatagtatctatgaggaccagcaagacaaatatacctctaggacttctctggaaaccttaccccctggttccgttctactaaagtgtccaaagcctatggaagaaaaccattcaatgtctcacaaaaagtccaaaaagaagtctaaaaaacataaggaaaaggaccaaataaaaaagcacgacattgagactattgaggaaaaggaggaagatcttaagagagaagaggaaattgccaagctaaataactccagtccaaattccagtggaggagttaaagaggattgcactgcctccatggaaccttcagcaattgaactcccagattatttgataaaatatatcgctatcgtctcctatgagcaacgccagaattataaggatgacttcaatgcagagtatgatgagtacagagctttgcatgccaggatggagactgtagctagaagatttatcaaactagatgcacaaagaaagcgcctttctccaggctcaaaagagtatcagaatgttcatgaagaagtcttacaagaatatcagaagataaagcagtctagtcccaattaccatgaagaaaaatacagatgtgaatatcttcataacaagctggctcacatcaaaaggctaataggtgaatttgaccaacagcaagcagagtcatggtcctagaactctgcttggaccagaagatgtgaataaacttaagcttatttatttaaaattccaaatgagttgctctagattctaaaaaggtgaaactttggctgttgaaagtttcagtattagtaaacttgagttactttttcttttccattttactttgcttccctgcatttcgaagctgctctttctggtcctccccaccaccccacccccaagacttgtgtttgttaatagaaataatttttttaggtattggggatccattgtctatatttcaaatcagttttttttcctcaaaaacttgtgtttgttattagaaatgattttttagatattggggatccagtgtccacacttaaaagttgtatgtgtttaaaaaacaacaacagtaatgtgcaaggtgaaatgcttttggataaacgtaagcctattttctgacgtttcttaatgcaaactctttgccttaaatggtagaatatttagaaatttgcacaaaattaaaaaaataaacattgtcttggagggttaaaaaatagaaaggtgtatgtgtatagattcacatacacatatgtatatacaggctgacttgatctagaacattaaatccgccctgcaagttaaccccccattgcaatggttgccttaaggtgtttgctagttgtgtacatagtgtggttaatcattagctacactgcttcccacttgattagagcaatgggaagcatactgtggcctaccagcatctggaagtgtgtgctcgatctgtatgtgtgcagaggtggtgtggatgtgagcgtgcatgaaggaaaaaaagctgctactcctagtaggccaaacgctcaggttaaacaactgacgagtgttactgtagggtgtttttttgtttttttgttttttttcttctatcaaattgctacttttgttgtggaagacaaaagcatttccatttcaacgagtttgtcagctttattaatgttgggcaaaaattgatatgtcatgaaaatgaaacagatctatagttttgggacaaaattataaaatgaaatgtgtaggtaacctatttatatactgctataaagtattttttgaagagagatatgcaaagaagctattacctacataagaggtatatttaaagattttttttttttcatcctggtgccaggaatataaaaaagagtggatatatttaaccataacatactgtgattcatcaaacagcacaaactttcatttcatggagtttatctgttgacattgatttaaactgtcacttgttttatcatgtgggaacataagttatgtggtcaaaaatataaggattttgaattaatgttgattcaagttgtattgtcttattgtattgtcttttcaaagtgctgccagttgaaaagggaagcattatgtttacaaatctgttttgaaatgtttgccaaaattttggtagtgtctttaataaagatgtttgtctccagcatccagaaaaaaaaaaaaaaaa

SEQ ID NO: 12582 - DNA, 4221 bp, Homo sapiens
cgataacgatttgtgttgtgagaggcgcaagctgcgatttctgctgaacttggaggcatttctacgacttttctctcagctgaggcttttcctccgaccctgatgctcttcaattcggtgctccgccagccccagcttggcgtcctgagaaatggatggtcttcacaataccctcttcaatcccttctgactggttatcagtgcagtggtaatgatgaacacacttcttatggagaaacaggagtcccagttcctccttttggatgtaccttctcttctgctcccaatatggaacatgtactagcagttgccaatgaagaaggctttgttcgattgtataacacagaatcacaaagtttcagaaagaagtgcttcaaagaatggatggctcactggaatgccgtctttgacctggcctgggttcctggtgaacttaaacttgttacagcagcaggtgatcaaacagccaaattttgggacgtaaaagctggtgagctgattggaacatgcaaaggtcatcaatgcagcctcaagtcagttgccttttctaagtttgagaaagctgtattctgtacgggtggaagagatggcaacattatggtctgggataccaggtgcaacaaaaaagatgggttttataggcaagtgaatcaaatcagtggagctcacaatacctcagacaagcaaaccccttcaaaacccaagaagaaacagaattcaaaaggacttgctccttctgtggatttccagcaaagtgttactgtggtcctctttcaagacgagaataccttagtctcagcaggagctgtggatgggataatcaaagtatgggatttacgtaagaattatactgcttatcgacaagaacccatagcatccaagtctttcctgtacccaggtagcagcactcgaaaacttggatattcaagtctgattttggattccactggctctactttatttgctaattgcacagacgataacatctacatgtttaatatgactgggttgaagacttctccagtggctattttcaatggacaccagaactctaccttttatgtaaaatccagccttagtccagatgaccagtttttagtcagtggctcaagtgatgaagctgcctacatatggaaggtctccacaccctggcaacctcctactgtgctcctgggtcattctcaagaggtcacgtctgtgtgctggtgtccatctgacttcacaaagattgctacctgttctgatgacaatacactaaaaatctggcgcttgaatagaggcttagaggagaaaccaggaggtgataaactttccacggtgggttgggcctctcagaagaaaaaagagtcaagacctggcctagtaacagtaacgagtagccagagtactcctgccaaagcccccagggtaaagtgcaatccatccaattcttccccgtcatccgcagcttgtgccccaagctgtgctggagacctccctcttccttcaaatactcctacgttctctattaaaacctctcctgccaaggcccggtctcccatcaacagaagaggctctgtctcctccgtctctcccaagccaccttcatctttcaagatgtcgattagaaactgggtgacccgaacaccttcctcatcaccacccatcactccacctgcttcggagaccaagatcatgtctccgagaaaagcccttattcctgtgagccagaagtcatcccaagcagaggcttgctctgagtctagaaatagagtaaagaggaggctagactcaagctgtctggagagtgtgaaacaaaagtgtgtgaagagttgtaactgtgtgactgagcttgatggccaagttgaaaatcttcatttggatctgtgctgccttgctggtaaccaggaagaccttagtaaggactctctaggtcctaccaaatcaagcaaaattgaaggagctggtaccagtatctcagagcctccgtctcctatcagtccgtatgcttcagaaagctgtggaacgctacctcttcctttgagaccttgtggagaagggtctgaaatggtaggcaaagagaatagttccccagagaataaaaactggttgttggccatggcagccaaacggaaggctgagaatccatctccacgaagtccgtcatcccagacacccaattccaggagacagagcggaaagacattgccaagcccggtcaccatcacgcccagctccatgaggaaaatctgcacatacttccatagaaagtcccaggaggacttctgtggtcctgaacactcaacagaattatagattctaatctgagtgagttactgagctttggtccactaaaacaagctgagctttggtccactaaaacaagatgaaaaatacaagagtgactctataactctggtctttaagaaagctgccttttcatttttagacaaaatcttttcaacgctgaaatgtacctaatctggttctactaccataatgtatatgcagcttcccgaggatgaatgctgtgtttaaatttcataaagtaaatttgtcactctagcattttgaatgaatagtcttcactttttaaattattcatcttctctataataatgacatcccagttcatggaggcaaaaaacaagtttcttgttatcctgaaactttctatgctcagtggaaagtatctgccagccacagcatgaggcctgtgaaggctgactgagaaatcctctgctgaagacccctggttctgttctgcctccaacatgtataattttatttgaaatacataatcttttcactatgcttttgtggggttttttttaagtatgtgtaaaaatgtgatgctcagataagtacatttatatcagttcagtgttaaaatgcagtctcttgagttaaagtcatctttattttaaatgcagtgataaatgtcaactcttcggagaaactaggagaacaacaacagaaagctgtgtttgtcttttttctctcaaatatatctcccgtatgagatttcaggtccccatgttttcaccaagcaatctgctatgtcagccaacccaacatcactttctacaggaggttatgatttttgccatttactagaggaagatgttttatgaaatcaatttggggtttgaattcaggtgcagtcatcagttctttaggggctgcaatgttttaaaaaaaataagtcatcagattttaagaaaaaagtgatgatttcttattgatatttttgtaacagaatatagctcttaactgaaaatccagaaccagaaacataaatcttgagtttcttttcatgtacataaaaagcaatagccttttagtatagatagccctgagccaaaaagtaatagaattttctctagatatttaatacagagagtgtatagactgactctaagttaataatgtgcaaaatatcttaaacatccctccccttattcaacaattatgtatcagtgatcttgaaccattgttttatatttttcacctttgtaacctcatggaaagaggctttacatactttctatgtactatttacttagaagggagcccccttccagtcatgaaacttcatttgttttatccatatccctgaggactgtgtagactttatgtcagttctgtgtagactttatgtcagtttttgtcattatttgaaaatctattctgacaactttttaattcctttgatcttataagttaaagctgtaacaactgaaattgcatggatcaagtaagcatagttttatccagggagaaaaataaaaggaagccatagaattgctctggtcaaaaccaagcacaccatagccttaactgaatatttaggaaatctgcctaatctgcttatatttggtgtttgttttttgactgttgggctttgggaagatgttatttatgaccaatatctgccagtaacgctgtttatctcacttgctttgaaagccaatgggggaaaaaaatccatgaaaaaaaaaagattgataaagtagatgattttgtttgtatccctacccatctcctggcagccctactgagtgaaattgggatacatttggctgtcagaaattataccgagtctactgggtataacatgtctcacttggaaagctagtacttttaaatgggtgccaaaggtcaactgtaatgagataattatccctgcctgtgtccatgtcagactttgagctgatcctgaataataaagccttttacctt

SEQ ID NO: 12583 - DNA, 1300 bp, Homo sapiens
agcaaatgcttccagtcccaggagcacaaacatcacatggtgtgtgggatacaagaggctgctgagaattacaggaagttattccaggaaatattgaacacatcgagggagaaacttgaagcagctaaaagcatattgactgatgagcaagaaagaatggcgatgattcaggaagaggaacaaaattttaaaaagatgattgagtctgagtatagtatgagactccggttgttgaatgaagagtgtgagcagaatctccagagacagcaggaatgcatatctgacttgaacctgagagaaacccttctgaatcaagcgatcaagcttgccaccgagctagaggagatgttccaggaaatgctacagagactgggccgtgtggggagagagaacatggagaaactgaaggagagtgaagccagggcttctgaacaggtccgcagcctcctaaagctcatcgtggagcttgagaaaaagtgtggggaaggcaccttggcattgctcaagaatgcaaaatactccttagaaaggagcaagtcactgctgcttgagcatctggagcccgctcatatcacagacctgagtttatgccacataagaggactcagcagcatgttcagagtactccagagacatttaacattggatcctgaaacagctcatccctgcctggcactatctgaggacctgagaactatgagattgagacatgggcagcaggatggggctggcaacccagaaagattggatttcagtgccatggtgctggctgcggagagcttcacctcagggaggcactactgggaggtggacgtggaaaaggcaaccaggtggcaagtgggcatataccacggctctgcagacgcgaagggcagcacggccagagcttccggagagaaagtcttgctcacggggtcggtgatggggaccgagtggactctctgggtcttcccccctctgaaaaggctcttcctggaaaagaagttggacacagttggggttttccttgactgcgaacacgggcagatatcattctacaatgtgaccgagatgtccctcatttacaatttctcccattgcgccttccaaggagctctcaggcctgtgttttccctctgtatcccaaatggagacacaagtccagactccctcaccatcttacaacatggtccttcttgtgatgctactgttagcccttaatcttctgtgtgtaaaatccaagaccacgagacaccagaaagttggagaacaagactttgaaagaatttgtgtaaactaacccaataaaaagcgttccagg

SEQ ID NO: 12584 - DNA, 2834 bp, Homo sapiens
gagctacgagcgcggagcttgcgcagaagacccccatcagggtgcggggtgcagttgcggctccagggccatggcggaggagcagggccgggaacgggactcggttcccaagccgtcggtgctgttcctccacccagacctgggcgtgggcggcgctgagcggctggtgttggacgcggcgctggcgctgcaggcgcgcgggtgtagcgtgaagatctggacagcgcactacgacccgggccactgtttcgccgagagccgcgagctaccggtgcgctgtgccggggactggctgccgcgaggcctgggctggggcggccgcggcgccgccgtctgcgcctacgtgcgcatggttttcctggcgctctacgtgctgttcctcgccgacgaggagttcgacgtggtagtgtgcgaccaggtgtctgcctgtatcccagtgttcaggctggctagacggcggaagaagatcctattttactgtcacttcccagatctgcttctcaccaagagagattcttttcttaaacgactatacagggccccaattgactggatagaggaatacaccacaggcatggcagactgcatcttagtcaacagccagttcacagctgctgtttttaaggaaacattcaagtccctgtctcacatagaccctgatgtcctctatccatctctaaatgtcaccagctttgactcagttgttcctgaaaagctggatgacctagtccccaaggggaaaaaattcctgctgctctccatcaacagatacgaaaggaagaaaaatctgactttggcactggaagccctagtacagctgcgtggaagattgacatcccaagattgggagagggttcatctgatcgtggcaggtggttatgacgagagagtcctggagaatgtggaacattatcaggaattgaagaaaatggtccaacagtccgaccttggccagtatgtgaccttcttgaggtctttctcagacaaacagaaaatctccctcctccacagctgcacgtgtgtgctttacacaccaagcaatgagcactttggcattgtccctctggaagccatgtacatgcagtgcccagtcattgctgttaattcgggtggacccttggagtccattgaccacagtgtcacagggtttctgtgtgagcctgacccggtgcacttctcagaagcaatagaaaagttcatccgtgaaccttccttaaaagccaccatgggcctggctggaagagccagagtgaaggaaaaattttcccctgaagcatttacagaacagctctaccgatatgttaccaaactgctggtataatcagattgtttttaagatctccattaatgtcatttttatggattgtagacccagttttgaaaccaaaaaagaaacctagaatctaatgcagaagagatcttttaaaaaataaacttgagtcttgaatgtgagccactttcctatataccacacctccctgtccacttttcagaaaaaccatgtcttttatgctataatcattccaaattttgccagtgttaagttacaaatgtggtgtcattccatgttcagcagagtattttaattatattttctcgggattattgctcttctgtctataaattttgaatgatactgtgccttaattggttttcatagtttaagtgtgtatcattatcaaagttgattaatttggcttcatagtataatgagagcagggctattgtagttcccagattcaatccaccgaagtgttcactgtcatctgttagggaatttttgtttgtcctgtctttgcctggatccatagcgagagtgctctgtattttttttaagataatttgtatttttgcacactgagatataataaaaggtgtttatcataaaaaagaaacagtattagattttggtctccataatctattttggtattgttacgaacatggatatgacaaccaaactggaaatcagaacactagggtaaagtggatattgaaatgaagcaagaatattgtcacacatgtgttgtgcatcttgtttagggtatatttcttaatgtcatctaggtcattagttttgttaatatttgtgttgtcttgaccaagctcctactaagtataggacacaaatgttttttatcttccaaggcctggctcaaatgccactgctgcaaagctttctttgaccctctggccacctcccaagccagaagttatcttccccctccatgtactctagccttttcatgacactgatattttcgtgacactgacttatagttcactgtttacctgttggtctaacagcaaatcataaacagtagttttcaacatacttctaaggctaaattcatttccagaagtagcaaagcttactagccaaaggctccacatttatcaactcttaagagctagacttgagagcctaacagcctatatgattttgtgtaaattgatctctatacctcagcttcttcatctgcaaagtgagataattgtactattctactttcctcatagtgcggttataacagattatgataatattacaaagtacttaatacttggcatatagtatatatattagctattagtattttgcaatttggggatattgaaaattagaaattgcatgttagttcatgctgcactaccatattgttcttttggggctcttcaatgggtgaaattccattttacagtttatcatgtgcatctgtatcacaggagtattttggcaaaatgattctgtaccaaaaaggagtactataaaatgagggtgccaaatatattgagtcttttatgggattaaaagttctgttgcattccaaaaa

SEQ ID NO: 12585 - DNA, 2200 bp, Homo sapiens
aatgcttccgtcttggccaccttgcgagcgctcgggttgagtttcccgggcttccctgactcggctacctgttctggaggtcaggctttgggcccttgcagaggtcgccgaggggcccgcgccgccgccagagcctgggcccagtccccagtcttcagagacgccctcgaccttcctgctccgaggagctggcctgatgtcctcgggtcgcgctccgcaggttcttacttttccaaacctagagggcagtgcatgaagccaggggtcatcagccatgctccagacagtgtggttccagggcttgggcaggaacctgttgtttcaggagccagtaacctttgaggatgtggctgtgtacttcacccagaatgaatgggccagcctgcaccctacgcagagggccctatacagggaggtgatgctggagaattatgcaaatgtgacttccttgtcagcatttccattccccaaaccagatctgatattccagctggagcaaggagaagcagcatggggcccagatccctggacacttgctgggggagaggccctgagaggcatgtgcacaggctggagtgcaatggcgtgatcttcactcaccgcaacctctgccttccaggtggtaaaaccaagactgagaatgaggaaaaaactgcacagctaaacatttctaaagaatcagagtcccacagactgatagtggagggactgctgatggacgttccccagcaccctgacttcaaggacaggttagagaagtcacagctacatgatacagggaataaaacaaagataggggattgcacagatttgacagtccaggatcatgaatcttccaccactgaaagggaggagatagccaggaaattggaagaaagtagtgtcagcacacatctcattacaaagcagggttttgccaaagaacaggtgttttataaatgtggtgagtgtggcagttactacaacccacattcagactttcacctgcatcagagagttcacactaatgagaagccctacacatgcaaagaatgtgggaaaaccttcagatataactcaaaactgtcacggcatcagaaaatccacactggagagaaaccatactcatgtgaggaatgtggacaagccttcagtcaaaattcccaccttcttcagcatcagaagctccatggtggacagaggccctatgaatgtactgactgtggtaaaaccttcagttataattcaaaactgattcggcatcagagaatccatactggggagaagccctttaaatgtaaggaatgtgggaaagccttcagttgtagctatgactgcatcatccatgaacgaattcacaatggggagaagccctatgaatgtaaggagtgtgggaagagtttgagttctaattcagttctgattcagcatcagagaatccacactggggagaaaccttatgaatgtaaagagtgtggcaaggccttccaccgcagttcggtatttcttcagcaccagaggttccacactggggaacaactctacaaatgtaatgaatgttggaaaactttcagctgtagctcccgcttcatagtgcatcagagaatccacaatggggagaaaccctatgaatgccaggaatgtgggaagacattcagtcaaaagatcactctggttcagcatcagcgagttcacactggggagaaaccttatgagtgtaaggagtgcgggaaagccttcagatggaatgcaagtttcatccagcatcagaagtggcatactaggaagaaactcatcaatggaacagggctatccgcagttaagccctactgtccctgcgccatcctctctcctctgcctccccaacatacctgctctgccctagccccaccagggcctcccttatcttcttcacatgcagtggtacttcctccctctgtgcctttcttcctgctgcttccctcatctgaaaaggccaacccttcacctgtccaaatagcacatttttttcaggatctcgcttttcctgggaagtcatcccttcagagcccgaatcctttgtctcactccctgtaagccccgtcacgttctcaaaatcctttgcacctcaagttagggattccactggtctcctgattgtgtctattgatattcctctggtcttgtcttgtataagttgttactgttttcctaacttcattttaaattctcacgcttaagg

SEQ ID NO: 12586 - DNA, 4139 bp, Homo sapiens
aagaagaccccgttcttccgggaaaatggcgactcccgctcgtgccccggagtcaccgccgtccgcggatccggcgctagtagcggggcctgccgaggaagccgagtgcccgccgccgcgccagcctcagcccgcgcagaatgtgctcgctgccccgcggcttcgagccccaagctcccgaggacttggcgcagcggagtttggtggagctgcgggaaatgttgaagcgccaggagagacttttgcgcaacgaaaaattcatttgcaaattgcccgacaaaggtaaaaagatctttgactcttttgccaaactgaaagctgccattgcagaatgtgaagaagttagaagaaaaagtgaactgtttaaccctgttagtttagactgtaagctaaggcaaaaagcaattgcagaagttgatgtgggtacagataaggcccagaattctgacccgatacttgatacttcatcactagttcctggatgttcctctgtagataacatcaagtcatctcaaacctcacaaaaccagggacttggacgtcctactcttgaaggtgatgaagagacttcagaggttgagtacacagtgaataagggcccagcttccagcaatagagacagggtaccaccttcatctgaagctagtgagcatcacccgcggcatcgtgtttcaagtcaagcggaagatacttccagcagctttgacaacctgtttattgacaggttacagaggatcaccattgcggaccaaggtgaacaacagtcagaagaaaacgcaagtactaagaacttgacaggcctttccagtgggactgagaagaaacctcattacatggaagtgctagaaatgcgagccaaaaacccagtgccccagctgcgtaaatttaaaaccaatgtgttaccttttcgacaaaatgattcatctagtcattgccagaagagtgggtctcctatttcctcagaagagcggcggcgcagggataagcagcatcttgatgacatcacagcagctcggcttctaccacttcaccatatgcccacgcagctgctctccatagaagaatccttggcacttcagaaacagcagaaacagaattatgaggagatgcaagcaaagctcgcagcgcaaaaattagctgaaagactgaatattaaaatgcggagttataatccagaaggggagtcttcagggagataccgagaagtaagggatgaagatgacgattggtcctctgatgaattctgaagataatctcctaaatcactgacgttgagatgtcatcatcttacatcagactttctaactagtatcaagatcagtgtcagatattgttgagggaagtaattttataaagttacacaaaggtagttataaaaaaagcccagtttgtctttcagaaggtgactttcatgtgcttgaaaagtttaatatttgaatattgtgtttaaccacatggtattaaaattttgcaatatattgtgtattggtctgatattttagtatatagtagaacatactttttttttctttaagccaaatgaaaagaggtaactttgcttttttcctttttcttacctatcaaatagcatttattacatgtctttcagtgaaatacttagttgttccaggcacctaaaatcaattaggaagacatagttcccttcttttttgggtaatgaagggagcagtctaaagaattgtatgcatgtttgcatggggttattgagacattggatgtgaaatacctaggaagacatgtatggagaatgcttaacaaatgctcttctcctttttctgtcttcccttaggaagaacgttatctctcttctgattaggaaggacttcccttttgagtagatgctggaaagtggaggttttttttgttggtttgtttgtttggttttgtgtttttttttgagatggggtcttgctctgtcgcccaggctggagtgcagtggcaggatctcggctcactgcaatctaggtggaggtctttttaaataacctcatgttacttcaggcaaatctggtacaggagaagcccaagctaactgagctgggtgaaggcttgtgcatcacctggcttgagttccttgctgtcacagatgataggttcatgtacacaacattaatgtttgataaggaaagcattttttttttgttaaaattgaattgtcagtactttacttttttccccccaaataggtatatatagactgcagaagcttcagtcccatatataaacgttcatgtcattttagaggattatatggttgtctccagagaaattaacttacattatcaaaaaattctttgtctaatatattggagtctttaaaagtgttgaagaataaaatattaattagaacaacttcaaatgctaaggtgatgttttaccgggacttaattaaatacaactttttcctttcgaaaaagactgttcacatttgcttccaggtgtaattattgctttcattccttacccccctcaagcaaatgtgaaaagtatactgacctaagattctcattagttttagttcttaaaacgaatagtaaatgatttcacagcgtaaaatttgatgttatttctggaagctggatgatatggaagagttcatgtgcctggacacacagttccctgtaatcctgccatctagggagataaactctgttaacattttgatgttgtgtttttgcttatttttctatgcatagttatgcatttatattctcaaaaatgaaatcataatgtacattgctttgtagtctgctctatatattgtcaatatgttcccatattaaatattttgctttttagacagctgtaggatattttatttcatgggtataccataactttaagatttatttcctattcagcaatttgattatgtattataatgtaatctgtaaatagtgatatgattaacatcttaatcacatccatagaaaatgacttatttccagaagataccgctctaaaaatgaaattgttaggtgaaagtgtttttgagaatttttatatatattactcactgcagagatcatgttcatttacattcccattagcaatatatccaatgctcagaattgaaaattactacttaaaatctttgcaaattgaataattacagaaaagggctacatttaaaatttgtatttgtttttcttacttagtgaaggttgtgttttttttcatattcattggccatgctatattcattcttttgagaattgctcattcatattttttctgttgcttgcttggagaatttgctctttttttggcatataagttcttaagaatgtccgtcctttgtcatatattgtaactttttttagccttatttgtcatttaacatagtttgtggtatttcagtatagaagttgttttctttaggagtctacctttgtgtatgtgcttgaaagtatttttgtaatccaagaatggataaatgtccttattttcttctagtattttcttatttcacttttacacctatctttaaaaggaatttaaattttgtttatatacattaactaaatcagtacaagtttggggtgaaaaggaaatttttaatccatctcaaatgtatttggttatattatataaggtagggatttgattttatttcgaagaatttaccaattggttcagtatgtgaaaccaccatttcccctctgattagtaatgctatttttatagaatattaaattcttatgtgtcttttgtgtcttaggccaatttctgggccttctgggttttttctacactgtcaataattatcgctttaattggtgttaatatttggtagtacacaggttctcccttgttcttttaaattttgtgaaatataacttacaaataagtacttaaaacagagcttaatgggtaaagcaacagctgtgtaatcacaaactagatgcagaggaggtcttgccagcactccaaaatctctgtgtgtcccctcttgacactcactgtttcccccagagctaactatcctgacgtatggtaattctccctctgtccttttaagaattattttaccagttatgtgtataacaatatggtttacattttgctcacttttgacttatataaaaatagaataatactaaaaaaaaaaaaaaaaa

SEQ ID NO: 12587 - DNA, 14069 bp, Homo sapiens
cgttaaatgcaaacgctgctctggctcatgtgtttgctccgaggtataggttttgttcgactgacgtatcagatagtcagagtggttaccacaccgacgttgtagcagctgcataataaatgactgaaagaatcatgttaggcatgcccacctaacctaacttgaatcatgcgaaaggggagctgttggaattcaaatagactttctggttcccagcagtcggcagtaatagaatgctttcaggaagatgacagaatcaggagaaagatgctgttttgcactatcttgatttgttacagcagccaacttattggcatgatggagtgacaggaaaaacagctggcatggaagatgaaagagaagatgttcaaaagaaaacattcacaaaatgggtaaatgcacaattttctaagtttgggaagcagcatattgagaacctcttcagtgacctacaggatgggaggcgcctcctagacctcctcgaaggcctgacagggcaaaaactgccaaaagaaaaaggatccacaagagttcatgccctgaacaatgtcaacaaggcactgcgggttttgcagaacaataatgttgatttagtgaatattggaagtactgacatcgtagatggaaatcataaactgactcttggtttgatttggaatataatcctccactggcaggtcaaaaatgtaatgaaaaatatcatggctggattgcaacaaaccaacagtgaaaagattctcctgagctgggtccgacaatcaactcgtaattatccacaggttaatgtaatcaacttcaccaccagctggtctgatggcctggctttgaatgctctcatccatagtcataggccagacctatttgactggaatagtgtggtttgccagcagtcagccacacaacgactggaacatgcattcaacatcgccagatatcaattaggcatagagaaactactcgatcctgaagatgttgataccacctatccagataagaagtccatcttaatgtacatcacatcactcttccaagttttgcctcaacaagtgagcattgaagccatccaggaagtggaaatgttgccaaggccacctaaagtgactaaagaagaacattttcagttacatcatcaaatgcactattctcaacagatcacggtcagtctagcacagggatatgagagaacttcttcccctaagcctcgattcaagagctatgcctacacacaggctgcttatgtcaccacctctgaccctacacggagcccatttccttcacagcatttggaagctcctgaagacaagtcatttggcagttcattgatggagagtgaagtaaacctggaccgttatcaaacagctttagaagaagtattatcgtggcttctttctgctgaggacacattgcaagcacaaggagagatttctaatgatgtggaagtggtgaaagaccagtttcatactcatgaggggtacatgatggatttgacagcccatcagggccgggttggtaatattctacaattgggaagtaagctgattggaacaggaaaattatcagaagatgaagaaactgaagtacaagagcagatgaatctcctaaattcaagatgggaatgcctcagggtagctagcatggaaaaacaaagcaatttacatagagttttaatggatctccagaatcagaaactgaaagagttgaatgactggctaacaaaaacagaagaaagaacaaggaaaatggaggaagagcctcttggacctgatcttgaagacctaaaacgccaagtacaacaacataaggtgcttcaagaagatctagaacaagaacaagtcagggtcaattctctcactcacatggtggtggtagttgatgaatctagtggagatcacgcaactgctgctttggaagaacaacttaaggtattgggagatcgatgggcaaacatctgtagatggacagaagaccgctgggttcttttacaagacatccttctcaaatggcaacgtcttactgaagaacagtgcctttttagtgcatggctttcagaaaaagaagatgcagtgaacaagattcacacaactggctttaaagatcaaaatgaaatgttatcaagtcttcaaaaactggccgttttaaaagcggatctagaaaagaaaaagcaatccatgggcaaactgtattcactcaaacaagatcttctttcaacactgaagaataagtcagtgacccagaagacggaagcatggctggataactttgcccggtgttgggataatttagtccaaaaacttgaaaagagtacagcacagatttcacaggctgtcaccaccactcagccatcactaacacagacaactgtaatggaaacagtaactacggtgaccacaagggaacagatcctggtaaagcatgctcaagaggaacttccaccaccacctccccaaaagaagaggcagattactgtggattctgaaattaggaaaaggttggatgttgatataactgaacttcacagctggattactcgctcagaagctgtgttgcagagtcctgaatttgcaatctttcggaaggaaggcaacttctcagacttaaaagaaaaagtcaatgccatagagcgagaaaaagctgagaagttcagaaaactgcaagatgccagcagatcagctcaggccctggtggaacagatggtgaatgagggtgttaatgcagatagcatcaaacaagcctcagaacaactgaacagccggtggatcgaattctgccagttgctaagtgagagacttaactggctggagtatcagaacaacatcatcgctttctataatcagctacaacaattggagcagatgacaactactgctgaaaactggttgaaaatccaacccaccaccccatcagagccaacagcaattaaaagtcagttaaaaatttgtaaggatgaagtcaaccggctatcaggtcttcaacctcaaattgaacgattaaaaattcaaagcatagccctgaaagagaaaggacaaggacccatgttcctggatgcagactttgtggcctttacaaatcattttaagcaagtcttttctgatgtgcaggccagagagaaagagctacagacaatttttgacactttgccaccaatgcgctatcaggagaccatgagtgccatcaggacatgggtccagcagtcagaaaccaaactctccatacctcaacttagtgtcaccgactatgaaatcatggagcagagactcggggaattgcaggctttacaaagttctctgcaagagcaacaaagtggcctatactatctcagcaccactgtgaaagagatgtcgaagaaagcgccctctgaaattagccggaaatatcaatcagaatttgaagaaattgagggacgctggaagaagctctcctcccagctggttgagcattgtcaaaagctagaggagcaaatgaataaactccgaaaaattcagaatcacatacaaaccctgaagaaatggatggctgaagttgatgtttttctgaaggaggaatggcctgcccttggggattcagaaattctaaaaaagcagctgaaacagtgcagacttttagtcagtgatattcagacaattcagcccagtctaaacagtgtcaatgaaggtgggcagaagataaagaatgaagcagagccagagtttgcttcgagacttgagacagaactcaaagaacttaacactcagtgggatcacatgtgccaacaggtctatgccagaaaggaggccttgaagggaggtttggagaaaactgtaagcctccagaaagatctatcagagatgcacgaatggatgacacaagctgaagaagagtatcttgagagagattttgaatataaaactccagatgaattacagaaagcagttgaagagatgaagagagctaaagaagaggcccaacaaaaagaagcgaaagtgaaactccttactgagtctgtaaatagtgtcatagctcaagctccacctgtagcacaagaggccttaaaaaaggaacttgaaactctaaccaccaactaccagtggctctgcactaggctgaatgggaaatgcaagactttggaagaagtttgggcatgttggcatgagttattgtcatacttggagaaagcaaacaagtggctaaatgaagtagaatttaaacttaaaaccactgaaaacattcctggcggagctgaggaaatctctgaggtgctagattcacttgaaaatttgatgcgacattcagaggataacccaaatcagattcgcatattggcacagaccctaacagatggcggagtcatggatgagctaatcaatgaggaacttgagacatttaattctcgttggagggaactacatgaagaggctgtaaggaggcaaaagttgcttgaacagagcatccagtctgcccaggagactgaaaaatccttacacttaatccaggagtccctcacattcattgacaagcagttggcagcttatattgcagacaaggtggacgcagctcaaatgcctcaggaagcccagaaaatccaatctgatttgacaagtcatgagatcagtttagaagaaatgaagaaacataatcaggggaaggaggctgcccaaagagtcctgtctcagattgatgttgcacagaaaaaattacaagatgtctccatgaagtttcgattattccagaaaccagccaattttgagcagcgtctacaagaaagtaagatgattttagatgaagtgaagatgcacttgcctgcattggaaacaaagagtgtggaacaggaagtagtacagtcacagctaaatcattgtgtgaacttgtataaaagtctgagtgaagtgaagtctgaagtggaaatggtgataaagactggacgtcagattgtacagaaaaagcagacggaaaatcccaaagaacttgatgaaagagtaacagctttgaaattgcattataatgagctgggagcaaaggtaacagaaagaaagcaacagttggagaaatgcttgaaattgtcccgtaagatgcgaaaggaaatgaatgtcttgacagaatggctggcagctacagatatggaattgacaaagagatcagcagttgaaggaatgcctagtaatttggattctgaagttgcctggggaaaggctactcaaaaagagattgagaaacagaaggtgcacctgaagagtatcacagaggtaggagaggccttgaaaacagttttgggcaagaaggagacgttggtggaagataaactcagtcttctgaatagtaactggatagctgtcacctcccgagcagaagagtggttaaatcttttgttggaataccagaaacacatggaaacttttgaccagaatgtggaccacatcacaaagtggatcattcaggctgacacacttttggatgaatcagagaaaaagaaaccccagcaaaaagaagacgtgcttaagcgtttaaaggcagaactgaatgacatacgcccaaaggtggactctacacgtgaccaagcagcaaacttgatggcaaaccgcggtgaccactgcaggaaattagtagagccccaaatctcagagctcaaccatcgatttgcagccatttcacacagaattaagactggaaaggcctccattcctttgaaggaattggagcagtttaactcagatatacaaaaattgcttgaaccactggaggctgaaattcagcagggggtgaatctgaaagaggaagacttcaataaagatatgaatgaagacaatgagggtactgtaaaagaattgttgcaaagaggagacaacttacaacaaagaatcacagatgagagaaagcgagaggaaataaagataaaacagcagctgttacagacaaaacataatgctctcaaggatttgaggtctcaaagaagaaaaaaggctctagaaatttctcatcagtggtatcagtacaagaggcaggctgatgatctcctgaaatgcttggatgacattgaaaaaaaattagccagcctacctgagcccagagatgaaaggaaaataaaggaaattgatcgggaattgcagaagaagaaagaggagctgaatgcagtgcgtaggcaagctgagggcttgtctgaggatggggccgcaatggcagtggagccaactcagatccagctcagcaagcgctggcgggaaattgagagcaaatttgctcagtttcgaagactcaactttgcacaaattcacactgtccgtgaagaaacgatgatggtgatgactgaagacatgcctttggaaatttcttatgtgccttctacttatttgactgaaatcactcatgtctcacaagccctattagaagtggaacaacttctcaatgctcctgacctctgtgctaaggactttgaagatctctttaagcaagaggagtctctgaagaatataaaagatagtctacaacaaagctcaggtcggattgacattattcatagcaagaagacagcagcattgcaaagtgcaacgcctgtggaaagggtgaagctacaggaagctctctcccagcttgatttccaatgggaaaaagttaacaaaatgtacaaggaccgacaagggcgatttgacagatctgttgagaaatggcggcgttttcattatgatataaagatatttaatcagtggctaacagaagctgaacagtttctcagaaagacacaaattcctgagaattgggaacatgctaaatacaaatggtatcttaaggaactccaggatggcattgggcagcggcaaactgttgtcagaacattgaatgcaactggggaagaaataattcagcaatcctcaaaaacagatgccagtattctacaggaaaaattgggaagcctgaatctgcggtggcaggaggtctgcaaacagctgtcagacagaaaaaagaggctagaagaacaaaagaatatcttgtcagaatttcaaagagatttaaatgaatttgttttatggttggaggaagcagataacattgctagtatcccacttgaacctggaaaagagcagcaactaaaagaaaagcttgagcaagtcaagttactggtggaagagttgcccctgcgccagggaattctcaaacaattaaatgaaactggaggacccgtgcttgtaagtgctcccataagcccagaagagcaagataaacttgaaaataagctcaagcagacaaatctccagtggataaaggtttccagagctttacctgagaaacaaggagaaattgaagctcaaataaaagaccttgggcagcttgaaaaaaagcttgaagaccttgaagagcagttaaatcatctgctgctgtggttatctcctattaggaatcagttggaaatttataaccaaccaaaccaagaaggaccatttgacgttcaggaaactgaaatagcagttcaagctaaacaaccggatgtggaagagattttgtctaaagggcagcatttgtacaaggaaaaaccagccactcagccagtgaagaggaagttagaagatctgagctctgagtggaaggcggtaaaccgtttacttcaagagctgagggcaaagcagcctgacctagctcctggactgaccactattggagcctctcctactcagactgttactctggtgacacaacctgtggttactaaggaaactgccatctccaaactagaaatgccatcttccttgatgttggaggtacctgctctggcagatttcaaccgggcttggacagaacttaccgactggctttctctgcttgatcaagttataaaatcacagagggtgatggtgggtgaccttgaggatatcaacgagatgatcatcaagcagaaggcaacaatgcaggatttggaacagaggcgtccccagttggaagaactcattaccgctgcccaaaatttgaaaaacaagaccagcaatcaagaggctagaacaatcattacggatcgaattgaaagaattcagaatcagtgggatgaagtacaagaacaccttcagaaccggaggcaacagttgaatgaaatgttaaaggattcaacacaatggctggaagctaaggaagaagctgagcaggtcttaggacaggccagagccaagcttgagtcatggaaggagggtccctatacagtagatgcaatccaaaagaaaatcacagaaaccaagcagttggccaaagacctccgccagtggcagacaaatgtagatgtggcaaatgacttggccctgaaacttctccgggattattctgcagatgataccagaaaagtccacatgataacagagaatatcaatgcctcttggagaagcattcataaaagggtgagtgagcgagaggctgctttggaagaaactcatagattactgcaacagttccccctggacctggaaaagtttcttgcctggcttacagaagctgaaacaactgccaatgtcctacaggatgctacccgtaaggaaaggctcctagaagactccaagggagtaaaagagctgatgaaacaatggcaagacctccaaggtgaaattgaagctcacacagatgtttatcacaacctggatgaaaacagccaaaaaatcctgagatccctggaaggttccgatgatgcagtcctgttacaaagacgtttggataacatgaacttcaagtggagtgaacttcggaaaaagtctctcaacattaggtcccatttggaagccagttctgaccagtggaagcgtctgcacctttctctgcaggaacttctggtgtggctacagctgaaagatgatgaattaagccggcaggcacctattggaggcgactttccagcagttcagaagcagaacgatgtacatagggccttcaagagggaattgaaaactaaagaacctgtaatcatgagtactcttgagactgtacgaatatttctgacagagcagcctttggaaggactagagaaactctaccaggagcccagagagctgcctcctgaggagagagcccagaatgtcactcggcttctacgaaagcaggctgaggaggtcaatactgagtgggaaaaattgaacctgcactccgctgactggcagagaaaaatagatgagacccttgaaagactccaggaacttcaagaggccacggatgagctggacctcaagctgcgccaagctgaggtgatcaagggatcctggcagcccgtgggcgatctcctcattgactctctccaagatcacctcgagaaagtcaaggcacttcgaggagaaattgcgcctctgaaagagaacgtgagccacgtcaatgaccttgctcgccagcttaccactttgggcattcagctctcaccgtataacctcagcactctggaagacctgaacaccagatggaagcttctgcaggtggccgtcgaggaccgagtcaggcagctgcatgaagcccacagggactttggtccagcatctcagcactttctttccacgtctgtccagggtccctgggagagagccatctcgccaaacaaagtgccctactatatcaaccacgagactcaaacaacttgctgggaccatcccaaaatgacagagctctaccagtctttagctgacctgaataatgtcagattctcagcttataggactgccatgaaactccgaagactgcagaaggccctttgcttggatctcttgagcctgtcagctgcatgtgatgccttggaccagcacaacctcaagcaaaatgaccagcccatggatatcctgcagattattaattgtttgaccactatttatgaccgcctggagcaagagcacaacaatttggtcaacgtccctctctgcgtggatatgtgtctgaactggctgctgaatgtttatgatacgggacgaacagggaggatccgtgtcctgtcttttaaaactggcatcatttccctgtgtaaagcacatttggaagacaagtacagataccttttcaagcaagtggcaagttcaacaggattttgtgaccagcgcaggctgggcctccttctgcatgattctatccaaattccaagacagttgggtgaagttgcatcctttgggggcagtaacattgagccaagtgtccggagctgcttccaatttgctaataataagccagagatcgaagcggccctcttcctagactggatgagactggaaccccagtccatggtgtggctgcccgtcctgcacagagtggctgctgcagaaactgccaagcatcaggccaaatgtaacatctgcaaagagtgtccaatcattggattcaggtacaggagtctaaagcactttaattatgacatctgccaaagctgctttttttctggtcgagttgcaaaaggccataaaatgcactatcccatggtggaatattgcactccgactacatcaggagaagatgttcgagactttgccaaggtactaaaaaacaaatttcgaaccaaaaggtattttgcgaagcatccccgaatgggctacctgccagtgcagactgtcttagagggggacaacatggaaactcccgttactctgatcaacttctggccagtagattctgcgcctgcctcgtcccctcagctttcacacgatgatactcattcacgcattgaacattatgctagcaggctagcagaaatggaaaacagcaatggatcttatctaaatgatagcatctctcctaatgagagcatagatgatgaacatttgttaatccagcattactgccaaagtttgaaccaggactcccccctgagccagcctcgtagtcctgcccagatcttgatttccttagagagtgaggaaagaggggagctagagagaatcctagcagatcttgaggaagaaaacaggaatctgcaagcagaatatgaccgtctaaagcagcagcacgaacataaaggcctgtccccactgccgtcccctcctgaaatgatgcccacctctccccagagtccccgggatgctgagctcattgctgaggccaagctactgcgtcaacacaaaggccgcctggaagccaggatgcaaatcctggaagaccacaataaacagctggagtcacagttacacaggctaaggcagctgctggagcaaccccaggcagaggccaaagtgaatggcacaacggtgtcctctccttctacctctctacagaggtccgacagcagtcagcctatgctgctccgagtggttggcagtcaaacttcggactccatgggtgaggaagatcttctcagtcctccccaggacacaagcacagggttagaggaggtgatggagcaactcaacaactccttccctagttcaagaggaagaaatacccctggaaagccaatgagagaggacacaatgtaggaagtcttttccacatggcagatgatttgggcagagcgatggagtccttagtatcagtcatgacagatgaagaaggagcagaataaatgttttacaactcctgattcccgcatggtttttataatattcatacaacaaagaggattagacagtaagagtttacaagaaataaatctatatttttgtgaagggtagtggtattatactgtagatttcagtagtttctaagtctgttattgttttgttaacaatggcaggttttacacgtctatgcaattgtacaaaaaagttataagaaaactacatgtaaaatcttgatagctaaataacttgccatttctttatatggaacgcattttgggttgtttaaaaatttataacagttataaagaaagattgtaaactaaagtgtgctttataaaaaaaagttgtttataaaaacccctaaaaacaaaacaaacacacacacacacacatacacacacacacacaaaactttgaggcagcgcattgttttgcatccttttggcgtgatatccatatgaaattcatggctttttctttttttgcatattaaagataagacttcctctaccaccacaccaaatgactactacacactgctcatttgagaactgtcagctgagtggggcaggcttgagttttcatttcatatatctatatgtctataagtatataaatactatagttatatagataaagagatacgaatttctatagactgactttttccattttttaaatgttcatgtcacatcctaatagaaagaaattacttctagtcagtcatccaggcttacctgcttggtctagaatggatttttcccggagccggaagccaggaggaaactacaccacactaaaacattgtctacagctccagatgtttctcattttaaacaactttccactgacaacgaaagtaaagtaaagtattggatttttttaaagggaacatgtgaatgaatacacaggacttattatatcagagtgagtaatcggttggttggttgattgattgattgattgatacattcagcttcctgctgctagcaatgccacgatttagatttaatgatgcttcagtggaaatcaatcagaaggtattctgaccttgtgaacatcagaaggtattttttaactcccaagcagtagcaggacgatgatagggctggagggctatggattcccagcccatccctgtgaaggagtaggccactctttaagtgaaggattggatgattgttcataatacataaagttctctgtaattacaactaaattattatgccctcttctcacagtcaaaaggaactgggtggtttggtttttgttgcttttttagatttattgtcccatgtgggatgagtttttaaatgccacaagacataatttaaaataaataaactttgggaaaaggtgtaagacagtagccccatcacatttgtgatactgacaggtatcaacccagaagcccatgaactgtgtttccatcctttgcatttctctgcgagtagttccacacaggtttgtaagtaagtaagaaagaaggcaaattgattcaaatgttacaaaaaaacccttcttggtggattagacaggttaaatatataaacaaacaaacaaaaattgctcaaaaaagaggagaaaagctcaagaggaaaagctaaggactggtaggaaaaagctttactctttcatgccattttatttctttttgatttttaaatcattcattcaatagataccaccgtgtgacctataattttgcaaatctgttacctctgacatcaagtgtaattagcttttggagagtgggctgacatcaagtgtaattagcttttggagagtgggttttgtccattattaataattaattaattaacatcaaacacggcttctcatgctatttctacctcactttggttttggggtgttcctgataattgtgcacacctgagttcacagcttcaccacttgtccattgcgttattttctttttcctttataattctttctttttccttcataattttcaaaagaaaacccaaagctctaaggtaacaaattaccaaattacatgaagatttggtttttgtcttgcatttttttcctttatgtgacgctggaccttttctttacccaaggatttttaaaactcagatttaaaacaaggggttactttacatcctactaagaagtttaagtaagtaagtttcattctaaaatcagaggtaaatagagtgcataaataattttgttttaatctttttgtttttcttttagacacattagctctggagtgagtctgtcataatatttgaacaaaaattgagagctttattgctgcattttaagcataattaatttggacattatttcgtgttgtgttctttataaccaccgagtattaaactgtaaatcataatgtaactgaagcataaacatcacatggcatgttttgtcattgttttcaggtactgagttcttacttgagtatcataatatattgtgttttaacaccaacactgtaacatttacgaattatttttttaaacttcagttttactgcattttcacaacatatcagacttcaccaaatatatgccttactattgtattatagtactgctttactgtgtatctcaataaagcacgcagttatgttac

SEQ ID NO: 12588 - DNA, 14000 bp, Homo sapiens
atgctgtctgtgaagctgaatctgtgagaacacctcactattcacggcaaccggagtggaagaaacaggtgcaaaaagattgtgtgtttgtctgcttttgtgaggctggtcagagattctgtgcctgctttatctgtgcttggctatgactctacctccaggtttaccataccccatagaatgtgtaagagaaaagtaccaacagggaaatcagcaaaaagctttcctatgaaggtgtgtagccagcctccgcagaatttgaaatgtctgaggtttcttctgatgaaagagaagatgttcaaaagaaaacattcacaaaatgggtaaatgcacaattttctaagtttgggaagcagcatattgagaacctcttcagtgacctacaggatgggaggcgcctcctagacctcctcgaaggcctgacagggcaaaaactgccaaaagaaaaaggatccacaagagttcatgccctgaacaatgtcaacaaggcactgcgggttttgcagaacaataatgttgatttagtgaatattggaagtactgacatcgtagatggaaatcataaactgactcttggtttgatttggaatataatcctccactggcaggtcaaaaatgtaatgaaaaatatcatggctggattgcaacaaaccaacagtgaaaagattctcctgagctgggtccgacaatcaactcgtaattatccacaggttaatgtaatcaacttcaccaccagctggtctgatggcctggctttgaatgctctcatccatagtcataggccagacctatttgactggaatagtgtggtttgccagcagtcagccacacaacgactggaacatgcattcaacatcgccagatatcaattaggcatagagaaactactcgatcctgaagatgttgataccacctatccagataagaagtccatcttaatgtacatcacatcactcttccaagttttgcctcaacaagtgagcattgaagccatccaggaagtggaaatgttgccaaggccacctaaagtgactaaagaagaacattttcagttacatcatcaaatgcactattctcaacagatcacggtcagtctagcacagggatatgagagaacttcttcccctaagcctcgattcaagagctatgcctacacacaggctgcttatgtcaccacctctgaccctacacggagcccatttccttcacagcatttggaagctcctgaagacaagtcatttggcagttcattgatggagagtgaagtaaacctggaccgttatcaaacagctttagaagaagtattatcgtggcttctttctgctgaggacacattgcaagcacaaggagagatttctaatgatgtggaagtggtgaaagaccagtttcatactcatgaggggtacatgatggatttgacagcccatcagggccgggttggtaatattctacaattgggaagtaagctgattggaacaggaaaattatcagaagatgaagaaactgaagtacaagagcagatgaatctcctaaattcaagatgggaatgcctcagggtagctagcatggaaaaacaaagcaatttacatagagttttaatggatctccagaatcagaaactgaaagagttgaatgactggctaacaaaaacagaagaaagaacaaggaaaatggaggaagagcctcttggacctgatcttgaagacctaaaacgccaagtacaacaacataaggtgcttcaagaagatctagaacaagaacaagtcagggtcaattctctcactcacatggtggtggtagttgatgaatctagtggagatcacgcaactgctgctttggaagaacaacttaaggtattgggagatcgatgggcaaacatctgtagatggacagaagaccgctgggttcttttacaagacatccttctcaaatggcaacgtcttactgaagaacagtgcctttttagtgcatggctttcagaaaaagaagatgcagtgaacaagattcacacaactggctttaaagatcaaaatgaaatgttatcaagtcttcaaaaactggccgttttaaaagcggatctagaaaagaaaaagcaatccatgggcaaactgtattcactcaaacaagatcttctttcaacactgaagaataagtcagtgacccagaagacggaagcatggctggataactttgcccggtgttgggataatttagtccaaaaacttgaaaagagtacagcacagatttcacaggctgtcaccaccactcagccatcactaacacagacaactgtaatggaaacagtaactacggtgaccacaagggaacagatcctggtaaagcatgctcaagaggaacttccaccaccacctccccaaaagaagaggcagattactgtggattctgaaattaggaaaaggttggatgttgatataactgaacttcacagctggattactcgctcagaagctgtgttgcagagtcctgaatttgcaatctttcggaaggaaggcaacttctcagacttaaaagaaaaagtcaatgccatagagcgagaaaaagctgagaagttcagaaaactgcaagatgccagcagatcagctcaggccctggtggaacagatggtgaatgagggtgttaatgcagatagcatcaaacaagcctcagaacaactgaacagccggtggatcgaattctgccagttgctaagtgagagacttaactggctggagtatcagaacaacatcatcgctttctataatcagctacaacaattggagcagatgacaactactgctgaaaactggttgaaaatccaacccaccaccccatcagagccaacagcaattaaaagtcagttaaaaatttgtaaggatgaagtcaaccggctatcaggtcttcaacctcaaattgaacgattaaaaattcaaagcatagccctgaaagagaaaggacaaggacccatgttcctggatgcagactttgtggcctttacaaatcattttaagcaagtcttttctgatgtgcaggccagagagaaagagctacagacaatttttgacactttgccaccaatgcgctatcaggagaccatgagtgccatcaggacatgggtccagcagtcagaaaccaaactctccatacctcaacttagtgtcaccgactatgaaatcatggagcagagactcggggaattgcaggctttacaaagttctctgcaagagcaacaaagtggcctatactatctcagcaccactgtgaaagagatgtcgaagaaagcgccctctgaaattagccggaaatatcaatcagaatttgaagaaattgagggacgctggaagaagctctcctcccagctggttgagcattgtcaaaagctagaggagcaaatgaataaactccgaaaaattcagaatcacatacaaaccctgaagaaatggatggctgaagttgatgtttttctgaaggaggaatggcctgcccttggggattcagaaattctaaaaaagcagctgaaacagtgcagacttttagtcagtgatattcagacaattcagcccagtctaaacagtgtcaatgaaggtgggcagaagataaagaatgaagcagagccagagtttgcttcgagacttgagacagaactcaaagaacttaacactcagtgggatcacatgtgccaacaggtctatgccagaaaggaggccttgaagggaggtttggagaaaactgtaagcctccagaaagatctatcagagatgcacgaatggatgacacaagctgaagaagagtatcttgagagagattttgaatataaaactccagatgaattacagaaagcagttgaagagatgaagagagctaaagaagaggcccaacaaaaagaagcgaaagtgaaactccttactgagtctgtaaatagtgtcatagctcaagctccacctgtagcacaagaggccttaaaaaaggaacttgaaactctaaccaccaactaccagtggctctgcactaggctgaatgggaaatgcaagactttggaagaagtttgggcatgttggcatgagttattgtcatacttggagaaagcaaacaagtggctaaatgaagtagaatttaaacttaaaaccactgaaaacattcctggcggagctgaggaaatctctgaggtgctagattcacttgaaaatttgatgcgacattcagaggataacccaaatcagattcgcatattggcacagaccctaacagatggcggagtcatggatgagctaatcaatgaggaacttgagacatttaattctcgttggagggaactacatgaagaggctgtaaggaggcaaaagttgcttgaacagagcatccagtctgcccaggagactgaaaaatccttacacttaatccaggagtccctcacattcattgacaagcagttggcagcttatattgcagacaaggtggacgcagctcaaatgcctcaggaagcccagaaaatccaatctgatttgacaagtcatgagatcagtttagaagaaatgaagaaacataatcaggggaaggaggctgcccaaagagtcctgtctcagattgatgttgcacagaaaaaattacaagatgtctccatgaagtttcgattattccagaaaccagccaattttgagcagcgtctacaagaaagtaagatgattttagatgaagtgaagatgcacttgcctgcattggaaacaaagagtgtggaacaggaagtagtacagtcacagctaaatcattgtgtgaacttgtataaaagtctgagtgaagtgaagtctgaagtggaaatggtgataaagactggacgtcagattgtacagaaaaagcagacggaaaatcccaaagaacttgatgaaagagtaacagctttgaaattgcattataatgagctgggagcaaaggtaacagaaagaaagcaacagttggagaaatgcttgaaattgtcccgtaagatgcgaaaggaaatgaatgtcttgacagaatggctggcagctacagatatggaattgacaaagagatcagcagttgaaggaatgcctagtaatttggattctgaagttgcctggggaaaggctactcaaaaagagattgagaaacagaaggtgcacctgaagagtatcacagaggtaggagaggccttgaaaacagttttgggcaagaaggagacgttggtggaagataaactcagtcttctgaatagtaactggatagctgtcacctcccgagcagaagagtggttaaatcttttgttggaataccagaaacacatggaaacttttgaccagaatgtggaccacatcacaaagtggatcattcaggctgacacacttttggatgaatcagagaaaaagaaaccccagcaaaaagaagacgtgcttaagcgtttaaaggcagaactgaatgacatacgcccaaaggtggactctacacgtgaccaagcagcaaacttgatggcaaaccgcggtgaccactgcaggaaattagtagagccccaaatctcagagctcaaccatcgatttgcagccatttcacacagaattaagactggaaaggcctccattcctttgaaggaattggagcagtttaactcagatatacaaaaattgcttgaaccactggaggctgaaattcagcagggggtgaatctgaaagaggaagacttcaataaagatatgaatgaagacaatgagggtactgtaaaagaattgttgcaaagaggagacaacttacaacaaagaatcacagatgagagaaagcgagaggaaataaagataaaacagcagctgttacagacaaaacataatgctctcaaggatttgaggtctcaaagaagaaaaaaggctctagaaatttctcatcagtggtatcagtacaagaggcaggctgatgatctcctgaaatgcttggatgacattgaaaaaaaattagccagcctacctgagcccagagatgaaaggaaaataaaggaaattgatcgggaattgcagaagaagaaagaggagctgaatgcagtgcgtaggcaagctgagggcttgtctgaggatggggccgcaatggcagtggagccaactcagatccagctcagcaagcgctggcgggaaattgagagcaaatttgctcagtttcgaagactcaactttgcacaaattcacactgtccgtgaagaaacgatgatggtgatgactgaagacatgcctttggaaatttcttatgtgccttctacttatttgactgaaatcactcatgtctcacaagccctattagaagtggaacaacttctcaatgctcctgacctctgtgctaaggactttgaagatctctttaagcaagaggagtctctgaagaatataaaagatagtctacaacaaagctcaggtcggattgacattattcatagcaagaagacagcagcattgcaaagtgcaacgcctgtggaaagggtgaagctacaggaagctctctcccagcttgatttccaatgggaaaaagttaacaaaatgtacaaggaccgacaagggcgatttgacagatctgttgagaaatggcggcgttttcattatgatataaagatatttaatcagtggctaacagaagctgaacagtttctcagaaagacacaaattcctgagaattgggaacatgctaaatacaaatggtatcttaaggaactccaggatggcattgggcagcggcaaactgttgtcagaacattgaatgcaactggggaagaaataattcagcaatcctcaaaaacagatgccagtattctacaggaaaaattgggaagcctgaatctgcggtggcaggaggtctgcaaacagctgtcagacagaaaaaagaggctagaagaacaaaagaatatcttgtcagaatttcaaagagatttaaatgaatttgttttatggttggaggaagcagataacattgctagtatcccacttgaacctggaaaagagcagcaactaaaagaaaagcttgagcaagtcaagttactggtggaagagttgcccctgcgccagggaattctcaaacaattaaatgaaactggaggacccgtgcttgtaagtgctcccataagcccagaagagcaagataaacttgaaaataagctcaagcagacaaatctccagtggataaaggtttccagagctttacctgagaaacaaggagaaattgaagctcaaataaaagaccttgggcagcttgaaaaaaagcttgaagaccttgaagagcagttaaatcatctgctgctgtggttatctcctattaggaatcagttggaaatttataaccaaccaaaccaagaaggaccatttgacgttcaggaaactgaaatagcagttcaagctaaacaaccggatgtggaagagattttgtctaaagggcagcatttgtacaaggaaaaaccagccactcagccagtgaagaggaagttagaagatctgagctctgagtggaaggcggtaaaccgtttacttcaagagctgagggcaaagcagcctgacctagctcctggactgaccactattggagcctctcctactcagactgttactctggtgacacaacctgtggttactaaggaaactgccatctccaaactagaaatgccatcttccttgatgttggaggtacctgctctggcagatttcaaccgggcttggacagaacttaccgactggctttctctgcttgatcaagttataaaatcacagagggtgatggtgggtgaccttgaggatatcaacgagatgatcatcaagcagaaggcaacaatgcaggatttggaacagaggcgtccccagttggaagaactcattaccgctgcccaaaatttgaaaaacaagaccagcaatcaagaggctagaacaatcattacggatcgaattgaaagaattcagaatcagtgggatgaagtacaagaacaccttcagaaccggaggcaacagttgaatgaaatgttaaaggattcaacacaatggctggaagctaaggaagaagctgagcaggtcttaggacaggccagagccaagcttgagtcatggaaggagggtccctatacagtagatgcaatccaaaagaaaatcacagaaaccaagcagttggccaaagacctccgccagtggcagacaaatgtagatgtggcaaatgacttggccctgaaacttctccgggattattctgcagatgataccagaaaagtccacatgataacagagaatatcaatgcctcttggagaagcattcataaaagggtgagtgagcgagaggctgctttggaagaaactcatagattactgcaacagttccccctggacctggaaaagtttcttgcctggcttacagaagctgaaacaactgccaatgtcctacaggatgctacccgtaaggaaaggctcctagaagactccaagggagtaaaagagctgatgaaacaatggcaagacctccaaggtgaaattgaagctcacacagatgtttatcacaacctggatgaaaacagccaaaaaatcctgagatccctggaaggttccgatgatgcagtcctgttacaaagacgtttggataacatgaacttcaagtggagtgaacttcggaaaaagtctctcaacattaggtcccatttggaagccagttctgaccagtggaagcgtctgcacctttctctgcaggaacttctggtgtggctacagctgaaagatgatgaattaagccggcaggcacctattggaggcgactttccagcagttcagaagcagaacgatgtacatagggccttcaagagggaattgaaaactaaagaacctgtaatcatgagtactcttgagactgtacgaatatttctgacagagcagcctttggaaggactagagaaactctaccaggagcccagagagctgcctcctgaggagagagcccagaatgtcactcggcttctacgaaagcaggctgaggaggtcaatactgagtgggaaaaattgaacctgcactccgctgactggcagagaaaaatagatgagacccttgaaagactccaggaacttcaagaggccacggatgagctggacctcaagctgcgccaagctgaggtgatcaagggatcctggcagcccgtgggcgatctcctcattgactctctccaagatcacctcgagaaagtcaaggcacttcgaggagaaattgcgcctctgaaagagaacgtgagccacgtcaatgaccttgctcgccagcttaccactttgggcattcagctctcaccgtataacctcagcactctggaagacctgaacaccagatggaagcttctgcaggtggccgtcgaggaccgagtcaggcagctgcatgaagcccacagggactttggtccagcatctcagcactttctttccacgtctgtccagggtccctgggagagagccatctcgccaaacaaagtgccctactatatcaaccacgagactcaaacaacttgctgggaccatcccaaaatgacagagctctaccagtctttagctgacctgaataatgtcagattctcagcttataggactgccatgaaactccgaagactgcagaaggccctttgcttggatctcttgagcctgtcagctgcatgtgatgccttggaccagcacaacctcaagcaaaatgaccagcccatggatatcctgcagattattaattgtttgaccactatttatgaccgcctggagcaagagcacaacaatttggtcaacgtccctctctgcgtggatatgtgtctgaactggctgctgaatgtttatgatacgggacgaacagggaggatccgtgtcctgtcttttaaaactggcatcatttccctgtgtaaagcacatttggaagacaagtacagataccttttcaagcaagtggcaagttcaacaggattttgtgaccagcgcaggctgggcctccttctgcatgattctatccaaattccaagacagttgggtgaagttgcatcctttgggggcagtaacattgagccaagtgtccggagctgcttccaatttgctaataataagccagagatcgaagcggccctcttcctagactggatgagactggaaccccagtccatggtgtggctgcccgtcctgcacagagtggctgctgcagaaactgccaagcatcaggccaaatgtaacatctgcaaagagtgtccaatcattggattcaggtacaggagtctaaagcactttaattatgacatctgccaaagctgctttttttctggtcgagttgcaaaaggccataaaatgcactatcccatggtggaatattgcactccgactacatcaggagaagatgttcgagactttgccaaggtactaaaaaacaaatttcgaaccaaaaggtattttgcgaagcatccccgaatgggctacctgccagtgcagactgtcttagagggggacaacatggaaactcccgttactctgatcaacttctggccagtagattctgcgcctgcctcgtcccctcagctttcacacgatgatactcattcacgcattgaacattatgctagcaggctagcagaaatggaaaacagcaatggatcttatctaaatgatagcatctctcctaatgagagcatagatgatgaacatttgttaatccagcattactgccaaagtttgaaccaggactcccccctgagccagcctcgtagtcctgcccagatcttgatttccttagagagtgaggaaagaggggagctagagagaatcctagcagatcttgaggaagaaaacaggaatctgcaagcagaatatgaccgtctaaagcagcagcacgaacataaaggcctgtccccactgccgtcccctcctgaaatgatgcccacctctccccagagtccccgggatgctgagctcattgctgaggccaagctactgcgtcaacacaaaggccgcctggaagccaggatgcaaatcctggaagaccacaataaacagctggagtcacagttacacaggctaaggcagctgctggagcaaccccaggcagaggccaaagtgaatggcacaacggtgtcctctccttctacctctctacagaggtccgacagcagtcagcctatgctgctccgagtggttggcagtcaaacttcggactccatgggtgaggaagatcttctcagtcctccccaggacacaagcacagggttagaggaggtgatggagcaactcaacaactccttccctagttcaagaggaagaaatacccctggaaagccaatgagagaggacacaatgtaggaagtcttttccacatggcagatgatttgggcagagcgatggagtccttagtatcagtcatgacagatgaagaaggagcagaataaatgttttacaactcctgattcccgcatggtttttataatattcatacaacaaagaggattagacagtaagagtttacaagaaataaatctatatttttgtgaagggtagtggtattatactgtagatttcagtagtttctaagtctgttattgttttgttaacaatggcaggttttacacgtctatgcaattgtacaaaaaagttataagaaaactacatgtaaaatcttgatagctaaataacttgccatttctttatatggaacgcattttgggttgtttaaaaatttataacagttataaagaaagattgtaaactaaagtgtgctttataaaaaaaagttgtttataaaaacccctaaaaacaaaacaaacacacacacacacacatacacacacacacacaaaactttgaggcagcgcattgttttgcatccttttggcgtgatatccatatgaaattcatggctttttctttttttgcatattaaagataagacttcctctaccaccacaccaaatgactactacacactgctcatttgagaactgtcagctgagtggggcaggcttgagttttcatttcatatatctatatgtctataagtatataaatactatagttatatagataaagagatacgaatttctatagactgactttttccattttttaaatgttcatgtcacatcctaatagaaagaaattacttctagtcagtcatccaggcttacctgcttggtctagaatggatttttcccggagccggaagccaggaggaaactacaccacactaaaacattgtctacagctccagatgtttctcattttaaacaactttccactgacaacgaaagtaaagtaaagtattggatttttttaaagggaacatgtgaatgaatacacaggacttattatatcagagtgagtaatcggttggttggttgattgattgattgattgatacattcagcttcctgctgctagcaatgccacgatttagatttaatgatgcttcagtggaaatcaatcagaaggtattctgaccttgtgaacatcagaaggtattttttaactcccaagcagtagcaggacgatgatagggctggagggctatggattcccagcccatccctgtgaaggagtaggccactctttaagtgaaggattggatgattgttcataatacataaagttctctgtaattacaactaaattattatgccctcttctcacagtcaaaaggaactgggtggtttggtttttgttgcttttttagatttattgtcccatgtgggatgagtttttaaatgccacaagacataatttaaaataaataaactttgggaaaaggtgtaagacagtagccccatcacatttgtgatactgacaggtatcaacccagaagcccatgaactgtgtttccatcctttgcatttctctgcgagtagttccacacaggtttgtaagtaagtaagaaagaaggcaaattgattcaaatgttacaaaaaaacccttcttggtggattagacaggttaaatatataaacaaacaaacaaaaattgctcaaaaaagaggagaaaagctcaagaggaaaagctaaggactggtaggaaaaagctttactctttcatgccattttatttctttttgatttttaaatcattcattcaatagataccaccgtgtgacctataattttgcaaatctgttacctctgacatcaagtgtaattagcttttggagagtgggctgacatcaagtgtaattagcttttggagagtgggttttgtccattattaataattaattaattaacatcaaacacggcttctcatgctatttctacctcactttggttttggggtgttcctgataattgtgcacacctgagttcacagcttcaccacttgtccattgcgttattttctttttcctttataattctttctttttccttcataattttcaaaagaaaacccaaagctctaaggtaacaaattaccaaattacatgaagatttggtttttgtcttgcatttttttcctttatgtgacgctggaccttttctttacccaaggatttttaaaactcagatttaaaacaaggggttactttacatcctactaagaagtttaagtaagtaagtttcattctaaaatcagaggtaaatagagtgcataaataattttgttttaatctttttgtttttcttttagacacattagctctggagtgagtctgtcataatatttgaacaaaaattgagagctttattgctgcattttaagcataattaatttggacattatttcgtgttgtgttctttataaccaccgagtattaaactgtaaatcataatgtaactgaagcataaacatcacatggcatgttttgtcattgttttcaggtactgagttcttacttgagtatcataatatattgtgttttaacaccaacactgtaacatttacgaattatttttttaaacttcagttttactgcattttcacaacatatcagacttcaccaaatatatgccttactattgtattatagtactgctttactgtgtatctcaataaagcacgcagttatgttac

SEQ ID NO: 12589 - DNA, 13993 bp, Homo sapiens
tcctggcatcagttactgtgttgactcactcagtgttgggatcactcactttccccctacaggactcagatctgggaggcaattaccttcggagaaaaacgaataggaaaaactgaagtgttactttttttaaagctgctgaagtttgttggtttctcattgtttttaagcctactggagcaataaagtttgaagaacttttaccaggttttttttatcgctgccttgatatacacttttcaaaatgctttggtgggaagaagtagaggactgttatgaaagagaagatgttcaaaagaaaacattcacaaaatgggtaaatgcacaattttctaagtttgggaagcagcatattgagaacctcttcagtgacctacaggatgggaggcgcctcctagacctcctcgaaggcctgacagggcaaaaactgccaaaagaaaaaggatccacaagagttcatgccctgaacaatgtcaacaaggcactgcgggttttgcagaacaataatgttgatttagtgaatattggaagtactgacatcgtagatggaaatcataaactgactcttggtttgatttggaatataatcctccactggcaggtcaaaaatgtaatgaaaaatatcatggctggattgcaacaaaccaacagtgaaaagattctcctgagctgggtccgacaatcaactcgtaattatccacaggttaatgtaatcaacttcaccaccagctggtctgatggcctggctttgaatgctctcatccatagtcataggccagacctatttgactggaatagtgtggtttgccagcagtcagccacacaacgactggaacatgcattcaacatcgccagatatcaattaggcatagagaaactactcgatcctgaagatgttgataccacctatccagataagaagtccatcttaatgtacatcacatcactcttccaagttttgcctcaacaagtgagcattgaagccatccaggaagtggaaatgttgccaaggccacctaaagtgactaaagaagaacattttcagttacatcatcaaatgcactattctcaacagatcacggtcagtctagcacagggatatgagagaacttcttcccctaagcctcgattcaagagctatgcctacacacaggctgcttatgtcaccacctctgaccctacacggagcccatttccttcacagcatttggaagctcctgaagacaagtcatttggcagttcattgatggagagtgaagtaaacctggaccgttatcaaacagctttagaagaagtattatcgtggcttctttctgctgaggacacattgcaagcacaaggagagatttctaatgatgtggaagtggtgaaagaccagtttcatactcatgaggggtacatgatggatttgacagcccatcagggccgggttggtaatattctacaattgggaagtaagctgattggaacaggaaaattatcagaagatgaagaaactgaagtacaagagcagatgaatctcctaaattcaagatgggaatgcctcagggtagctagcatggaaaaacaaagcaatttacatagagttttaatggatctccagaatcagaaactgaaagagttgaatgactggctaacaaaaacagaagaaagaacaaggaaaatggaggaagagcctcttggacctgatcttgaagacctaaaacgccaagtacaacaacataaggtgcttcaagaagatctagaacaagaacaagtcagggtcaattctctcactcacatggtggtggtagttgatgaatctagtggagatcacgcaactgctgctttggaagaacaacttaaggtattgggagatcgatgggcaaacatctgtagatggacagaagaccgctgggttcttttacaagacatccttctcaaatggcaacgtcttactgaagaacagtgcctttttagtgcatggctttcagaaaaagaagatgcagtgaacaagattcacacaactggctttaaagatcaaaatgaaatgttatcaagtcttcaaaaactggccgttttaaaagcggatctagaaaagaaaaagcaatccatgggcaaactgtattcactcaaacaagatcttctttcaacactgaagaataagtcagtgacccagaagacggaagcatggctggataactttgcccggtgttgggataatttagtccaaaaacttgaaaagagtacagcacagatttcacaggctgtcaccaccactcagccatcactaacacagacaactgtaatggaaacagtaactacggtgaccacaagggaacagatcctggtaaagcatgctcaagaggaacttccaccaccacctccccaaaagaagaggcagattactgtggattctgaaattaggaaaaggttggatgttgatataactgaacttcacagctggattactcgctcagaagctgtgttgcagagtcctgaatttgcaatctttcggaaggaaggcaacttctcagacttaaaagaaaaagtcaatgccatagagcgagaaaaagctgagaagttcagaaaactgcaagatgccagcagatcagctcaggccctggtggaacagatggtgaatgagggtgttaatgcagatagcatcaaacaagcctcagaacaactgaacagccggtggatcgaattctgccagttgctaagtgagagacttaactggctggagtatcagaacaacatcatcgctttctataatcagctacaacaattggagcagatgacaactactgctgaaaactggttgaaaatccaacccaccaccccatcagagccaacagcaattaaaagtcagttaaaaatttgtaaggatgaagtcaaccggctatcaggtcttcaacctcaaattgaacgattaaaaattcaaagcatagccctgaaagagaaaggacaaggacccatgttcctggatgcagactttgtggcctttacaaatcattttaagcaagtcttttctgatgtgcaggccagagagaaagagctacagacaatttttgacactttgccaccaatgcgctatcaggagaccatgagtgccatcaggacatgggtccagcagtcagaaaccaaactctccatacctcaacttagtgtcaccgactatgaaatcatggagcagagactcggggaattgcaggctttacaaagttctctgcaagagcaacaaagtggcctatactatctcagcaccactgtgaaagagatgtcgaagaaagcgccctctgaaattagccggaaatatcaatcagaatttgaagaaattgagggacgctggaagaagctctcctcccagctggttgagcattgtcaaaagctagaggagcaaatgaataaactccgaaaaattcagaatcacatacaaaccctgaagaaatggatggctgaagttgatgtttttctgaaggaggaatggcctgcccttggggattcagaaattctaaaaaagcagctgaaacagtgcagacttttagtcagtgatattcagacaattcagcccagtctaaacagtgtcaatgaaggtgggcagaagataaagaatgaagcagagccagagtttgcttcgagacttgagacagaactcaaagaacttaacactcagtgggatcacatgtgccaacaggtctatgccagaaaggaggccttgaagggaggtttggagaaaactgtaagcctccagaaagatctatcagagatgcacgaatggatgacacaagctgaagaagagtatcttgagagagattttgaatataaaactccagatgaattacagaaagcagttgaagagatgaagagagctaaagaagaggcccaacaaaaagaagcgaaagtgaaactccttactgagtctgtaaatagtgtcatagctcaagctccacctgtagcacaagaggccttaaaaaaggaacttgaaactctaaccaccaactaccagtggctctgcactaggctgaatgggaaatgcaagactttggaagaagtttgggcatgttggcatgagttattgtcatacttggagaaagcaaacaagtggctaaatgaagtagaatttaaacttaaaaccactgaaaacattcctggcggagctgaggaaatctctgaggtgctagattcacttgaaaatttgatgcgacattcagaggataacccaaatcagattcgcatattggcacagaccctaacagatggcggagtcatggatgagctaatcaatgaggaacttgagacatttaattctcgttggagggaactacatgaagaggctgtaaggaggcaaaagttgcttgaacagagcatccagtctgcccaggagactgaaaaatccttacacttaatccaggagtccctcacattcattgacaagcagttggcagcttatattgcagacaaggtggacgcagctcaaatgcctcaggaagcccagaaaatccaatctgatttgacaagtcatgagatcagtttagaagaaatgaagaaacataatcaggggaaggaggctgcccaaagagtcctgtctcagattgatgttgcacagaaaaaattacaagatgtctccatgaagtttcgattattccagaaaccagccaattttgagcagcgtctacaagaaagtaagatgattttagatgaagtgaagatgcacttgcctgcattggaaacaaagagtgtggaacaggaagtagtacagtcacagctaaatcattgtgtgaacttgtataaaagtctgagtgaagtgaagtctgaagtggaaatggtgataaagactggacgtcagattgtacagaaaaagcagacggaaaatcccaaagaacttgatgaaagagtaacagctttgaaattgcattataatgagctgggagcaaaggtaacagaaagaaagcaacagttggagaaatgcttgaaattgtcccgtaagatgcgaaaggaaatgaatgtcttgacagaatggctggcagctacagatatggaattgacaaagagatcagcagttgaaggaatgcctagtaatttggattctgaagttgcctggggaaaggctactcaaaaagagattgagaaacagaaggtgcacctgaagagtatcacagaggtaggagaggccttgaaaacagttttgggcaagaaggagacgttggtggaagataaactcagtcttctgaatagtaactggatagctgtcacctcccgagcagaagagtggttaaatcttttgttggaataccagaaacacatggaaacttttgaccagaatgtggaccacatcacaaagtggatcattcaggctgacacacttttggatgaatcagagaaaaagaaaccccagcaaaaagaagacgtgcttaagcgtttaaaggcagaactgaatgacatacgcccaaaggtggactctacacgtgaccaagcagcaaacttgatggcaaaccgcggtgaccactgcaggaaattagtagagccccaaatctcagagctcaaccatcgatttgcagccatttcacacagaattaagactggaaaggcctccattcctttgaaggaattggagcagtttaactcagatatacaaaaattgcttgaaccactggaggctgaaattcagcagggggtgaatctgaaagaggaagacttcaataaagatatgaatgaagacaatgagggtactgtaaaagaattgttgcaaagaggagacaacttacaacaaagaatcacagatgagagaaagcgagaggaaataaagataaaacagcagctgttacagacaaaacataatgctctcaaggatttgaggtctcaaagaagaaaaaaggctctagaaatttctcatcagtggtatcagtacaagaggcaggctgatgatctcctgaaatgcttggatgacattgaaaaaaaattagccagcctacctgagcccagagatgaaaggaaaataaaggaaattgatcgggaattgcagaagaagaaagaggagctgaatgcagtgcgtaggcaagctgagggcttgtctgaggatggggccgcaatggcagtggagccaactcagatccagctcagcaagcgctggcgggaaattgagagcaaatttgctcagtttcgaagactcaactttgcacaaattcacactgtccgtgaagaaacgatgatggtgatgactgaagacatgcctttggaaatttcttatgtgccttctacttatttgactgaaatcactcatgtctcacaagccctattagaagtggaacaacttctcaatgctcctgacctctgtgctaaggactttgaagatctctttaagcaagaggagtctctgaagaatataaaagatagtctacaacaaagctcaggtcggattgacattattcatagcaagaagacagcagcattgcaaagtgcaacgcctgtggaaagggtgaagctacaggaagctctctcccagcttgatttccaatgggaaaaagttaacaaaatgtacaaggaccgacaagggcgatttgacagatctgttgagaaatggcggcgttttcattatgatataaagatatttaatcagtggctaacagaagctgaacagtttctcagaaagacacaaattcctgagaattgggaacatgctaaatacaaatggtatcttaaggaactccaggatggcattgggcagcggcaaactgttgtcagaacattgaatgcaactggggaagaaataattcagcaatcctcaaaaacagatgccagtattctacaggaaaaattgggaagcctgaatctgcggtggcaggaggtctgcaaacagctgtcagacagaaaaaagaggctagaagaacaaaagaatatcttgtcagaatttcaaagagatttaaatgaatttgttttatggttggaggaagcagataacattgctagtatcccacttgaacctggaaaagagcagcaactaaaagaaaagcttgagcaagtcaagttactggtggaagagttgcccctgcgccagggaattctcaaacaattaaatgaaactggaggacccgtgcttgtaagtgctcccataagcccagaagagcaagataaacttgaaaataagctcaagcagacaaatctccagtggataaaggtttccagagctttacctgagaaacaaggagaaattgaagctcaaataaaagaccttgggcagcttgaaaaaaagcttgaagaccttgaagagcagttaaatcatctgctgctgtggttatctcctattaggaatcagttggaaatttataaccaaccaaaccaagaaggaccatttgacgttcaggaaactgaaatagcagttcaagctaaacaaccggatgtggaagagattttgtctaaagggcagcatttgtacaaggaaaaaccagccactcagccagtgaagaggaagttagaagatctgagctctgagtggaaggcggtaaaccgtttacttcaagagctgagggcaaagcagcctgacctagctcctggactgaccactattggagcctctcctactcagactgttactctggtgacacaacctgtggttactaaggaaactgccatctccaaactagaaatgccatcttccttgatgttggaggtacctgctctggcagatttcaaccgggcttggacagaacttaccgactggctttctctgcttgatcaagttataaaatcacagagggtgatggtgggtgaccttgaggatatcaacgagatgatcatcaagcagaaggcaacaatgcaggatttggaacagaggcgtccccagttggaagaactcattaccgctgcccaaaatttgaaaaacaagaccagcaatcaagaggctagaacaatcattacggatcgaattgaaagaattcagaatcagtgggatgaagtacaagaacaccttcagaaccggaggcaacagttgaatgaaatgttaaaggattcaacacaatggctggaagctaaggaagaagctgagcaggtcttaggacaggccagagccaagcttgagtcatggaaggagggtccctatacagtagatgcaatccaaaagaaaatcacagaaaccaagcagttggccaaagacctccgccagtggcagacaaatgtagatgtggcaaatgacttggccctgaaacttctccgggattattctgcagatgataccagaaaagtccacatgataacagagaatatcaatgcctcttggagaagcattcataaaagggtgagtgagcgagaggctgctttggaagaaactcatagattactgcaacagttccccctggacctggaaaagtttcttgcctggcttacagaagctgaaacaactgccaatgtcctacaggatgctacccgtaaggaaaggctcctagaagactccaagggagtaaaagagctgatgaaacaatggcaagacctccaaggtgaaattgaagctcacacagatgtttatcacaacctggatgaaaacagccaaaaaatcctgagatccctggaaggttccgatgatgcagtcctgttacaaagacgtttggataacatgaacttcaagtggagtgaacttcggaaaaagtctctcaacattaggtcccatttggaagccagttctgaccagtggaagcgtctgcacctttctctgcaggaacttctggtgtggctacagctgaaagatgatgaattaagccggcaggcacctattggaggcgactttccagcagttcagaagcagaacgatgtacatagggccttcaagagggaattgaaaactaaagaacctgtaatcatgagtactcttgagactgtacgaatatttctgacagagcagcctttggaaggactagagaaactctaccaggagcccagagagctgcctcctgaggagagagcccagaatgtcactcggcttctacgaaagcaggctgaggaggtcaatactgagtgggaaaaattgaacctgcactccgctgactggcagagaaaaatagatgagacccttgaaagactccaggaacttcaagaggccacggatgagctggacctcaagctgcgccaagctgaggtgatcaagggatcctggcagcccgtgggcgatctcctcattgactctctccaagatcacctcgagaaagtcaaggcacttcgaggagaaattgcgcctctgaaagagaacgtgagccacgtcaatgaccttgctcgccagcttaccactttgggcattcagctctcaccgtataacctcagcactctggaagacctgaacaccagatggaagcttctgcaggtggccgtcgaggaccgagtcaggcagctgcatgaagcccacagggactttggtccagcatctcagcactttctttccacgtctgtccagggtccctgggagagagccatctcgccaaacaaagtgccctactatatcaaccacgagactcaaacaacttgctgggaccatcccaaaatgacagagctctaccagtctttagctgacctgaataatgtcagattctcagcttataggactgccatgaaactccgaagactgcagaaggccctttgcttggatctcttgagcctgtcagctgcatgtgatgccttggaccagcacaacctcaagcaaaatgaccagcccatggatatcctgcagattattaattgtttgaccactatttatgaccgcctggagcaagagcacaacaatttggtcaacgtccctctctgcgtggatatgtgtctgaactggctgctgaatgtttatgatacgggacgaacagggaggatccgtgtcctgtcttttaaaactggcatcatttccctgtgtaaagcacatttggaagacaagtacagataccttttcaagcaagtggcaagttcaacaggattttgtgaccagcgcaggctgggcctccttctgcatgattctatccaaattccaagacagttgggtgaagttgcatcctttgggggcagtaacattgagccaagtgtccggagctgcttccaatttgctaataataagccagagatcgaagcggccctcttcctagactggatgagactggaaccccagtccatggtgtggctgcccgtcctgcacagagtggctgctgcagaaactgccaagcatcaggccaaatgtaacatctgcaaagagtgtccaatcattggattcaggtacaggagtctaaagcactttaattatgacatctgccaaagctgctttttttctggtcgagttgcaaaaggccataaaatgcactatcccatggtggaatattgcactccgactacatcaggagaagatgttcgagactttgccaaggtactaaaaaacaaatttcgaaccaaaaggtattttgcgaagcatccccgaatgggctacctgccagtgcagactgtcttagagggggacaacatggaaactcccgttactctgatcaacttctggccagtagattctgcgcctgcctcgtcccctcagctttcacacgatgatactcattcacgcattgaacattatgctagcaggctagcagaaatggaaaacagcaatggatcttatctaaatgatagcatctctcctaatgagagcatagatgatgaacatttgttaatccagcattactgccaaagtttgaaccaggactcccccctgagccagcctcgtagtcctgcccagatcttgatttccttagagagtgaggaaagaggggagctagagagaatcctagcagatcttgaggaagaaaacaggaatctgcaagcagaatatgaccgtctaaagcagcagcacgaacataaaggcctgtccccactgccgtcccctcctgaaatgatgcccacctctccccagagtccccgggatgctgagctcattgctgaggccaagctactgcgtcaacacaaaggccgcctggaagccaggatgcaaatcctggaagaccacaataaacagctggagtcacagttacacaggctaaggcagctgctggagcaaccccaggcagaggccaaagtgaatggcacaacggtgtcctctccttctacctctctacagaggtccgacagcagtcagcctatgctgctccgagtggttggcagtcaaacttcggactccatgggtgaggaagatcttctcagtcctccccaggacacaagcacagggttagaggaggtgatggagcaactcaacaactccttccctagttcaagaggaagaaatacccctggaaagccaatgagagaggacacaatgtaggaagtcttttccacatggcagatgatttgggcagagcgatggagtccttagtatcagtcatgacagatgaagaaggagcagaataaatgttttacaactcctgattcccgcatggtttttataatattcatacaacaaagaggattagacagtaagagtttacaagaaataaatctatatttttgtgaagggtagtggtattatactgtagatttcagtagtttctaagtctgttattgttttgttaacaatggcaggttttacacgtctatgcaattgtacaaaaaagttataagaaaactacatgtaaaatcttgatagctaaataacttgccatttctttatatggaacgcattttgggttgtttaaaaatttataacagttataaagaaagattgtaaactaaagtgtgctttataaaaaaaagttgtttataaaaacccctaaaaacaaaacaaacacacacacacacacatacacacacacacacaaaactttgaggcagcgcattgttttgcatccttttggcgtgatatccatatgaaattcatggctttttctttttttgcatattaaagataagacttcctctaccaccacaccaaatgactactacacactgctcatttgagaactgtcagctgagtggggcaggcttgagttttcatttcatatatctatatgtctataagtatataaatactatagttatatagataaagagatacgaatttctatagactgactttttccattttttaaatgttcatgtcacatcctaatagaaagaaattacttctagtcagtcatccaggcttacctgcttggtctagaatggatttttcccggagccggaagccaggaggaaactacaccacactaaaacattgtctacagctccagatgtttctcattttaaacaactttccactgacaacgaaagtaaagtaaagtattggatttttttaaagggaacatgtgaatgaatacacaggacttattatatcagagtgagtaatcggttggttggttgattgattgattgattgatacattcagcttcctgctgctagcaatgccacgatttagatttaatgatgcttcagtggaaatcaatcagaaggtattctgaccttgtgaacatcagaaggtattttttaactcccaagcagtagcaggacgatgatagggctggagggctatggattcccagcccatccctgtgaaggagtaggccactctttaagtgaaggattggatgattgttcataatacataaagttctctgtaattacaactaaattattatgccctcttctcacagtcaaaaggaactgggtggtttggtttttgttgcttttttagatttattgtcccatgtgggatgagtttttaaatgccacaagacataatttaaaataaataaactttgggaaaaggtgtaagacagtagccccatcacatttgtgatactgacaggtatcaacccagaagcccatgaactgtgtttccatcctttgcatttctctgcgagtagttccacacaggtttgtaagtaagtaagaaagaaggcaaattgattcaaatgttacaaaaaaacccttcttggtggattagacaggttaaatatataaacaaacaaacaaaaattgctcaaaaaagaggagaaaagctcaagaggaaaagctaaggactggtaggaaaaagctttactctttcatgccattttatttctttttgatttttaaatcattcattcaatagataccaccgtgtgacctataattttgcaaatctgttacctctgacatcaagtgtaattagcttttggagagtgggctgacatcaagtgtaattagcttttggagagtgggttttgtccattattaataattaattaattaacatcaaacacggcttctcatgctatttctacctcactttggttttggggtgttcctgataattgtgcacacctgagttcacagcttcaccacttgtccattgcgttattttctttttcctttataattctttctttttccttcataattttcaaaagaaaacccaaagctctaaggtaacaaattaccaaattacatgaagatttggtttttgtcttgcatttttttcctttatgtgacgctggaccttttctttacccaaggatttttaaaactcagatttaaaacaaggggttactttacatcctactaagaagtttaagtaagtaagtttcattctaaaatcagaggtaaatagagtgcataaataattttgttttaatctttttgtttttcttttagacacattagctctggagtgagtctgtcataatatttgaacaaaaattgagagctttattgctgcattttaagcataattaatttggacattatttcgtgttgtgttctttataaccaccgagtattaaactgtaaatcataatgtaactgaagcataaacatcacatggcatgttttgtcattgttttcaggtactgagttcttacttgagtatcataatatattgtgttttaacaccaacactgtaacatttacgaattatttttttaaacttcagttttactgcattttcacaacatatcagacttcaccaaatatatgccttactattgtattatagtactgctttactgtgtatctcaataaagcacgcagttatgttac

SEQ ID NO: 12590 - DNA, 13764 bp, Homo sapiens
tcactgacacatagagtaacttctagttctccaagctctactcatgatgaaagagaagatgttcaaaagaaaacattcacaaaatgggtaaatgcacaattttctaagtttgggaagcagcatattgagaacctcttcagtgacctacaggatgggaggcgcctcctagacctcctcgaaggcctgacagggcaaaaactgccaaaagaaaaaggatccacaagagttcatgccctgaacaatgtcaacaaggcactgcgggttttgcagaacaataatgttgatttagtgaatattggaagtactgacatcgtagatggaaatcataaactgactcttggtttgatttggaatataatcctccactggcaggtcaaaaatgtaatgaaaaatatcatggctggattgcaacaaaccaacagtgaaaagattctcctgagctgggtccgacaatcaactcgtaattatccacaggttaatgtaatcaacttcaccaccagctggtctgatggcctggctttgaatgctctcatccatagtcataggccagacctatttgactggaatagtgtggtttgccagcagtcagccacacaacgactggaacatgcattcaacatcgccagatatcaattaggcatagagaaactactcgatcctgaagatgttgataccacctatccagataagaagtccatcttaatgtacatcacatcactcttccaagttttgcctcaacaagtgagcattgaagccatccaggaagtggaaatgttgccaaggccacctaaagtgactaaagaagaacattttcagttacatcatcaaatgcactattctcaacagatcacggtcagtctagcacagggatatgagagaacttcttcccctaagcctcgattcaagagctatgcctacacacaggctgcttatgtcaccacctctgaccctacacggagcccatttccttcacagcatttggaagctcctgaagacaagtcatttggcagttcattgatggagagtgaagtaaacctggaccgttatcaaacagctttagaagaagtattatcgtggcttctttctgctgaggacacattgcaagcacaaggagagatttctaatgatgtggaagtggtgaaagaccagtttcatactcatgaggggtacatgatggatttgacagcccatcagggccgggttggtaatattctacaattgggaagtaagctgattggaacaggaaaattatcagaagatgaagaaactgaagtacaagagcagatgaatctcctaaattcaagatgggaatgcctcagggtagctagcatggaaaaacaaagcaatttacatagagttttaatggatctccagaatcagaaactgaaagagttgaatgactggctaacaaaaacagaagaaagaacaaggaaaatggaggaagagcctcttggacctgatcttgaagacctaaaacgccaagtacaacaacataaggtgcttcaagaagatctagaacaagaacaagtcagggtcaattctctcactcacatggtggtggtagttgatgaatctagtggagatcacgcaactgctgctttggaagaacaacttaaggtattgggagatcgatgggcaaacatctgtagatggacagaagaccgctgggttcttttacaagacatccttctcaaatggcaacgtcttactgaagaacagtgcctttttagtgcatggctttcagaaaaagaagatgcagtgaacaagattcacacaactggctttaaagatcaaaatgaaatgttatcaagtcttcaaaaactggccgttttaaaagcggatctagaaaagaaaaagcaatccatgggcaaactgtattcactcaaacaagatcttctttcaacactgaagaataagtcagtgacccagaagacggaagcatggctggataactttgcccggtgttgggataatttagtccaaaaacttgaaaagagtacagcacagatttcacaggctgtcaccaccactcagccatcactaacacagacaactgtaatggaaacagtaactacggtgaccacaagggaacagatcctggtaaagcatgctcaagaggaacttccaccaccacctccccaaaagaagaggcagattactgtggattctgaaattaggaaaaggttggatgttgatataactgaacttcacagctggattactcgctcagaagctgtgttgcagagtcctgaatttgcaatctttcggaaggaaggcaacttctcagacttaaaagaaaaagtcaatgccatagagcgagaaaaagctgagaagttcagaaaactgcaagatgccagcagatcagctcaggccctggtggaacagatggtgaatgagggtgttaatgcagatagcatcaaacaagcctcagaacaactgaacagccggtggatcgaattctgccagttgctaagtgagagacttaactggctggagtatcagaacaacatcatcgctttctataatcagctacaacaattggagcagatgacaactactgctgaaaactggttgaaaatccaacccaccaccccatcagagccaacagcaattaaaagtcagttaaaaatttgtaaggatgaagtcaaccggctatcaggtcttcaacctcaaattgaacgattaaaaattcaaagcatagccctgaaagagaaaggacaaggacccatgttcctggatgcagactttgtggcctttacaaatcattttaagcaagtcttttctgatgtgcaggccagagagaaagagctacagacaatttttgacactttgccaccaatgcgctatcaggagaccatgagtgccatcaggacatgggtccagcagtcagaaaccaaactctccatacctcaacttagtgtcaccgactatgaaatcatggagcagagactcggggaattgcaggctttacaaagttctctgcaagagcaacaaagtggcctatactatctcagcaccactgtgaaagagatgtcgaagaaagcgccctctgaaattagccggaaatatcaatcagaatttgaagaaattgagggacgctggaagaagctctcctcccagctggttgagcattgtcaaaagctagaggagcaaatgaataaactccgaaaaattcagaatcacatacaaaccctgaagaaatggatggctgaagttgatgtttttctgaaggaggaatggcctgcccttggggattcagaaattctaaaaaagcagctgaaacagtgcagacttttagtcagtgatattcagacaattcagcccagtctaaacagtgtcaatgaaggtgggcagaagataaagaatgaagcagagccagagtttgcttcgagacttgagacagaactcaaagaacttaacactcagtgggatcacatgtgccaacaggtctatgccagaaaggaggccttgaagggaggtttggagaaaactgtaagcctccagaaagatctatcagagatgcacgaatggatgacacaagctgaagaagagtatcttgagagagattttgaatataaaactccagatgaattacagaaagcagttgaagagatgaagagagctaaagaagaggcccaacaaaaagaagcgaaagtgaaactccttactgagtctgtaaatagtgtcatagctcaagctccacctgtagcacaagaggccttaaaaaaggaacttgaaactctaaccaccaactaccagtggctctgcactaggctgaatgggaaatgcaagactttggaagaagtttgggcatgttggcatgagttattgtcatacttggagaaagcaaacaagtggctaaatgaagtagaatttaaacttaaaaccactgaaaacattcctggcggagctgaggaaatctctgaggtgctagattcacttgaaaatttgatgcgacattcagaggataacccaaatcagattcgcatattggcacagaccctaacagatggcggagtcatggatgagctaatcaatgaggaacttgagacatttaattctcgttggagggaactacatgaagaggctgtaaggaggcaaaagttgcttgaacagagcatccagtctgcccaggagactgaaaaatccttacacttaatccaggagtccctcacattcattgacaagcagttggcagcttatattgcagacaaggtggacgcagctcaaatgcctcaggaagcccagaaaatccaatctgatttgacaagtcatgagatcagtttagaagaaatgaagaaacataatcaggggaaggaggctgcccaaagagtcctgtctcagattgatgttgcacagaaaaaattacaagatgtctccatgaagtttcgattattccagaaaccagccaattttgagcagcgtctacaagaaagtaagatgattttagatgaagtgaagatgcacttgcctgcattggaaacaaagagtgtggaacaggaagtagtacagtcacagctaaatcattgtgtgaacttgtataaaagtctgagtgaagtgaagtctgaagtggaaatggtgataaagactggacgtcagattgtacagaaaaagcagacggaaaatcccaaagaacttgatgaaagagtaacagctttgaaattgcattataatgagctgggagcaaaggtaacagaaagaaagcaacagttggagaaatgcttgaaattgtcccgtaagatgcgaaaggaaatgaatgtcttgacagaatggctggcagctacagatatggaattgacaaagagatcagcagttgaaggaatgcctagtaatttggattctgaagttgcctggggaaaggctactcaaaaagagattgagaaacagaaggtgcacctgaagagtatcacagaggtaggagaggccttgaaaacagttttgggcaagaaggagacgttggtggaagataaactcagtcttctgaatagtaactggatagctgtcacctcccgagcagaagagtggttaaatcttttgttggaataccagaaacacatggaaacttttgaccagaatgtggaccacatcacaaagtggatcattcaggctgacacacttttggatgaatcagagaaaaagaaaccccagcaaaaagaagacgtgcttaagcgtttaaaggcagaactgaatgacatacgcccaaaggtggactctacacgtgaccaagcagcaaacttgatggcaaaccgcggtgaccactgcaggaaattagtagagccccaaatctcagagctcaaccatcgatttgcagccatttcacacagaattaagactggaaaggcctccattcctttgaaggaattggagcagtttaactcagatatacaaaaattgcttgaaccactggaggctgaaattcagcagggggtgaatctgaaagaggaagacttcaataaagatatgaatgaagacaatgagggtactgtaaaagaattgttgcaaagaggagacaacttacaacaaagaatcacagatgagagaaagcgagaggaaataaagataaaacagcagctgttacagacaaaacataatgctctcaaggatttgaggtctcaaagaagaaaaaaggctctagaaatttctcatcagtggtatcagtacaagaggcaggctgatgatctcctgaaatgcttggatgacattgaaaaaaaattagccagcctacctgagcccagagatgaaaggaaaataaaggaaattgatcgggaattgcagaagaagaaagaggagctgaatgcagtgcgtaggcaagctgagggcttgtctgaggatggggccgcaatggcagtggagccaactcagatccagctcagcaagcgctggcgggaaattgagagcaaatttgctcagtttcgaagactcaactttgcacaaattcacactgtccgtgaagaaacgatgatggtgatgactgaagacatgcctttggaaatttcttatgtgccttctacttatttgactgaaatcactcatgtctcacaagccctattagaagtggaacaacttctcaatgctcctgacctctgtgctaaggactttgaagatctctttaagcaagaggagtctctgaagaatataaaagatagtctacaacaaagctcaggtcggattgacattattcatagcaagaagacagcagcattgcaaagtgcaacgcctgtggaaagggtgaagctacaggaagctctctcccagcttgatttccaatgggaaaaagttaacaaaatgtacaaggaccgacaagggcgatttgacagatctgttgagaaatggcggcgttttcattatgatataaagatatttaatcagtggctaacagaagctgaacagtttctcagaaagacacaaattcctgagaattgggaacatgctaaatacaaatggtatcttaaggaactccaggatggcattgggcagcggcaaactgttgtcagaacattgaatgcaactggggaagaaataattcagcaatcctcaaaaacagatgccagtattctacaggaaaaattgggaagcctgaatctgcggtggcaggaggtctgcaaacagctgtcagacagaaaaaagaggctagaagaacaaaagaatatcttgtcagaatttcaaagagatttaaatgaatttgttttatggttggaggaagcagataacattgctagtatcccacttgaacctggaaaagagcagcaactaaaagaaaagcttgagcaagtcaagttactggtggaagagttgcccctgcgccagggaattctcaaacaattaaatgaaactggaggacccgtgcttgtaagtgctcccataagcccagaagagcaagataaacttgaaaataagctcaagcagacaaatctccagtggataaaggtttccagagctttacctgagaaacaaggagaaattgaagctcaaataaaagaccttgggcagcttgaaaaaaagcttgaagaccttgaagagcagttaaatcatctgctgctgtggttatctcctattaggaatcagttggaaatttataaccaaccaaaccaagaaggaccatttgacgttcaggaaactgaaatagcagttcaagctaaacaaccggatgtggaagagattttgtctaaagggcagcatttgtacaaggaaaaaccagccactcagccagtgaagaggaagttagaagatctgagctctgagtggaaggcggtaaaccgtttacttcaagagctgagggcaaagcagcctgacctagctcctggactgaccactattggagcctctcctactcagactgttactctggtgacacaacctgtggttactaaggaaactgccatctccaaactagaaatgccatcttccttgatgttggaggtacctgctctggcagatttcaaccgggcttggacagaacttaccgactggctttctctgcttgatcaagttataaaatcacagagggtgatggtgggtgaccttgaggatatcaacgagatgatcatcaagcagaaggcaacaatgcaggatttggaacagaggcgtccccagttggaagaactcattaccgctgcccaaaatttgaaaaacaagaccagcaatcaagaggctagaacaatcattacggatcgaattgaaagaattcagaatcagtgggatgaagtacaagaacaccttcagaaccggaggcaacagttgaatgaaatgttaaaggattcaacacaatggctggaagctaaggaagaagctgagcaggtcttaggacaggccagagccaagcttgagtcatggaaggagggtccctatacagtagatgcaatccaaaagaaaatcacagaaaccaagcagttggccaaagacctccgccagtggcagacaaatgtagatgtggcaaatgacttggccctgaaacttctccgggattattctgcagatgataccagaaaagtccacatgataacagagaatatcaatgcctcttggagaagcattcataaaagggtgagtgagcgagaggctgctttggaagaaactcatagattactgcaacagttccccctggacctggaaaagtttcttgcctggcttacagaagctgaaacaactgccaatgtcctacaggatgctacccgtaaggaaaggctcctagaagactccaagggagtaaaagagctgatgaaacaatggcaagacctccaaggtgaaattgaagctcacacagatgtttatcacaacctggatgaaaacagccaaaaaatcctgagatccctggaaggttccgatgatgcagtcctgttacaaagacgtttggataacatgaacttcaagtggagtgaacttcggaaaaagtctctcaacattaggtcccatttggaagccagttctgaccagtggaagcgtctgcacctttctctgcaggaacttctggtgtggctacagctgaaagatgatgaattaagccggcaggcacctattggaggcgactttccagcagttcagaagcagaacgatgtacatagggccttcaagagggaattgaaaactaaagaacctgtaatcatgagtactcttgagactgtacgaatatttctgacagagcagcctttggaaggactagagaaactctaccaggagcccagagagctgcctcctgaggagagagcccagaatgtcactcggcttctacgaaagcaggctgaggaggtcaatactgagtgggaaaaattgaacctgcactccgctgactggcagagaaaaatagatgagacccttgaaagactccaggaacttcaagaggccacggatgagctggacctcaagctgcgccaagctgaggtgatcaagggatcctggcagcccgtgggcgatctcctcattgactctctccaagatcacctcgagaaagtcaaggcacttcgaggagaaattgcgcctctgaaagagaacgtgagccacgtcaatgaccttgctcgccagcttaccactttgggcattcagctctcaccgtataacctcagcactctggaagacctgaacaccagatggaagcttctgcaggtggccgtcgaggaccgagtcaggcagctgcatgaagcccacagggactttggtccagcatctcagcactttctttccacgtctgtccagggtccctgggagagagccatctcgccaaacaaagtgccctactatatcaaccacgagactcaaacaacttgctgggaccatcccaaaatgacagagctctaccagtctttagctgacctgaataatgtcagattctcagcttataggactgccatgaaactccgaagactgcagaaggccctttgcttggatctcttgagcctgtcagctgcatgtgatgccttggaccagcacaacctcaagcaaaatgaccagcccatggatatcctgcagattattaattgtttgaccactatttatgaccgcctggagcaagagcacaacaatttggtcaacgtccctctctgcgtggatatgtgtctgaactggctgctgaatgtttatgatacgggacgaacagggaggatccgtgtcctgtcttttaaaactggcatcatttccctgtgtaaagcacatttggaagacaagtacagataccttttcaagcaagtggcaagttcaacaggattttgtgaccagcgcaggctgggcctccttctgcatgattctatccaaattccaagacagttgggtgaagttgcatcctttgggggcagtaacattgagccaagtgtccggagctgcttccaatttgctaataataagccagagatcgaagcggccctcttcctagactggatgagactggaaccccagtccatggtgtggctgcccgtcctgcacagagtggctgctgcagaaactgccaagcatcaggccaaatgtaacatctgcaaagagtgtccaatcattggattcaggtacaggagtctaaagcactttaattatgacatctgccaaagctgctttttttctggtcgagttgcaaaaggccataaaatgcactatcccatggtggaatattgcactccgactacatcaggagaagatgttcgagactttgccaaggtactaaaaaacaaatttcgaaccaaaaggtattttgcgaagcatccccgaatgggctacctgccagtgcagactgtcttagagggggacaacatggaaactcccgttactctgatcaacttctggccagtagattctgcgcctgcctcgtcccctcagctttcacacgatgatactcattcacgcattgaacattatgctagcaggctagcagaaatggaaaacagcaatggatcttatctaaatgatagcatctctcctaatgagagcatagatgatgaacatttgttaatccagcattactgccaaagtttgaaccaggactcccccctgagccagcctcgtagtcctgcccagatcttgatttccttagagagtgaggaaagaggggagctagagagaatcctagcagatcttgaggaagaaaacaggaatctgcaagcagaatatgaccgtctaaagcagcagcacgaacataaaggcctgtccccactgccgtcccctcctgaaatgatgcccacctctccccagagtccccgggatgctgagctcattgctgaggccaagctactgcgtcaacacaaaggccgcctggaagccaggatgcaaatcctggaagaccacaataaacagctggagtcacagttacacaggctaaggcagctgctggagcaaccccaggcagaggccaaagtgaatggcacaacggtgtcctctccttctacctctctacagaggtccgacagcagtcagcctatgctgctccgagtggttggcagtcaaacttcggactccatgggtgaggaagatcttctcagtcctccccaggacacaagcacagggttagaggaggtgatggagcaactcaacaactccttccctagttcaagaggaagaaatacccctggaaagccaatgagagaggacacaatgtaggaagtcttttccacatggcagatgatttgggcagagcgatggagtccttagtatcagtcatgacagatgaagaaggagcagaataaatgttttacaactcctgattcccgcatggtttttataatattcatacaacaaagaggattagacagtaagagtttacaagaaataaatctatatttttgtgaagggtagtggtattatactgtagatttcagtagtttctaagtctgttattgttttgttaacaatggcaggttttacacgtctatgcaattgtacaaaaaagttataagaaaactacatgtaaaatcttgatagctaaataacttgccatttctttatatggaacgcattttgggttgtttaaaaatttataacagttataaagaaagattgtaaactaaagtgtgctttataaaaaaaagttgtttataaaaacccctaaaaacaaaacaaacacacacacacacacatacacacacacacacaaaactttgaggcagcgcattgttttgcatccttttggcgtgatatccatatgaaattcatggctttttctttttttgcatattaaagataagacttcctctaccaccacaccaaatgactactacacactgctcatttgagaactgtcagctgagtggggcaggcttgagttttcatttcatatatctatatgtctataagtatataaatactatagttatatagataaagagatacgaatttctatagactgactttttccattttttaaatgttcatgtcacatcctaatagaaagaaattacttctagtcagtcatccaggcttacctgcttggtctagaatggatttttcccggagccggaagccaggaggaaactacaccacactaaaacattgtctacagctccagatgtttctcattttaaacaactttccactgacaacgaaagtaaagtaaagtattggatttttttaaagggaacatgtgaatgaatacacaggacttattatatcagagtgagtaatcggttggttggttgattgattgattgattgatacattcagcttcctgctgctagcaatgccacgatttagatttaatgatgcttcagtggaaatcaatcagaaggtattctgaccttgtgaacatcagaaggtattttttaactcccaagcagtagcaggacgatgatagggctggagggctatggattcccagcccatccctgtgaaggagtaggccactctttaagtgaaggattggatgattgttcataatacataaagttctctgtaattacaactaaattattatgccctcttctcacagtcaaaaggaactgggtggtttggtttttgttgcttttttagatttattgtcccatgtgggatgagtttttaaatgccacaagacataatttaaaataaataaactttgggaaaaggtgtaagacagtagccccatcacatttgtgatactgacaggtatcaacccagaagcccatgaactgtgtttccatcctttgcatttctctgcgagtagttccacacaggtttgtaagtaagtaagaaagaaggcaaattgattcaaatgttacaaaaaaacccttcttggtggattagacaggttaaatatataaacaaacaaacaaaaattgctcaaaaaagaggagaaaagctcaagaggaaaagctaaggactggtaggaaaaagctttactctttcatgccattttatttctttttgatttttaaatcattcattcaatagataccaccgtgtgacctataattttgcaaatctgttacctctgacatcaagtgtaattagcttttggagagtgggctgacatcaagtgtaattagcttttggagagtgggttttgtccattattaataattaattaattaacatcaaacacggcttctcatgctatttctacctcactttggttttggggtgttcctgataattgtgcacacctgagttcacagcttcaccacttgtccattgcgttattttctttttcctttataattctttctttttccttcataattttcaaaagaaaacccaaagctctaaggtaacaaattaccaaattacatgaagatttggtttttgtcttgcatttttttcctttatgtgacgctggaccttttctttacccaaggatttttaaaactcagatttaaaacaaggggttactttacatcctactaagaagtttaagtaagtaagtttcattctaaaatcagaggtaaatagagtgcataaataattttgttttaatctttttgtttttcttttagacacattagctctggagtgagtctgtcataatatttgaacaaaaattgagagctttattgctgcattttaagcataattaatttggacattatttcgtgttgtgttctttataaccaccgagtattaaactgtaaatcataatgtaactgaagcataaacatcacatggcatgttttgtcattgttttcaggtactgagttcttacttgagtatcataatatattgtgttttaacaccaacactgtaacatttacgaattatttttttaaacttcagttttactgcattttcacaacatatcagacttcaccaaatatatgccttactattgtattatagtactgctttactgtgtatctcaataaagcacgcagttatgttac

SEQ ID NO: 12591 - DNA, 14082 bp, Homo sapiens
atgctgtctgtgaagctgaatctgtgagaacacctcactattcacggcaaccggagtggaagaaacaggtgcaaaaagattgtgtgtttgtctgcttttgtgaggctggtcagagattctgtgcctgctttatctgtgcttggctatgactctacctccaggtttaccataccccatagaatgtgtaagagaaaagtaccaacagggaaatcagcaaaaagctttcctatgaaggtgtgtagccagcctccgcagaatttgaaatgtctgaggtttcttctggtgagtaaaagctgcagataatcaacagccattcagaagaatgataaatgccacaagcatttggaaacaggcttccctaaagatgaaagagaagatgttcaaaagaaaacattcacaaaatgggtaaatgcacaattttctaagtttgggaagcagcatattgagaacctcttcagtgacctacaggatgggaggcgcctcctagacctcctcgaaggcctgacagggcaaaaactgccaaaagaaaaaggatccacaagagttcatgccctgaacaatgtcaacaaggcactgcgggttttgcagaacaataatgttgatttagtgaatattggaagtactgacatcgtagatggaaatcataaactgactcttggtttgatttggaatataatcctccactggcaggtcaaaaatgtaatgaaaaatatcatggctggattgcaacaaaccaacagtgaaaagattctcctgagctgggtccgacaatcaactcgtaattatccacaggttaatgtaatcaacttcaccaccagctggtctgatggcctggctttgaatgctctcatccatagtcataggccagacctatttgactggaatagtgtggtttgccagcagtcagccacacaacgactggaacatgcattcaacatcgccagatatcaattaggcatagagaaactactcgatcctgaagatgttgataccacctatccagataagaagtccatcttaatgtacatcacatcactcttccaagttttgcctcaacaagtgagcattgaagccatccaggaagtggaaatgttgccaaggccacctaaagtgactaaagaagaacattttcagttacatcatcaaatgcactattctcaacagatcacggtcagtctagcacagggatatgagagaacttcttcccctaagcctcgattcaagagctatgcctacacacaggctgcttatgtcaccacctctgaccctacacggagcccatttccttcacagcatttggaagctcctgaagacaagtcatttggcagttcattgatggagagtgaagtaaacctggaccgttatcaaacagctttagaagaagtattatcgtggcttctttctgctgaggacacattgcaagcacaaggagagatttctaatgatgtggaagtggtgaaagaccagtttcatactcatgaggggtacatgatggatttgacagcccatcagggccgggttggtaatattctacaattgggaagtaagctgattggaacaggaaaattatcagaagatgaagaaactgaagtacaagagcagatgaatctcctaaattcaagatgggaatgcctcagggtagctagcatggaaaaacaaagcaatttacatagagttttaatggatctccagaatcagaaactgaaagagttgaatgactggctaacaaaaacagaagaaagaacaaggaaaatggaggaagagcctcttggacctgatcttgaagacctaaaacgccaagtacaacaacataaggtgcttcaagaagatctagaacaagaacaagtcagggtcaattctctcactcacatggtggtggtagttgatgaatctagtggagatcacgcaactgctgctttggaagaacaacttaaggtattgggagatcgatgggcaaacatctgtagatggacagaagaccgctgggttcttttacaagacatccttctcaaatggcaacgtcttactgaagaacagtgcctttttagtgcatggctttcagaaaaagaagatgcagtgaacaagattcacacaactggctttaaagatcaaaatgaaatgttatcaagtcttcaaaaactggccgttttaaaagcggatctagaaaagaaaaagcaatccatgggcaaactgtattcactcaaacaagatcttctttcaacactgaagaataagtcagtgacccagaagacggaagcatggctggataactttgcccggtgttgggataatttagtccaaaaacttgaaaagagtacagcacagatttcacaggctgtcaccaccactcagccatcactaacacagacaactgtaatggaaacagtaactacggtgaccacaagggaacagatcctggtaaagcatgctcaagaggaacttccaccaccacctccccaaaagaagaggcagattactgtggattctgaaattaggaaaaggttggatgttgatataactgaacttcacagctggattactcgctcagaagctgtgttgcagagtcctgaatttgcaatctttcggaaggaaggcaacttctcagacttaaaagaaaaagtcaatgccatagagcgagaaaaagctgagaagttcagaaaactgcaagatgccagcagatcagctcaggccctggtggaacagatggtgaatgagggtgttaatgcagatagcatcaaacaagcctcagaacaactgaacagccggtggatcgaattctgccagttgctaagtgagagacttaactggctggagtatcagaacaacatcatcgctttctataatcagctacaacaattggagcagatgacaactactgctgaaaactggttgaaaatccaacccaccaccccatcagagccaacagcaattaaaagtcagttaaaaatttgtaaggatgaagtcaaccggctatcaggtcttcaacctcaaattgaacgattaaaaattcaaagcatagccctgaaagagaaaggacaaggacccatgttcctggatgcagactttgtggcctttacaaatcattttaagcaagtcttttctgatgtgcaggccagagagaaagagctacagacaatttttgacactttgccaccaatgcgctatcaggagaccatgagtgccatcaggacatgggtccagcagtcagaaaccaaactctccatacctcaacttagtgtcaccgactatgaaatcatggagcagagactcggggaattgcaggctttacaaagttctctgcaagagcaacaaagtggcctatactatctcagcaccactgtgaaagagatgtcgaagaaagcgccctctgaaattagccggaaatatcaatcagaatttgaagaaattgagggacgctggaagaagctctcctcccagctggttgagcattgtcaaaagctagaggagcaaatgaataaactccgaaaaattcagaatcacatacaaaccctgaagaaatggatggctgaagttgatgtttttctgaaggaggaatggcctgcccttggggattcagaaattctaaaaaagcagctgaaacagtgcagacttttagtcagtgatattcagacaattcagcccagtctaaacagtgtcaatgaaggtgggcagaagataaagaatgaagcagagccagagtttgcttcgagacttgagacagaactcaaagaacttaacactcagtgggatcacatgtgccaacaggtctatgccagaaaggaggccttgaagggaggtttggagaaaactgtaagcctccagaaagatctatcagagatgcacgaatggatgacacaagctgaagaagagtatcttgagagagattttgaatataaaactccagatgaattacagaaagcagttgaagagatgaagagagctaaagaagaggcccaacaaaaagaagcgaaagtgaaactccttactgagtctgtaaatagtgtcatagctcaagctccacctgtagcacaagaggccttaaaaaaggaacttgaaactctaaccaccaactaccagtggctctgcactaggctgaatgggaaatgcaagactttggaagaagtttgggcatgttggcatgagttattgtcatacttggagaaagcaaacaagtggctaaatgaagtagaatttaaacttaaaaccactgaaaacattcctggcggagctgaggaaatctctgaggtgctagattcacttgaaaatttgatgcgacattcagaggataacccaaatcagattcgcatattggcacagaccctaacagatggcggagtcatggatgagctaatcaatgaggaacttgagacatttaattctcgttggagggaactacatgaagaggctgtaaggaggcaaaagttgcttgaacagagcatccagtctgcccaggagactgaaaaatccttacacttaatccaggagtccctcacattcattgacaagcagttggcagcttatattgcagacaaggtggacgcagctcaaatgcctcaggaagcccagaaaatccaatctgatttgacaagtcatgagatcagtttagaagaaatgaagaaacataatcaggggaaggaggctgcccaaagagtcctgtctcagattgatgttgcacagaaaaaattacaagatgtctccatgaagtttcgattattccagaaaccagccaattttgagcagcgtctacaagaaagtaagatgattttagatgaagtgaagatgcacttgcctgcattggaaacaaagagtgtggaacaggaagtagtacagtcacagctaaatcattgtgtgaacttgtataaaagtctgagtgaagtgaagtctgaagtggaaatggtgataaagactggacgtcagattgtacagaaaaagcagacggaaaatcccaaagaacttgatgaaagagtaacagctttgaaattgcattataatgagctgggagcaaaggtaacagaaagaaagcaacagttggagaaatgcttgaaattgtcccgtaagatgcgaaaggaaatgaatgtcttgacagaatggctggcagctacagatatggaattgacaaagagatcagcagttgaaggaatgcctagtaatttggattctgaagttgcctggggaaaggctactcaaaaagagattgagaaacagaaggtgcacctgaagagtatcacagaggtaggagaggccttgaaaacagttttgggcaagaaggagacgttggtggaagataaactcagtcttctgaatagtaactggatagctgtcacctcccgagcagaagagtggttaaatcttttgttggaataccagaaacacatggaaacttttgaccagaatgtggaccacatcacaaagtggatcattcaggctgacacacttttggatgaatcagagaaaaagaaaccccagcaaaaagaagacgtgcttaagcgtttaaaggcagaactgaatgacatacgcccaaaggtggactctacacgtgaccaagcagcaaacttgatggcaaaccgcggtgaccactgcaggaaattagtagagccccaaatctcagagctcaaccatcgatttgcagccatttcacacagaattaagactggaaaggcctccattcctttgaaggaattggagcagtttaactcagatatacaaaaattgcttgaaccactggaggctgaaattcagcagggggtgaatctgaaagaggaagacttcaataaagatatgaatgaagacaatgagggtactgtaaaagaattgttgcaaagaggagacaacttacaacaaagaatcacagatgagagaaagcgagaggaaataaagataaaacagcagctgttacagacaaaacataatgctctcaaggatttgaggtctcaaagaagaaaaaaggctctagaaatttctcatcagtggtatcagtacaagaggcaggctgatgatctcctgaaatgcttggatgacattgaaaaaaaattagccagcctacctgagcccagagatgaaaggaaaataaaggaaattgatcgggaattgcagaagaagaaagaggagctgaatgcagtgcgtaggcaagctgagggcttgtctgaggatggggccgcaatggcagtggagccaactcagatccagctcagcaagcgctggcgggaaattgagagcaaatttgctcagtttcgaagactcaactttgcacaaattcacactgtccgtgaagaaacgatgatggtgatgactgaagacatgcctttggaaatttcttatgtgccttctacttatttgactgaaatcactcatgtctcacaagccctattagaagtggaacaacttctcaatgctcctgacctctgtgctaaggactttgaagatctctttaagcaagaggagtctctgaagaatataaaagatagtctacaacaaagctcaggtcggattgacattattcatagcaagaagacagcagcattgcaaagtgcaacgcctgtggaaagggtgaagctacaggaagctctctcccagcttgatttccaatgggaaaaagttaacaaaatgtacaaggaccgacaagggcgatttgacagatctgttgagaaatggcggcgttttcattatgatataaagatatttaatcagtggctaacagaagctgaacagtttctcagaaagacacaaattcctgagaattgggaacatgctaaatacaaatggtatcttaaggaactccaggatggcattgggcagcggcaaactgttgtcagaacattgaatgcaactggggaagaaataattcagcaatcctcaaaaacagatgccagtattctacaggaaaaattgggaagcctgaatctgcggtggcaggaggtctgcaaacagctgtcagacagaaaaaagaggctagaagaacaaaagaatatcttgtcagaatttcaaagagatttaaatgaatttgttttatggttggaggaagcagataacattgctagtatcccacttgaacctggaaaagagcagcaactaaaagaaaagcttgagcaagtcaagttactggtggaagagttgcccctgcgccagggaattctcaaacaattaaatgaaactggaggacccgtgcttgtaagtgctcccataagcccagaagagcaagataaacttgaaaataagctcaagcagacaaatctccagtggataaaggtttccagagctttacctgagaaacaaggagaaattgaagctcaaataaaagaccttgggcagcttgaaaaaaagcttgaagaccttgaagagcagttaaatcatctgctgctgtggttatctcctattaggaatcagttggaaatttataaccaaccaaaccaagaaggaccatttgacgttcaggaaactgaaatagcagttcaagctaaacaaccggatgtggaagagattttgtctaaagggcagcatttgtacaaggaaaaaccagccactcagccagtgaagaggaagttagaagatctgagctctgagtggaaggcggtaaaccgtttacttcaagagctgagggcaaagcagcctgacctagctcctggactgaccactattggagcctctcctactcagactgttactctggtgacacaacctgtggttactaaggaaactgccatctccaaactagaaatgccatcttccttgatgttggaggtacctgctctggcagatttcaaccgggcttggacagaacttaccgactggctttctctgcttgatcaagttataaaatcacagagggtgatggtgggtgaccttgaggatatcaacgagatgatcatcaagcagaaggcaacaatgcaggatttggaacagaggcgtccccagttggaagaactcattaccgctgcccaaaatttgaaaaacaagaccagcaatcaagaggctagaacaatcattacggatcgaattgaaagaattcagaatcagtgggatgaagtacaagaacaccttcagaaccggaggcaacagttgaatgaaatgttaaaggattcaacacaatggctggaagctaaggaagaagctgagcaggtcttaggacaggccagagccaagcttgagtcatggaaggagggtccctatacagtagatgcaatccaaaagaaaatcacagaaaccaagcagttggccaaagacctccgccagtggcagacaaatgtagatgtggcaaatgacttggccctgaaacttctccgggattattctgcagatgataccagaaaagtccacatgataacagagaatatcaatgcctcttggagaagcattcataaaagggtgagtgagcgagaggctgctttggaagaaactcatagattactgcaacagttccccctggacctggaaaagtttcttgcctggcttacagaagctgaaacaactgccaatgtcctacaggatgctacccgtaaggaaaggctcctagaagactccaagggagtaaaagagctgatgaaacaatggcaagacctccaaggtgaaattgaagctcacacagatgtttatcacaacctggatgaaaacagccaaaaaatcctgagatccctggaaggttccgatgatgcagtcctgttacaaagacgtttggataacatgaacttcaagtggagtgaacttcggaaaaagtctctcaacattaggtcccatttggaagccagttctgaccagtggaagcgtctgcacctttctctgcaggaacttctggtgtggctacagctgaaagatgatgaattaagccggcaggcacctattggaggcgactttccagcagttcagaagcagaacgatgtacatagggccttcaagagggaattgaaaactaaagaacctgtaatcatgagtactcttgagactgtacgaatatttctgacagagcagcctttggaaggactagagaaactctaccaggagcccagagagctgcctcctgaggagagagcccagaatgtcactcggcttctacgaaagcaggctgaggaggtcaatactgagtgggaaaaattgaacctgcactccgctgactggcagagaaaaatagatgagacccttgaaagactccaggaacttcaagaggccacggatgagctggacctcaagctgcgccaagctgaggtgatcaagggatcctggcagcccgtgggcgatctcctcattgactctctccaagatcacctcgagaaagtcaaggcacttcgaggagaaattgcgcctctgaaagagaacgtgagccacgtcaatgaccttgctcgccagcttaccactttgggcattcagctctcaccgtataacctcagcactctggaagacctgaacaccagatggaagcttctgcaggtggccgtcgaggaccgagtcaggcagctgcatgaagcccacagggactttggtccagcatctcagcactttctttccacgtctgtccagggtccctgggagagagccatctcgccaaacaaagtgccctactatatcaaccacgagactcaaacaacttgctgggaccatcccaaaatgacagagctctaccagtctttagctgacctgaataatgtcagattctcagcttataggactgccatgaaactccgaagactgcagaaggccctttgcttggatctcttgagcctgtcagctgcatgtgatgccttggaccagcacaacctcaagcaaaatgaccagcccatggatatcctgcagattattaattgtttgaccactatttatgaccgcctggagcaagagcacaacaatttggtcaacgtccctctctgcgtggatatgtgtctgaactggctgctgaatgtttatgatacgggacgaacagggaggatccgtgtcctgtcttttaaaactggcatcatttccctgtgtaaagcacatttggaagacaagtacagataccttttcaagcaagtggcaagttcaacaggattttgtgaccagcgcaggctgggcctccttctgcatgattctatccaaattccaagacagttgggtgaagttgcatcctttgggggcagtaacattgagccaagtgtccggagctgcttccaatttgctaataataagccagagatcgaagcggccctcttcctagactggatgagactggaaccccagtccatggtgtggctgcccgtcctgcacagagtggctgctgcagaaactgccaagcatcaggccaaatgtaacatctgcaaagagtgtccaatcattggattcaggtacaggagtctaaagcactttaattatgacatctgccaaagctgctttttttctggtcgagttgcaaaaggccataaaatgcactatcccatggtggaatattgcactccgactacatcaggagaagatgttcgagactttgccaaggtactaaaaaacaaatttcgaaccaaaaggtattttgcgaagcatccccgaatgggctacctgccagtgcagactgtcttagagggggacaacatggaaactcccgttactctgatcaacttctggccagtagattctgcgcctgcctcgtcccctcagctttcacacgatgatactcattcacgcattgaacattatgctagcaggctagcagaaatggaaaacagcaatggatcttatctaaatgatagcatctctcctaatgagagcatagatgatgaacatttgttaatccagcattactgccaaagtttgaaccaggactcccccctgagccagcctcgtagtcctgcccagatcttgatttccttagagagtgaggaaagaggggagctagagagaatcctagcagatcttgaggaagaaaacaggaatctgcaagcagaatatgaccgtctaaagcagcagcacgaacataaaggcctgtccccactgccgtcccctcctgaaatgatgcccacctctccccagagtccccgggatgctgagctcattgctgaggccaagctactgcgtcaacacaaaggccgcctggaagccaggatgcaaatcctggaagaccacaataaacagctggagtcacagttacacaggctaaggcagctgctggagcaaccccaggcagaggccaaagtgaatggcacaacggtgtcctctccttctacctctctacagaggtccgacagcagtcagcctatgctgctccgagtggttggcagtcaaacttcggactccatgggtgaggaagatcttctcagtcctccccaggacacaagcacagggttagaggaggtgatggagcaactcaacaactccttccctagttcaagaggaagaaatacccctggaaagccaatgagagaggacacaatgtaggaagtcttttccacatggcagatgatttgggcagagcgatggagtccttagtatcagtcatgacagatgaagaaggagcagaataaatgttttacaactcctgattcccgcatggtttttataatattcatacaacaaagaggattagacagtaagagtttacaagaaataaatctatatttttgtgaagggtagtggtattatactgtagatttcagtagtttctaagtctgttattgttttgttaacaatggcaggttttacacgtctatgcaattgtacaaaaaagttataagaaaactacatgtaaaatcttgatagctaaataacttgccatttctttatatggaacgcattttgggttgtttaaaaatttataacagttataaagaaagattgtaaactaaagtgtgctttataaaaaaaagttgtttataaaaacccctaaaaacaaaacaaacacacacacacacacatacacacacacacacaaaactttgaggcagcgcattgttttgcatccttttggcgtgatatccatatgaaattcatggctttttctttttttgcatattaaagataagacttcctctaccaccacaccaaatgactactacacactgctcatttgagaactgtcagctgagtggggcaggcttgagttttcatttcatatatctatatgtctataagtatataaatactatagttatatagataaagagatacgaatttctatagactgactttttccattttttaaatgttcatgtcacatcctaatagaaagaaattacttctagtcagtcatccaggcttacctgcttggtctagaatggatttttcccggagccggaagccaggaggaaactacaccacactaaaacattgtctacagctccagatgtttctcattttaaacaactttccactgacaacgaaagtaaagtaaagtattggatttttttaaagggaacatgtgaatgaatacacaggacttattatatcagagtgagtaatcggttggttggttgattgattgattgattgatacattcagcttcctgctgctagcaatgccacgatttagatttaatgatgcttcagtggaaatcaatcagaaggtattctgaccttgtgaacatcagaaggtattttttaactcccaagcagtagcaggacgatgatagggctggagggctatggattcccagcccatccctgtgaaggagtaggccactctttaagtgaaggattggatgattgttcataatacataaagttctctgtaattacaactaaattattatgccctcttctcacagtcaaaaggaactgggtggtttggtttttgttgcttttttagatttattgtcccatgtgggatgagtttttaaatgccacaagacataatttaaaataaataaactttgggaaaaggtgtaagacagtagccccatcacatttgtgatactgacaggtatcaacccagaagcccatgaactgtgtttccatcctttgcatttctctgcgagtagttccacacaggtttgtaagtaagtaagaaagaaggcaaattgattcaaatgttacaaaaaaacccttcttggtggattagacaggttaaatatataaacaaacaaacaaaaattgctcaaaaaagaggagaaaagctcaagaggaaaagctaaggactggtaggaaaaagctttactctttcatgccattttatttctttttgatttttaaatcattcattcaatagataccaccgtgtgacctataattttgcaaatctgttacctctgacatcaagtgtaattagcttttggagagtgggctgacatcaagtgtaattagcttttggagagtgggttttgtccattattaataattaattaattaacatcaaacacggcttctcatgctatttctacctcactttggttttggggtgttcctgataattgtgcacacctgagttcacagcttcaccacttgtccattgcgttattttctttttcctttataattctttctttttccttcataattttcaaaagaaaacccaaagctctaaggtaacaaattaccaaattacatgaagatttggtttttgtcttgcatttttttcctttatgtgacgctggaccttttctttacccaaggatttttaaaactcagatttaaaacaaggggttactttacatcctactaagaagtttaagtaagtaagtttcattctaaaatcagaggtaaatagagtgcataaataattttgttttaatctttttgtttttcttttagacacattagctctggagtgagtctgtcataatatttgaacaaaaattgagagctttattgctgcattttaagcataattaatttggacattatttcgtgttgtgttctttataaccaccgagtattaaactgtaaatcataatgtaactgaagcataaacatcacatggcatgttttgtcattgttttcaggtactgagttcttacttgagtatcataatatattgtgttttaacaccaacactgtaacatttacgaattatttttttaaacttcagttttactgcattttcacaacatatcagacttcaccaaatatatgccttactattgtattatagtactgctttactgtgtatctcaataaagcacgcagttatgttac

SEQ ID NO: 12592 - DNA, 2909 bp, Homo sapiens
tggccgcgggagccgggacggcgggccccgcttccggcccgggcgtcgtgcgtgacccagcggcgtcacagccgaggaagcggcccggccgggagggcggggagggcgcgcggcgatcggacacgatggcgggaggaggcgggagtagcgacggcagcgggcgggcagctggcaggcgggcgtcccgcagtagcgggcgggcccggcgggggcgccacgagccggggctggggggcccggcggagcgcggcgcgggggaggcacggctggaagaggcagtcaatcgctgggtgctcaagttctacttccacgaggcgctgcgggcctttcggggtagccggtacggggacttcagacagatccgggacatcatgcaggctttgcttgtcaggcccttggggaaggagcacaccgtgtcccgattgctgcgggttatgcagtgtctgtcgcggattgaagaaggggaaaatttagactgttcctttgatatggaggctgagctcacaccactggaatcagctatcaatgtgctggagatgattaaaacggaatttacactgacagaagcagtggtcgaatccagtagaaaactggtcaaggaagctgctgtcattatttgtatcaaaaacaaagaatttgaaaaggcttcaaaaattttgaaaaaacatatgtccaaggaccccacaactcagaagctgagaaatgatctcctgaatattattcgagaaaagaacttggcccatcctgttatccagaacttttcatatgagaccttccagcagaagatgctgcgcttcctggagagccacctggatgacgccgagccctacctcctcacgatggccaaaaaggctttgaaatctgagtccgctgcctcaagtacagggaaggaagataaacagccagcaccagggcctgtggaaaagccacccagagaacccgcaaggcagctacggaatcctccaaccaccattggaatgatgactctgaaagcagctttcaagactctgtctggtgcacaggattctgaggcagcctttgcaaaactggaccagaaggatctggttcttcctactcaagctctcccagcatcaccagccctcaaaaacaagagacccagaaaagatgaaaacgaaagttcagccccggctgacggtgagggtggctcggaactgcagcccaagaacaagcgcatgacaataagcagattggtcttggaggaggacagccagagtactgagcccagcgcaggcctcaactcctcccaggaggccgcttcagcgccaccatccaagcccaccgttctcaaccaacccctccctggagagaagaatcccaaagtacccaaaggcaagtggaacagctctaatggggttgaagaaaaggagacttgggtggaagaggatgaactgtttcaagttcaggcagcaccagatgaagacagtacaaccaatataacaaaaaagcagaagtggactgtagaagaaagcgagtgggtcaaggctggagtgcagaaatatggggaaggaaactgggctgccatttctaaaaattacccatttgttaaccgaacagctgtgatgattaaggatcgctggcggaccatgaaaagacttggcatgaactgaaacaggctttcatttccacagaattcacaggagcatggttcctaataatagcccctgatagtctgctctttctttctttttcttttttttttttttttgagacagagtctcgctctgtcacccaggctggagtgcagtggcgtgatctcggctcactgcgacctccgtctcccgggctcacgccattctcctgcctcagcctcccgagtagctgggactacaggcgcccgccatcacgcccggctaatgttttgtatttttagtagagacggggtttcaccgtgttagccaggatggtctcgatctcctgacctcgtgatccacccaactcggcctcccaaagtgctgggattacaggcatgagccaccgcgcctggcatctgctgtttctttcagaagctgggctgggatgagaattttgggcaacctccttcgacgtgggggaggtcccatttccacttcatcactgttggagatcatggagctaagaagcagagccaagtccacccatgtccttggcagagatgacaggcacacagcttgtgcagtgccagaatatcattagcgtttcccttctttagtggtttgcttaaatttaaatccctggtaatctgtagaaccttctcctaggaaatggtgaagtctattaggagccacttgtgactccatgacctgttaaaaccagcaatgtgagtattatttggagtaaatttgttccacgtcaagttctggccttctgatgcaaatgcaaaggaacttagtctgttatgaacccaggttgatgacagaccagtccttgtggaataagattccctttaaaaactctttagccagtcgtgacatcaaccctagacctgtctgccttggcatttgctgtcaacatctgctgggctatgtaggcaggttaatcctccacttctcatgtggttgaaccagtgtgttttttggtaaaatggtgattgtagataagattagttccctgatcccctgccccctgtcccctgcctcttttcccaattcccttccttatgctggacttttaaagcttaaaaaaaatccgattgaatataaatgcctaatttcattctttgtgaaatggttgcttcctcctgattccctaattgtgctgtgttcgtgtcttgcactggaattcaacattcccttctccttttgtactgtgttgtgcttgctgtctctcccggacacccttaaagactgtctttttagcaaaaaatttcagtaaagtgttttctgtaatctttttttaaaaaaaaaaaaaaa

SEQ ID NO: 12593 - DNA, 2106 bp, Homo sapiens
accacggccctaaggagggcggaagtcgtcgctccgtggagcctcctcctctcgcgagaggcgcaaggcgtggagtcgacggctggagagaagccgggagcgagcccaggcggcagtcttgattcccttttggccagcagtttttaggtctgtcagtactgcactgcaagaatggcagattttgggatctctgctggccagtttgtggcagtggtctgggataagtcatccccagtggaggctctgaaaggtctggtggataagcttcaagcgttaaccggcaatgagggccgcgtgtctgtggaaaacatcaagcagctgttgcaatctgcccacaaagaatccagctttgacattattttgtcaggtttagtcccaggaagcaccactctgcacagtgctgagattttggctgaaatcgcccggatccttcggcctggtggatgtctttttctgaaggagccagtagagacagctgtagataacaatagcaaagtgaagacagcatctaagctgtgttcagccctgactctttctggtcttgtggaagtgaaagagctgcagcgggagcccctaacccctgaggaagtacagtctgttcgagaacaccttggtcatgaaagtgacaacctgctgtttgttcagatcacaggcaaaaaaccaaactttgaagtgggttcttctaggcagcttaagctttccatcaccaagaagtcttctccttcagtgaaacctgctgtggaccctgctgctgccaagctgtggaccctctcagccaacgatatggaggacgacagcatggatctcattgactcagatgagctgctggatccagaagatttgaagaagccagatccagcttccctgcgggctgcttcttgtggggaagggaaaaagaggaaggcctgtaagaactgcacctgtggccttgccgaagaactggaaaaagagaagtcaagggaacagatgagctcccaacccaagtcagcttgtggaaactgctacctgggcgatgccttccgctgtgccagctgcccctaccttgggatgccagccttcaaacctggggaaaaggtgcttctgagtgatagcaatcttcatgatgcctaggaggttcctgacatgggacccatctgctcctccagccaactcctgtccctcacatcccaccatggtggctcctcccacctcctctggatttgttcactctgagatctgtttgcagagtgggtgcttagcagacagagtgaagctggctggggggcacagtggtgtgtagtgctgctgtgtatcaaaagaccaaggtattatgggacctggtttcagaatgggatgggtttcttcacctcatgttaagagaagggagtgtgtcctgaagaagcccttcttctgatgttaaaatgctgaccagaacgctcttgagcccaggcatcgttgagcattaacactctgtgacagagctgcagacccctgccttgagtctcatctcagcaatgctgccaccctcttgtctttcagagttgttagtttactccattctttgtgacacgagtcaagtggctcacaacctcctcagggcaccagaggactcactcactggttgctgtgatgatatccagtgtccctctgcccccttccatccccaaccacatttgactgtagcattgcatctgtgtcctgttgtcatttatgttaaccttcaggtattaaacttgctgcatatcttgacatatcttgagattctgcatgtcttgtaaagagaggggatgtgcatttgtgtgtgatgttggatagtcatccacgctcagtttggaccattggaggaacttagtgtcacgcacaaatggggctattcctacgcttagaatagggcttgtctgcccactttagaagagtccaggttggtgagcatttagagggaagcagggcagaactctgaacgacaatacgtctctctgagcagagacccctttgttcttgttatccacccatatggacttggaatcaatcttgccaaatatttggagagattgtgtggatttaagagacctggatttttatattttaccagtaaataaaagttttcattgatatctgtccttgaaa

SEQ ID NO: 12594 - DNA, 1960 bp, Homo sapiens
gtaacaggcaggaagaaagctttctgtactacaccagagggttggggctgtggatttagctactctcacctgaggctactgagcaagctgtcatgcaccatgagacaaagcccaagctgtcccaccaggcagtaagtgtggagaggttcaggcacatggcatagctgctatttcgcacaattttcactacaccagtggtgaccaaatagaagaggttcatccatacacagaacctggtgaagagctggaggcagaaagaagtgtctatgtggagacgcaactgaaacaaaggtggcacagcaactgttccaatcccgtgtctttcctcatggcttcccaggagtttgaggttgaagctattgttgacaaaagacaggataaaaatgggaatacacagtatttggttcggtggaaaggttatgacaaacaggatgacacttgggaaccagagcagcacctcatgaactgtgaaaaatgtgtacatgattttaatagacgacagactgaaaaacagaaaaaactgacatggactacaaccagtagaattttttcaaacaatgccagaagaagaacttccagatctacaaaagcaaactattctaagaactctcctaaaactccagtgactgataaacaccacaggtccaaaaactgcaagttatttgctgccagcaagaacgttaggagaaaggcagcttcaactctctccgacacaaagaatatggagataataaattcaactattgagacccttgcacctgacagcccctttgaccacaagaaaactgtgagtggctttcagaaacttgagaaactggaccctattgcagcagatcagcaggacacggtggtcttcaaggtgacagaagggaaactcctccgggaccctttgtcacatcctggtgcagaacagactggaatacagaacaagactcagatgcacccactaatgtcgcagatgtctggctcagttactgcttctatggccacaggttcagctacccgaaagggtatagtggtattaatagacccattagcagccaatgggacaacagacatgcatacctcagttccaagagtgaaaggtgggcaaagaaatattactgatgacagcagaggccagccttttatcaagaagatgcacttcaccataaggctaacagaaagtgccatcacatacagagacattgtagtgaagaaagaggatggattcacccagatagtgctatcaactagatcgacagaaaaaaatgcactgaatacagaagtaattaaagaaatggttaatgctctgaatagcgctgctgcagatgacagcaagctcgtgctgttcagtgcagctggaagtgtcttttgctgcggtcttgattttgggtactttgtgaggcacttaaggaatgacagaaacacagcaagccttgaaatggtggacaccatcaagaactttgtgaatacttttattcaatttaaaaagcctattgttgtatcagtcaatggccctgccattggactaggtgcatccatcctgcctctttgtgatctcgtgtgggctaatgaaaaggcttggttccaaaccccttatacgacctttggacagagtccagatggctgttcttctattacattccccaaaatgatgggtaaagcatctgccaatgaaatgttaattgctgggcgaaagctgacagcacgggaggcatgcgccaaaggcctggtctctcaggtatttttgactggaactttcacccaagaggttatgattcaaattaaggagcttgcctcatacaatgcaattgtactggaagaatgtaaggccctcgttcgctgtaatattaagttggagttggaacaggccaatgagagagagtgtgaggtgctgaggaagatctggagctcagcccaagggatagaatccatgttaaagtatgttgaaaataaaattgatgagttttaattgtca

SEQ ID NO: 12595 - DNA, 2321 bp, Homo sapiens
ctcttcaatctcagcacctccaagggtcagcacctcccctccggctccctccgctaccgcgggccggaacttttgtcgataggaacgggtttgcacagttgagtgttgtcggccggcgtgaaggagactagggggccatcctcttcctttcgccgtcgccgccgcggagcggagtcgagccgagctgatttgatcgaggagcgcggttaccggacgggctgggtctatggtcgctccgcgggccgctccgccggctggtgcttttttatcagggcaagctgtgttccatggcagggaacttttggcagagctcccactatttgcaatggattttggataaacaagatctgttgaaggagcgccaaaaggatttaaagtttctctcagaggaagaatattggaagttacaaatattttttacaaatgttatccaagcattaggtgaacatcttaaattaagacaacaagttattgccactgctacggtatatttcaagagattctatgccaggtattctctgaaaagtatagatcctgtattaatggctcctacatgtgtgtttttggcatccaaagtagaggaatttggagtagtttcaaatacaagattgattgctgctgctacttctgtattaaaaactagattttcatatgcctttccaaaggaatttccttataggatgaatcatatattagaatgtgaattctatctgttagaactaatggattgttgcttgatagtgtatcatccttatagacctttgctccagtatgtgcaggacatgggccaagaagacatgttgcttccccttgcatggaggatagtgaatgatacctacagaacggatctttgcctactgtatcctcctttcatgatagctttagcttgcctacatgtagcctgtgttgtacagcagaaagatgccaggcaatggtttgctgagctttctgtggatatggaaaagattttggaaataatcagggttattttaaaactatatgagcagtggaagaatttcgatgagagaaaagagatggcaaccattcttagtaagatgccaaaaccaaaaccacctccaaacagtgaaggagagcagggtccaaatggaagtcagaactctagctacagccaatcttaaaacattccgaagaattccatagtggaccacttggaaataaaccattggacagatttcagtaatgtcttcagtggaacacaaatgaaaatgaatagcttgtttctgtcaagcatattggaaagtgattttatttttgcaaaataagtttttctttaatatgattctagtacataattgattaaaatctcttgattataaatgtttggaaaggttctaaggggacctacagacagacatacatagacatttcaaaattaatagcttttgattagtataatatttcttaatttggataataaaaattgtagctttttattaagccaggaaacatgaagcataatttgtttaaaattctctttggtcattgagggaccaaaaaaggacgtaaaatttacagtcaatctatgagggtttttttccctccataagtttaactttaaaactgtatttaaggaatcaaatcttacaaaatcctggaagattttggtaatgatgttgataatttcagggaaattaatcaagtacctatattgatttaaaagtgtattttattcagtagtttgaggatcttgccatggaagatactagcccagcctagcagaaaagtgcaatatgtatagcatactttgacattttaaacatgatagtccataaccattttgaaatgctgggcaaactacatgaagttatttataattaattcacagctaatcaggcattttgaaagcttaattggattcaaaaaccataatgttggaatttggtaaaattttaatgttgatttttactgtgaaaaggtttttataagatatacacaccctagtttaatgttgtgtcttggtgtggatttacagatttactacaggtattctgaaccaggaacacaatcaggtttcaggccagtttgatactggctgtccttaattctaatatgagagtaggacatcatactaaatgttatgtcagtgggactgtactgtctgtggaacttagcaaattaatcattttcttcagacttgaaggagagtgataaataaaatttggagtcataggatattgatgcacaatttaaggattaaacatttttaatcaattgtggatgatggcttattaaatgttgacttcctagtataaaactgcaagaataaaagtaacttctccagctgtaaaaaaaaaaaaaaa

SEQ ID NO: 12596 - DNA, 3153 bp, Homo sapiens
aatgctgtgtatttacttgaactcatacatcagaagatagtgatcttaacacattatgtttgggaagtttaaaatatctcttccaaatgcttgatgaaaaaggtgggaggatcacttgagccagggagttgaaggctgcagtgagccctgtttttgccaccacactccagcttggagaggtgaggggctgtcctctggatggcaattgatgaaggatgagtctgtgccctgaaggggagatcagtccagcccagctccccactgctgcctcgtgtgtggtggcttctccaggagagaggattgattcctaaagactcatgttacgtgaggaagcagctcagaagaggaaaggaaaggagccaggcatggctcttcctcagggacgcttgactttccgggatgtggctatagaattctcattggcagagtggaaatgcctgaacccttcacagagggctttgtacagggaagtgatgttggagaactacaggaacctggaggctgtggatatctcttccaaatgcatgatgaaggaggtcttgtcaacagggcaaggcaatacagaagtgatccacacagggacattgcaaagacatgaaagtcatcacattggagatttttgcttccaggaaattgagaaagaaattcatgacattgagtttcagtgtcaagaagatgaaagagatggccttgaagcacccatgacaaaaataaaaaagttgactggtagcacagaccaacatgatcacaggcatgctggaaacaagcctattaaagatcagcttggatcaagcttttattcacatctgcctgaactccacatatttcagatcaaaggtgaaattggtaatcaacttgagaagtctactaatgatgctccctcagtttcaacattccaaagaatttcctgtaggccccaaacccagatttctaataactatgggaataatcccctgaattcttcattactcccacaaaaacaggaagtacacatgagagaaaaatctttccaatgtaataagagtggcaaagcctttaattgtagctcactcttaaggaaacaccagataatccatttaggagacaaacaatataaatgtgatgtatgtggcaagctctttaatcacgagcaataccttgcatgccatgatagatgtcacactgttgagaaaccttacaagtgtaaagagtgtggcaagaccttcagtcaggagtcatcccttacctgccatcgtagacttcatactggagtaaaacgttacaattgtaatgagtgtggcaagatctttggtcaaaattcagcccttctaattgataaggcaattgatactggagaaaatccttacaagtgtaatgaatgtgacaaagcttttaatcaacaatcacaactttcacatcatagaattcatactggagagaaaccttacaaatgtgaagaatgtgacaaagtttccagtcggaaatcaaccattgagacacataagagaattcatactggagagaaaccatacagatgtaaggtttgtgacacagctttcacgtggcattcacagctggctcgacatagaagaattcatactgcaaagaaaacttataaatgtaatgagtgtggcaagaccttcagtcacaagtcatcccttgtatgccatcatagacttcatggtggagagaaatcttacaaatgtaaggtttgtgacaaggcttttgtgtggagttcacaactggcaaaacatactagaattgactgtggagaaaaaccttacaagtgtaatgaatgtgggaagacctttggtcaaaattcagatcttttaattcataagtcaattcatactggggagcaaccttacaaatgtgatgaatgtgaaaaggttttcagtcgtaaatcaagccttgagacacataagataggtcatactggagagaaaccatacaaatgtaaggtttgtgacaaggcttttgcgtgtcattcctatctggcaaaacatactagaattcatagtggagagaaaccttacaagtgtaatgagtgcagcaagaccttcagtcacaggtcataccttgtatgccatcatagagttcatagtggtgagaaaccttacaagtgtaatgagtgcagcaagaccttcagtcgcaggtcatcccttcattgccatcgtagacttcatagtggtgagaaaccttacaagtgtaatgagtgtggcaataccttccgtcactgctcatcccttatataccatcgtagacttcatactggagagaaatcttacaaatgtacaatttgtgacaaggctttcgtgcgtaattcactcctgtcaagacataccagaattcacactgcagagaaaccttacaagtgtaatgaatgtgggaaggcttttaatcaacaatcacacctttcacgtcatcatagaattcatactggagagaaaccttagaaatgtgaagcatgtgacaaagtttccatttggaaatcacaccttaaagacataggagaatttatactggagagaaagcttacaaatgtaaggtttctgacaagacttgggagtgattcacacctggaacaacatactggacttcacactggagagaaaccttacaagtgtaatgagtgtggcaaagcctttggcaagcagtcaacacttattcaccatcaggcaattcatggtgtagggaaacttgactaatgtaatgattgtcacaaagtcttcagtaatgctacaacgattacaaatcattggagaatccataatgaagagagatcttacaagtgtaataaatgtggcaaatttttcagagatcgttcacatattgcaggtcatcggtgaactcatactggagagaaaccttacaaatgtcatgactgtgccaaggtcttcagtcaagcttcatcctatgcaaaacataggagaatttatacaggagagaaacctcacaagtgtgatgattgtggcaaagcctttgcttcacgttcacacgtcattagacatcagagaatctatactggacagaaatcttacaaatgtcatcagtgtggcaaggtcttcagtccaagatcactccatgcagaacatcagaaaattcatttttgagataaccgttcccaatgaaatgagtatagcaaaccatcaagcattaattgacattggagtc

SEQ ID NO: 12597 - DNA, 2174 bp, Homo sapiens
cgtgatctcgggtttgtcgggctgaaatgtggcgggtctcggaaggttccgacctcagtaaagagagctaacgtgtattcttctttttcttagatgctgagatgaatcgtcacctgtgtgtttggctttttagacatccatctcttaatggttacctccagtgtcacatccagctccattctcatcaatttagacagatacatcttgatacaaggctgcaagtttttagacaaaacaggaattgcattcttcatctgttaagtaagaattggtccaggagatattgccatcaagacaccaagatgctctggaagcataaagcactacagaaatatatggagaacctgagtaaggagtaccaaacacttgagcaatgtctgcagcatatccctgtgaatgaggaaaaccgaaggtccttgaacagaaggcatgctgagttggcacctcttgcagccatttaccaagaaattcaggagactgaacaagcaattgaagaattagaatcaatgtgtaaaagcctaaataaacaagatgaaaagcagttacaagaacttgcactggaagaaaggcaaaccattgatcaaaaaatcaacatgttgtacaatgagcttttccagagccttgtgccaaaggagaaatatgacaaaaatgatgttattttagaggtgacagctggaaggactactggaggtgacatctgccaacaatttacccgagaaatatttgacatgtaccagaattattcgtgctataaacactggcaatttgaacttctgaattatacaccagcagattatggtggactacatcatgcagccgcccgaatttccggtgacggtgtctataagcatttgaagtatgagggtgggattcaccgagttcagcgcatccccgaggtgggcctgtcctcaaggatgcagcgcattcacacaggaacgatgtcggttattgtccttcctcagccagatgaggtggatgtgaaattggaccccaaggatttgcgaatagatacatttcgagccaaaggagcaggagggcagcatgttaataaaactgatagtgccgtcagacttgtccacatccccacagggctagtagtagaatgccaacaagaaagatcacagataaaaaataaagaaatagcctttcgtgtgttgagagctagactctaccagcagattattgagaaagacaagcgtcagcaacaaagtgctagaaaactgcaggtgggaacaagagcccagtcagagcgaattcggacatataatttcacccaggatagagtcagtgaccacaggatagcatatgaagttcgtgatattaaggaatttttatgtggtgggaagggcctggatcagctaattcagagactgcttcaatcagcagatgaagaagccattgctgaacttttggatgaacaccttaaatcagcaaaataaatactaacttattattatttatgattatataaatgaaatggacctatatcaagaggcagactgaagcttggaaatcattatgaatatttgtaaattacagctttaagaacacattacacataaatatatgttttgtaattaatcgaagtcacatttcctgacctaagaatttattttaggtttcctgtaaagtacaatccaactcatcaagtagaaaataagcatgcatcattgaaaagagaaagtattgagaattgattgtgtcatttaggacaagtcacttgttctctttatatgccttttttccccagccatctatgaattaatttaaatatatttttaatctactacttcaggaaaatatggtaaaatttagtaaaatatgaattttagacttccttataaaccttttatttaaatacaaagtaccttggcctatagtggatgcttatgcctgtaatcccagtgctttgaagggccaaagggggaagatctcttgaggtaagaatttgagaccagcctgggcaaaatagaccccatgtctacaaaaaaactcaaaacataaagaaaaaccataatactgttaatcatgttaaagttaagacttagactgcaacttttaaataaaaattatgaagaatatgagtcattcaataacaatgagcatctgggtacagacagtaaagccctttgattgctgtatgaattccacactatataaacaataagctgata

SEQ ID NO: 12598 - DNA, 10302 bp, Homo sapiens
atggccaagtatggagaacatgaagccagtcctgacaatgggcagaacgaattcagtgatatcattaagtccagatctgatgaacacaatgacgtacagaagaaaacctttaccaaatggataaatgctcgattttcaaagagtgggaaaccacccatcaatgatatgttcacagacctcaaagatggaaggaagctattggatcttctagaaggcctcacaggaacatcactgccaaaggaacgtggttccacaagggtacatgccttaaataacgtcaacagagtgctgcaggttttacatcagaacaatgtggaattagtgaatatagggggaactgacattgtggatggaaatcacaaactgactttggggttactttggagcatcattttgcactggcaggtgaaagatgtcatgaaggatgtcatgtcggacctgcagcagacgaacagtgagaagatcctgctcagctgggtgcgtcagaccaccaggccctacagccaagtcaacgtcctcaacttcaccaccagctggacagatggactcgcctttaatgctgtcctccaccgacataaacctgatctcttcagctgggataaagttgtcaaaatgtcaccaattgagagacttgaacatgccttcagcaaggctcaaacttatttgggaattgaaaagctgttagatcctgaagatgttgccgttcggcttcctgacaagaaatccataattatgtatttaacatctttgtttgaggtgctacctcagcaagtcaccatagacgccatccgtgaggtagagacactcccaaggaaatataaaaaagaatgtgaagaagaggcaattaatatacagagtacagcgcctgaggaggagcatgagagtccccgagctgaaactcccagcactgtcactgaggtcgacatggatctggacagctatcagattgcgttggaggaagtgctgacctggttgctttctgctgaggacactttccaggagcaggatgatatttctgatgatgttgaagaagtcaaagaccagtttgcaacccatgaagcttttatgatggaactgactgcacaccagagcagtgtgggcagcgtcctgcaggcaggcaaccaactgataacacaaggaactctgtcagacgaagaagaatttgagattcaggaacagatgaccctgctgaatgctagatgggaggctcttagggtggagagtatggacagacagtcccggctgcacgatgtgctgatggaactgcagaagaagcaactgcagcagctctccgcctggttaacactcacagaggagcgcattcagaagatggaaacttgccccctggatgatgatgtaaaatctctacaaaagctgctagaagaacataaaagtttgcaaagtgatcttgaggctgaacaggtgaaagtaaattcactaactcacatggtggtcattgttgatgaaaacagtggtgagagcgctacagctatcctagaagaccagttacagaaacttggtgagcgctggacagcagtatgccgttggactgaagaacgctggaataggttacaagaaatcaatatattgtggcaggaattattggaagaacagtgcttgttgaaagcttggttaaccgaaaaagaagaggctttaaataaagtccagacaagcaacttcaaagaccaaaaggaactaagtgtcagtgttcgacgtctggctattttgaaggaagacatggaaatgaagcgtcaaacattggatcagctgagtgagattggccaggatgtgggacaattacttgataattccaaggcatctaagaagatcaacagtgactcagaggaactgactcaaagatgggattctttggttcagagactagaagattcctccaaccaggtgactcaggctgtagcaaagctggggatgtctcagattcctcagaaggaccttttggagactgttcgtgtaagagaacaagcaattacaaaaaaatctaagcaggaactgcctcctcctcctcccccaaagaagagacagatccatgtggatattgaagctaagaaaaagtttgatgctataagtgcagagctgttgaactggattttgaaatggaaaactgccattcagaccacagagataaaagagtatatgaagatgcaagacacttccgaaatgaaaaagaagttgaaggcattagaaaaagaacagagagaaagaatccccagagcagatgaattaaaccaaactggacaaatccttgtggagcaaatgggaaaagaaggccttcctactgaagaaataaaaaatgttctggagaaggtttcatcagaatggaagaatgtatctcaacatttggaagatctagaaagaaagattcagctacaggaagatataaatgcttatttcaagcagcttgatgagcttgaaaaggtcatcaagacaaaggaggagtgggtaaaacacacttccatttctgaatcttcccggcagtccttgccaagcttgaaggattcctgtcagcgggaattgacaaatcttcttggccttcaccccaaaattgaaatggctcgtgcaagctgctcggccctgatgtctcagccttctgccccagattttgtccagcggggcttcgatagctttctgggccgctaccaagctgtacaagaggctgtagaggatcgtcaacaacatctagagaatgaactgaagggccaacctggacatgcatatctggaaacattgaaaacactgaaagatgtgctaaatgattcagaaaataaggcccaggtgtctctgaatgtccttaatgatcttgccaaggtggagaaggccctgcaagaaaaaaagacccttgatgaaatccttgagaatcagaaacctgcattacataaacttgcagaagaaacaaaggctctggagaaaaatgttcatcctgatgtagaaaaattatataagcaagaatttgatgatgtgcaaggaaagtggaacaagctaaaggtcttggtttccaaagatctacatttgcttgaggaaattgctctcacactcagagcttttgaggccgattcaacagtcattgagaagtggatggatggcgtgaaagacttcttaatgaaacagcaggctgcccaaggagacgacgcaggtctacagaggcagttagaccagtgctctgcatttgttaatgaaatagaaacaattgaatcatctctgaaaaacatgaaggaaatagagactaatcttcgaagtggtccagttgctggaataaaaacttgggtgcagacaagactaggtgactaccaaactcaactggagaaacttagcaaggagatcgctactcaaaaaagtaggttgtctgaaagtcaagaaaaagctgcgaacctgaagaaagacttggcagagatgcaggaatggatgacccaggccgaggaagaatatttggagcgggattttgagtacaagtcaccagaagagcttgagagtgctgtggaagagatgaagagggcaaaagaggatgtgttgcagaaggaggtgagagtgaagattctcaaggacaacatcaagttattagctgccaaggtgccctctggtggccaggagttgacgtctgagctgaatgttgtgctggagaattaccaacttctttgtaatagaattcgaggaaagtgccacacgctagaggaggtctggtcttgttggattgaactgcttcactatttggatcttgaaactacctggttaaacactttggaagagcggatgaagagcacagaggtcctgcctgagaagacggatgctgtcaacgaagccctggagtctctggaatctgttctgcgccacccggcagataatcgcacccagattcgagagcttggccagactctgattgatggggggatcctggatgatataatcagtgagaaactggaggctttcaacagccgatatgaagatctaagtcacctggcagagagcaagcagatttctttggaaaagcaactccaggtgctgcgggaaactgaccagatgcttcaagtcttgcaagagagcttgggggagctggacaaacagctcaccacatacctgactgacaggatagatgctttccaagttccacaggaagctcagaaaatccaagcagagatctcagcccatgagctaaccctagaggagttgagaagaaatatgcgttctcagcccctgacctccccagagagtaggactgccagaggaggaagtcagatggatgtgctacagaggaaactccgagaggtgtccacaaagttccagcttttccagaagccagctaacttcgagcagcgcatgctggactgcaagcgtgtgctggatggcgtgaaagcagaacttcacgttctggatgtgaaggacgtagaccctgacgtcatacagacgcacctggacaagtgtatgaaactgtataaaactttgagtgaagtcaaacttgaagtggaaactgtgattaaaacaggaagacatattgtccagaaacagcaaacggacaacccaaaagggatggatgagcagctgacttccctgaaggttctttacaatgacctgggcgcacaggtgacagaaggaaaacaggatctggaaagagcatcacagttggcccggaaaatgaagaaagaggctgcttctctctctgaatggctttctgctactgaaactgaattggtacagaagtccacttcagaaggtctgcttggtgacttggatacagaaatttcctgggctaaaaatgttctgaaggatctggaaaagagaaaagctgatttaaataccatcacagagagtagtgctgccctgcaaaacttgattgagggcagtgagcctattttagaagagaggctctgcgtccttaacgctgggtggagccgagttcgtacctggactgaagattggtgcaataccttgatgaaccatcagaaccagctagaaatatttgatgggaacgtggctcacataagtacctggctttatcaagctgaagctctattggatgaaattgaaaagaaaccaacaagtaaacaggaagaaattgtgaagcgtttagtatctgagctggatgatgccaacctccaggttgaaaatgtccgcgatcaagcccttattttgatgaatgcccgtggaagctcaagcagggagcttgtagaaccaaagttagctgagctgaataggaactttgaaaaggtgtctcaacatatcaaaagtgccaaattgctaattgctcaggaaccattataccaatgtttggtcaccactgaaacatttgaaactggtgtgcctttctctgacttggaaaaattagaaaatgacatagaaaatatgttaaaatttgtggaaaaacacttggaatccagtgatgaagatgaaaagatggatgaggagagtgcccagattgaggaagttctacaaagaggagaagaaatgttacatcaacctatggaagataataaaaaagaaaagatccgtttgcaattattacttttgcatactagatacaacaaaattaaggcaatccctattcaacagaggaaaatgggtcaacttgcttctggaattagatcatcacttcttcctacagattatctggttgaaattaacaaaattttactttgcatggatgatgttgaattatcgcttaatgttccagagctcaacactgctatttacgaagacttctcttttcaggaagactctctgaagaatatcaaagaccaactggacaaacttggagagcagattgcagtcattcatgaaaaacagccagatgtcatccttgaagcctctggacctgaagccattcagatcagagatacacttactcagctgaatgcaaaatgggacagaattaatagaatgtacagtgatcggaaaggttgttttgacagggcaatggaagaatggagacagttccattgtgaccttaatgacctcacacagtggataacagaggctgaagaattactggttgatacctgtgctccaggtggcagcctggacttagagaaagccaggatacatcagcaggaacttgaggtgggcatcagcagccaccagcccagttttgcagcactaaaccgaactggggatgggattgtgcagaaactctcccaggcagatggaagcttcttgaaagaaaaactggcaggtttaaaccaacgctgggatgcaattgttgcagaagtgaaggataggcagccaaggctaaaaggagaaagtaagcaggtgatgaagtacaggcatcagctagatgagattatctgttggttaacaaaggctgagcatgctatgcaaaagagatcaaccaccgaattgggagaaaacctgcaagaattaagagacttaactcaagaaatggaagtacatgctgaaaaactcaaatggctgaatagaactgaattggagatgctttcagataaaagtctgagtttacctgaaagggataaaatttcagaaagcttaaggactgtaaatatgacatggaataagatttgcagagaggtgcctaccaccctgaaggaatgcatccaggagcccagttctgtttcacagacaaggattgctgctcatcctaatgtccaaaaggtggtgctagtatcatctgcgtcagatattcctgttcagtctcatcgtacttcggaaatttcaattcctgctgatcttgataaaactataacagaactagccgactggctggtattaatcgaccagatgctgaagtccaacattgtcactgttggggatgtagaagagatcaataagaccgtttcccgaatgaaaattacaaaggctgacttagaacagcgccatcctcagctggattatgtttttacattggcacagaatttgaaaaataaagcttccagttcagatatgagaacagcaattacagaaaaattggaaagggtcaagaaccagtgggatggcacccagcatggcgttgagctaagacagcagcagcttgaggacatgattattgacagtcttcagtgggatgaccatagggaggagactgaagaactgatgagaaaatatgaggctcgactctatattcttcagcaagcccgacgggatccactcaccaaacaaatttctgataaccaaatactgcttcaagaactgggtcctggagatggtatcgtcatggcgttcgataacgtcctgcagaaactcctggaggaatatgggagtgatgacacaaggaatgtgaaagaaaccacagagtacttaaaaacatcatggatcaatctcaaacaaagtattgctgacagacagaacgccttggaggctgagtggaggacggtgcaggcctctcgcagagatctggaaaacttcctgaagtggatccaagaagcagagaccacagtgaatgtgcttgtggatgcctctcatcgggagaatgctcttcaggatagtatcttggccagggaactcaaacagcagatgcaggacatccaggcagaaattgatgcccacaatgacatatttaaaagcattgacggaaacaggcagaagatggtaaaagctttgggaaattctgaagaggctactatgcttcaacatcgactggatgatatgaaccaaagatggaatgacttaaaagcaaaatctgctagcatcagggcccatttggaggccagcgctgagaagtggaacaggttgctgatgtccttagaagaactgatcaaatggctgaatatgaaagatgaagagcttaagaaacaaatgcctattggaggagatgttccagccttacagctccagtatgaccattgtaaggccctgagacgggagttaaaggagaaagaatattctgtcctgaatgctgtcgaccaggcccgagttttcttggctgatcagccaattgaggcccctgaagagccaagaagaaacctacaatcaaaaacagaattaactcctgaggagagagcccaaaagattgccaaagccatgcgcaaacagtcttctgaagtcaaagaaaaatgggaaagtctaaatgctgtaactagcaattggcaaaagcaagtggacaaggcattggagaaactcagagacctgcagggagctatggatgacctggacgctgacatgaaggaggcagagtccgtgcggaatggctggaagcccgtgggagacttactcattgactcgctgcaggatcacattgaaaaaatcatggcatttagagaagaaattgcaccaatcaactttaaagttaaaacggtgaatgatttatccagtcagctgtctccacttgacctgcatccctctctaaagatgtctcgccagctagatgaccttaatatgcgatggaaacttttacaggtttctgtggatgatcgccttaaacagcttcaggaagcccacagagattttggaccatcctctcagcattttctctctacgtcagtccagctgccgtggcaaagatccatttcacataataaagtgccctattacatcaaccatcaaacacagaccacctgttgggaccatcctaaaatgaccgaactctttcaatcccttgctgacctgaataatgtacgtttttctgcctaccgtacagcaatcaaaatccgaagactacaaaaagcactatgtttggatctcttagagttgagtacaacaaatgaaattttcaaacagcacaagttgaaccaaaatgaccagctcctcagtgttccagatgtcatcaactgtctgacaacaacttatgatggacttgagcaaatgcataaggacctggtcaacgttccactctgtgttgatatgtgtctcaattggttgctcaatgtctatgacacgggtcgaactggaaaaattagagtgcagagtctgaagattggattaatgtctctctccaaaggtctcttggaagaaaaatacagatatctctttaaggaagttgcggggccgacagaaatgtgtgaccagaggcagctgggcctgttacttcatgatgccatccagatcccccggcagctaggtgaagtagcagcttttggaggcagtaatattgagcctagtgttcgcagctgcttccaacagaataacaataaaccagaaataagtgtgaaagagtttatagattggatgcatttggaaccacagtccatggtttggctcccagttttacatcgagtggcagcagcggagactgcaaaacatcaggccaaatgcaacatctgtaaagaatgtccaattgtcgggttcaggtatagaagccttaagcattttaactatgatgtctgccagagttgtttcttttcgggtcgaacagcaaaaggtcacaaattacattacccaatggtggaatattgtatacctacaacatctggggaagatgtacgagacttcacaaaggtacttaagaacaagttcaggtcgaagaagtactttgccaaacaccctcgacttggttacctgcctgtccagacagttcttgaaggtgacaacttagagactcctatcacactcatcagtatgtggccagagcactatgacccctcacaatctcctcaactgtttcatgatgacacccattcaagaatagaacaatatgccacacgactggcccagatggaaaggactaatgggtcttttctcactgatagcagctccaccacaggaagtgtggaagacgagcacgccctcatccagcagtattgccaaacactcggaggagagtccccagtgagccagccgcagagcccagctcagatcctgaagtcagtagagagggaagaacgtggagaactggagaggatcattgctgacctggaggaagaacaaagaaatctacaggtggagtatgagcagctgaaggaccagcacctccgaagggggctccctgtcggttcaccgccagagtcgattatatctccccatcacacgtctgaggattcagaacttatagcagaagcaaaactcctcaggcagcacaaaggtcggctggaggctaggatgcagattttagaagatcacaataaacagctggagtctcagctccaccgcctccgacagctgctggagcagcctgaatctgattcccgaatcaatggtgtttccccatgggcttctcctcagcattctgcactgagctactcgcttgatccagatgcctccggcccacagttccaccaggcagcgggagaggacctgctggccccaccgcacgacaccagcacggatctcacggaggtcatggagcagattcacagcacgtttccatcttgctgcccaaatgttcccagcaggccacaggcaatgtga

SEQ ID NO: 12599 - DNA, 2185 bp, Homo sapiens
agcggcgcagggcaccatgggaaacggacggaagctccattgagccaaataagttggccacgtggggcggaacggaaacctcgcagggtcagaccgtagcgacgcgggaagtccggacgcagtagctccctgaagcggaggcgaaggggagtttaagccccagcggcggcaatggcggagaggcccgaggacctaaacctgcccaatgccgtgatcaccaggatcatcaaggaggcgctcccggacggtgtcaacatctccaaggaggcccggagcgccatctcccgcgccgccagcgtcttcgtgctgtacgccacatcctgtgctaacaactttgcaatgaaaggaaagcggaagacgctgaatgccagtgatgtgctctcagccatggaagagatggagttccagcggttcgttatcccattgaaagaagctctggaagcatataggcgggagcagaaaggcaagaaggaggcctcagagcaaaagaagaaggacaaagacaaaaaaacagactcggaagagcaagacaagagcagggatgaggacaatgatgaagacgaagaaaggctggaagaagaagaacagaatgaagaggaagaagtagacaactgaaaagggcgggagactgtggcaccttggaaggtaccacttgaaatgagacgtgctacgtgtttctgtgaagcttttccatgctgggcagagtagtctcaggcaaaagtgcctgaaaagatcagaataaaaactgactagaaataccgtcaaaaccagcacttaccaaactcagagcatctgagtagcagaatcctgttttgcttcatcaatctgaaggttatggccttttgacaagagggattctgaacgactaaattagtcagtttgctcgcttttgtttacttaaatgtatggttagatggtttttgatctgcagtcttccctagtcccccaaataagtaataataacttccatgctgcctgctgtgttccagatcacagaggcagccaaggctcaggaaaaactggggctttgcttatggtcagcctatgtttgattgcacagtctttgacaatagtagcttactaagactgctcagaatgagtaagctttaggaaactactaaaatgctgtgggagaataacaaaatccgttctctctcttcacttgacagaagcattaactgaattttgtttttcatagacccacttggcccaaaacctttctatattgcctgtagatgatcggcctgctggtgtggtagtaatctgatcacagatattcttaaatcagcagtgtggaatggtattagtcaaacatggtgccagtgtcttttacaaaaacagatggcatagtgtcagatgtaccttactctctgctactgtacagctttaggatttgtcatcacctcccggaaggtgtaaaaccccaggcttcctcttcttgtagtccatctcccagacttgtgactatggcttttcattcttcaattcatgacgagtgccaaacttgattttctctaggcacagctttctccctctgtgcctcctgcttcctttctctctcctgcctctcctctgctccccatcccactttctcatctgcctccttttctcacttctgtcagtctgtaagctttgataacctgcttaatactccaaagtgtgagttcctctgatctcttgattccttagttctaatctcacgttttgtttttaagagatggagtctctcactctgtggcccaggctggagtgcagtggcatgatcatagctcattgcatccttgaaatcctgggctcaggtgatcctcccgcctgagcctcctgagtatctgggactacagatgcgtgccaccaagcctggctaattttgtctcatgtcttctaaaaattattttgtgaagccccttcacaaaaaaccttaagggaaatctgatggtgctcaggaatctaactctccctaaaccatcctctttaactgcttctaaaatatctctgttggcctttcttagcctttttctgtttccattcagtgctccaagcgctttttgtttctaagttgagtgcttggggtttgacaggtagtgacgtgtagtttgacactgttaacttgttaaatacagtgaaaagtttgtgagtgaagaatgctgagaagattgtaatgctttgtacaaataaaagtcttgtt

SEQ ID NO: 12600 - DNA, 2072 bp, Homo sapiens
gattcacgtagaccttgtcaggaaattggtcactatccatctaggccctagaagtgagaggaggaatcttacgaactcattttctagttgctttgtattcaaatcttagttgttaattatcttgttctagtaatcacctaaaatattagacacttaaaatgttggggaaacgtaagcgtgtggtgttgacaattaaggacaagcttgacattattaagaaacttgaggaaggcatctctttcaaaaaactttccgtggtgtacggaattggtgaatccacagttcgtgatattaaaaagaacaaagaaaggattataaactatgcaaacagttcagatcctaccagtggagtatccaaacgtaaatctatgaagtcatcaacatacgaggagcttgatagagttatgatagagtggtttaaccaacagaaaacagatgggattccagtgtccggaacgatttgtgcaaaacaagccaagttcttttttgatgctttgggaatggaaggtgattttaatgcatcgtcaggctggctaactcgatttaagcagcgccatggtattccaaaggctgctggtaaaggaacaaaattaaaaggagatgaaactgctgccagagaattttgtggtagctttcaggaatttgttgaaaaagagaatctacaaccagagcaaatttatggtgctgatcaaactggattgttttggaaatgtctaccatcaaggacattaactcttgaaactgaccaaagtacttctgggtgtaggtcaagcagagagagaatcatcattatgtgttgcgcaaatgccacaggtttacacaaacttaatctttgtgttgtggggaaggccaaaaagccccgagcattcaaaggcactgacctttcaaaccttcctgtgacatattacagtcaaaaaggtgcatggatagaacagtctgttttcagacagtggtttgaaaagtactttgtgccacaggtacagaagcatttgaaatccaagggacttttagaaaaagcagtgcttcttttagatttccccccagcacgtccaaatgaagaaatgttgagttcagatgatggcagaataattgtgaagtatttgccaccaaatgtcacaagtctgattcaaccaatgagccagggagttctagccactgtaaaaagatactatcgagcaggacttctccagaaatacatggatgaaggaaatgacccaaaaatattttggaagaacttgacagtgttggatgcaatttatgaagtgtcaagagcttggaacatggtaaaatcaagtaccataaccaaagcatggaaaaaacttttccctggcaatgaagagaattcaggtatgaacattgatgaaggagccattttagcagctaatttagcaacagttttacagaacacagaagaatgtgaacatgttgacattgagaatattgatcagtggttcgactctcggagcagtgactcaagctgtcaggtgctgactgacagtgaaagtgctgaggaccagaccaaggctgctgagcaaaagccttccagtaagagtagaaaaacagaactgaatccagagaagcatattagccataaagcggcacttgaatggactgaaaatttactggattatcttgaacaacaagatgacatgcttctgtctgataaattggtattaaggaggcttcggaccataataagaaaaaaacagaagatccaaaataacaaaaatcattaataaggctcttaagtatttcagtgtatctgcatctttgtgactatctgcagtgaaactttgcttgtttgaagtcctgtggattccaaagccaaatacattttataaatgattttggaattagatgtcagtttggattacttaaattacaactctttaatgttgactctagtcattgggcattgacgtgtaacttgtctttctactgtttctaatatctattaattagatcataaggtacctgaggccagggatcttgtgtctgttgtgcctgaatttggcgtgtctaataaaggcccatgcacactataggcactcaataaaacttacatttttatg

SEQ ID NO: 12601 - DNA, 2223 bp, Homo sapiens
gctgaaagaatgttcttataatgatccaagaggaagtggcaaatgagtgctcttcttcaggatccaatgatagctggacaagtcagtaagcccttgctgtcagtgcggagtgaaatgaatgcggagttgagaggtgaggacaaggctgctacttcagacagcgagctgaatgagcccctgcttgcgcctgtggaatcaaatgacagcgaggacactcccagcaagctcttcggggctagaggaaacccagcattatcagacccaggcactcctgaccaacaccaggccagtcagacccaccccccatttccagttgggccacagccacttctgacggcacagcagttagcttctgctgtggccggcgtgatgccgggaggccccccagccctcaaccagccaatcctcattcccttcaacatggcgggacagctaggaggccagcaaggactggttctcacactgccaacagcgaatctcaccaacatccaagggctggtggcagcagctgcagccggaggcattatgactctgccactgcaaaatctacaagctacctcatccctgaactcccagctccagcagctccagctccagctccagcagcagcagcagcagcagcagcagcagcctcccccgtcaaccaaccagcacccgcaaccagccccacaggcgccctcgcagtcccagcagcagccgctgcagcccaccccaccccagcagccaccacccgcctctcagcagccgccagctcctacatctcagctgcaacaggcgcctcagccccagcagcaccaaccccactcccactcccagaaccagaaccaaccatctccaacccagcagagctccagccccccgcagaaacctagtcagtctccaggacatggcctgccttcaccgctcacgccacccaatcctctacagctggttaataatccactagcaagtcaggctgcagcggctgcagcagccatgagctccatagcaagctcacaggcctttggcaatgccctctccagtcttcagggggtcacaggtcaactagttactaatgcacaaggacagattatcgggaccattccactgatgcctaatccagggccatcgagccaagcagcaagcggcactcagggcttgcaagtgcagccaatcaccccccagctcctcacaaacgcccagggccagatcatcgccacagtcattgggaaccagatcctgcccgtgatcaacacccagggcatcacgctgtcacccatcaagcccggccagcagctccaccaaccctcccagacgtcagtgggtcaagcagcctcccaaggcaaccttctgcacctggctcacagccaagcatccatgtctcaaagtcccgtccggcaggcttcctcttcttcctcctcatcctcctcttcttcagctttgagcgtgggccagttagtcagcaatcctcaaacggcagcgggtgaggtggatggggttaatctggaggagatccgagaatttgccaaagcttttaaaatccggcgcctgtcccttggcctgacccagactcaggtgggacaggctctcagtgctacagagggccccgcgtacagccagtcggccatctgcagacacaccatcctgagaagccactttttcctaccacaggaagcccaagagaacactatagctagcagtctgacagccaaactgaaccctggccttttgtatcctgccaggtttgaaaagctggacatcacccctaaaagtgcccagaagatcaagccggtgcttgagcggtggatggctgaggctgaggcccgccatcgagcaggtatgcagaacctgaccgagtttatcgggagtgaaccatccaaaaagcgcaagcggcgcacctccttcacaccccaggcccttgagatcctcaatgcccactttgagaagaacacacacccttctgggcaggaaatgaccgaaattgctgagaagctgaactatgaccgagaagtagttagagtttggttctgcaataagaggcaagccctgaagaacacaattaaacgcttaaaacagcacgagccggccacggcagtccctttggagcccttaacagactctctggaagaaaactcctaaagagatgcccacccataatcagaagcaaaattcacagaaactaaactccacccttgggactccacaacaacaacaacaacaaaatttaatttaatttaaaaatag

SEQ ID NO: 12602 - DNA, 3786 bp, Homo sapiens
ggcgggcggcggcggggcccgagccggagaagatggcggtgcggaagaaggacggcggccccaacgtgaagtactacgaggccgcggacaccgtgacccagttcgacaacgtgcggctgtggctcggcaagaactacaagaagtatatacaagctgaaccacccaccaacaagtccctgtctagcctggttgtacagttgctacaatttcaggaagaagtttttggcaaacatgtcagcaatgcaccgctcactaaactgccgatcaaatgtttcctagatttcaaagcgggaggctccttgtgccacattcttgcagctgcctacaaattcaagagtgaccagggatggcggcgttacgatttccagaatccatcacgcatggaccgcaatgtggaaatgtttatgaccattgagaagtccttggtgcagaataattgcctgtctcgacctaacatttttctgtgcccagaaattgagcccaaactactagggaaattaaaggacattatcaagagacaccagggaacagtcactgaggataagaacaatgcctcccatgttgtgtatcctgtcccggggaatctagaagaagaggaatgggtacgaccagtcatgaagagggataagcaggttcttctgcactggggctactatcctgacagttacgacacgtggatcccagcgagtgaaattgaggcatctgtggaagatgctccaactcctgagaaacctaggaaggttcatgcaaagtggatcctggacaccgacaccttcaatgaatggatgaatgaggaagactatgaagtaaatgatgacaaaaaccctgtctcccgccgaaagaagatttcagccaagacactgacagatgaggtgaacagcccagattcagatcgacgggacaagaaggggggaaactataagaagaggaagcgctccccctctccttcaccaaccccagaagcaaagaagaaaaatgctaagaaaggtccctcaacaccttacactaagtcaaagcgtggccacagagaagaggagcaagaagacctgacaaaggacatggacgagccctcaccagtccccaatgtagaagaggtgacacttcccaaaacagtcaacacaaagaaagactcagagtcggccccagtcaaaggcggcaccatgaccgacctggatgaacaggaagatgaaagcatggagacgacgggcaaggatgaggatgagaacagtacggggaacaagggagagcagaccaagaatccagacctgcatgaggacaatgtgactgaacagacccaccacatcatcattcccagctacgctgcctggtttgactacaatagtgttcatgccattgagcggagggctctccccgagttcttcaacggcaagaacaagtccaagactccagagatctacctggcctatcgaaactttatgattgacacttaccgactgaacccccaagagtatcttacctctaccgcctgccgccgaaacctagcgggtgatgtctgtgccatcatgagggtccatgccttcctagaacagtggggtcttattaactaccaggtggatgctgagagtcgaccaaccccaatggggcctccgcctacctctcacttccatgtcttggctgacacaccatcagggctggtgcctctgcagcccaagacacctcagggccgccaggttgatgctgataccaaggctgggcgaaagggcaaagagctggatgacctggtgccagagacggctaagggcaagccagagctgcagacctctgcttcccaacaaatgctcaactttcctgacaaaggcaaagagaaaccaacagacatgcaaaactttgggctgcgcacagacatgtacacaaaaaagaatgttccctccaagagcaaggctgcagccagtgccactcgtgagtggacagaacaggaaaccctgcttctcctggaggcactggaaatgtacaaagatgactggaacaaagtgtccgagcatgtgggaagccgcacacaggacgagtgcatcttgcattttcttcgtcttcccattgaagacccatacctggaggactcagaggcctccctaggccccctggcctaccaacccatccccttcagtcagtcgggcaaccctgttatgagcactgttgccttcctggcctctgtcgtcgatccccgagtcgcctctgctgctgcaaagtcagccctagaggagttctccaaaatgaaggaagaggtacccacggccttggtggaggcccatgttcgaaaagtggaagaagcagccaaagtaacaggcaaggcggaccctgccttcggtctggaaagcagtggcattgcaggaaccacctctgatgagcctgagcggattgaggagagcgggaatgacgaggctcgggtggaaggccaggccacagatgagaagaaggagcccaaggaaccccgagaaggagggggtgctatagaggaggaagcaaaagagaaaaccagcgaggctcccaagaaggatgaggagaaagggaaagaaggcgacagtgagaaggagtccgagaagagtgatggagacccaatagtcgatcctgagaaggagaaggagccaaaggaagggcaggaggaagtgctgaaggaagtggtggagtctgagggggaaaggaagacaaaggtggagcgggacattggcgagggcaacctctccaccgctgctgccgccgccctggccgccgccgcagtgaaagctaagcacttggctgctgttgaggaaaggaagatcaaatctttggtggccctgctggtggagacccagatgaaaaagttggagatcaaacttcggcactttgaggagctggagactatcatggaccgggagcgagaagcactggagtatcagaggcagcagctcctggccgacagacaagccttccacatggagcagctgaagtatgcggagatgagggctcggcagcagcacttccaacagatgcaccaacagcagcagcagccaccaccagccctgcccccaggctcccagcctatccccccaacaggggctgctgggccacccgcagtccatggcttggctgtggctccagcctctgtagtccctgctcctgctggcagtggggcccctccaggaagtttgggcccttctgaacagattgggcaggcagggtcaactgcagggccacagcagcagcaaccagctggagccccccagcctggggcagtcccaccaggggttcccccccctggaccccatggcccctcaccgttccccaaccaacaaactcctccctcaatgatgccaggggcagtgccaggcagcgggcacccaggcgtggcggacccaggcacccccctgcctccagaccccacagccccgagcccaggcacggtcacccctgtgccacctccacagtgaggagccagccagacatctctccccctcaccccctgtggacatcacggttccaggaacagcccttcccccaccactgggaccctccccagcctggagagttcatcactacgtaaggaaagctccttccgcccctccaaagccctcaccatgcctaacagaggcatgcatttttatatcagattattcaaggacttctgtttaaaagatgtttataatgtctgggagagaggataggatgggaatgctgccctaaaggaagggctggtgaaaggtgtttatacaaggttctattaaccacttctaagggtacacctccctccaaactactgcattttctatggattaaaaaaaaaaaaaaaaa

SEQ ID NO: 12603 - DNA, 4039 bp, Homo sapiens
ggcgggcggcggcggggcccgagccggagaagatggcggtgcggaagaaggacggcggccccaacgtgaagtactacgaggccgcggacaccgtgacccagttcgacaacgtgcggctgtggctcggcaagaactacaagaagtatatacaagctgaaccacccaccaacaagtccctgtctagcctggttgtacagttgctacaatttcaggaagaagtttttggcaaacatgtcagcaatgcaccgctcactaaactgccgatcaaatgtttcctagatttcaaagcgggaggctccttgtgccacattcttgcagctgcctacaaattcaagagtgaccagggatggcggcgttacgatttccagaatccatcacgcatggaccgcaatgtggaaatgtttatgaccattgagaagtccttggtgcagaataattgcctgtctcgacctaacatttttctgtgcccagaaattgagcccaaactactagggaaattaaaggacattatcaagagacaccagggaacagtcactgaggataagaacaatgcctcccatgttgtgtatcctgtcccggggaatctagaagaagaggaatgggtacgaccagtcatgaagagggataagcaggttcttctgcactggggctactatcctgacagttacgacacgtggatcccagcgagtgaaattgaggcatctgtggaagatgctccaactcctgagaaacctaggaaggttcatgcaaagtggatcctggacaccgacaccttcaatgaatggatgaatgaggaagactatgaagtaaatgatgacaaaaaccctgtctcccgccgaaagaagatttcagccaagacactgacagatgaggtgaacagcccagattcagatcgacgggacaagaaggggggaaactataagaagaggaagcgctccccctctccttcaccaaccccagaagcaaagaagaaaaatgctaagaaaggtccctcaacaccttacactaagtcaaagcgtggccacagagaagaggagcaagaagacctgacaaaggacatggacgagccctcaccagtccccaatgtagaagaggtgacacttcccaaaacagtcaacacaaagaaagactcagagtcggccccagtcaaaggcggcaccatgaccgacctggatgaacaggaagatgaaagcatggagacgacgggcaaggatgaggatgagaacagtacggggaacaagggagagcagaccaagaatccagacctgcatgaggacaatgtgactgaacagacccaccacatcatcattcccagctacgctgcctggtttgactacaatagtgttcatgccattgagcggagggctctccccgagttcttcaacggcaagaacaagtccaagactccagagatctacctggcctatcgaaactttatgattgacacttaccgactgaacccccaagagtatcttacctctaccgcctgccgccgaaacctagcgggtgatgtctgtgccatcatgagggtccatgccttcctagaacagtggggtcttattaactaccaggtggatgctgagagtcgaccaaccccaatggggcctccgcctacctctcacttccatgtcttggctgacacaccatcagggctggtgcctctgcagcccaagacacctcagcagacctctgcttcccaacaaatgctcaactttcctgacaaaggcaaagagaaaccaacagacatgcaaaactttgggctgcgcacagacatgtacacaaaaaagaatgttccctccaagagcaaggctgcagccagtgccactcgtgagtggacagaacaggaaaccctgcttctcctggaggcactggaaatgtacaaagatgactggaacaaagtgtccgagcatgtgggaagccgcacacaggacgagtgcatcttgcattttcttcgtcttcccattgaagacccatacctggaggactcagaggcctccctaggccccctggcctaccaacccatccccttcagtcagtcgggcaaccctgttatgagcactgttgccttcctggcctctgtcgtcgatccccgagtcgcctctgctgctgcaaagtcagccctagaggagttctccaaaatgaaggaagaggtacccacggccttggtggaggcccatgttcgaaaagtggaagaagcagccaaagtaacaggcaaggcggaccctgccttcggtctggaaagcagtggcattgcaggaaccacctctgatgagcctgagcggattgaggagagcgggaatgacgaggctcgggtggaaggccaggccacagatgagaagaaggagcccaaggaaccccgagaaggagggggtgctatagaggaggaagcaaaagagaaaaccagcgaggctcccaagaaggatgaggagaaagggaaagaaggcgacagtgagaaggagtccgagaagagtgatggagacccaatagtcgatcctgagaaggagaaggagccaaaggaagggcaggaggaagtgctgaaggaagtggtggagtctgagggggaaaggaagacaaaggtggagcgggacattggcgagggcaacctctccaccgctgctgccgccgccctggccgccgccgcagtgaaagctaagcacttggctgctgttgaggaaaggaagatcaaatctttggtggccctgctggtggagacccagatgaaaaagttggagatcaaacttcggcactttgaggagctggagactatcatggaccgggagcgagaagcactggagtatcagaggcagcagctcctggccgacagacaagccttccacatggagcagctgaagtatgcggagatgagggctcggcagcagcacttccaacagatgcaccaacagcagcagcagccaccaccagccctgcccccaggctcccagcctatccccccaacaggggctgctgggccacccgcagtccatggcttggctgtggctccagcctctgtagtccctgctcctgctggcagtggggcccctccaggaagtttgggcccttctgaacagattgggcaggcagggtcaactgcagggccacagcagcagcaaccagctggagccccccagcctggggcagtcccaccaggggttcccccccctggaccccatggcccctcaccgttccccaaccaacaaactcctccctcaatgatgccaggggcagtgccaggcagcgggcacccaggcgtggcgggtaatgctcctttgggtttgccttttggcatgccgcctcctcctcctcctcctgctccatccatcatcccatttggtagtctagctgactccatcagtattaacctccccgctcctcctaacctgcatgggcatcaccaccatctcccgttcgccccgggcactctccccccacctaacctgcctgtgtccatggcgaaccctctacatcctaacctgccggcgaccaccaccatgccatcttccttgcctctcgggccggggctcggatccgccgcagcccaaagccctgccattgtggcagctgttcagggcaacctcctgcccagtgccagcccactgccagacccaggcacccccctgcctccagaccccacagccccgagcccaggcacggtcacccctgtgccacctccacagtgaggagccagccagacatctctccccctcaccccctgtggacatcacggttccaggaacagcccttcccccaccactgggaccctccccagcctggagagttcatcactacgtaaggaaagctccttccgcccctccaaagccctcaccatgcctaacagaggcatgcatttttatatcagattattcaaggacttctgtttaaaagatgtttataatgtctgggagagaggataggatgggaatgctgccctaaaggaagggctggtgaaaggtgtttatacaaggttctattaaccacttctaagggtacacctccctccaaactactgcattttctatggattaaaaaaaaaaaaaaaaaa

SEQ ID NO: 12604 - DNA, 2062 bp, Homo sapiens
atgctcccgggggcagttggagagtcagattgctcagcagaggccagggagaagatggagcagaaggaagggaagctctctgaggatgggaccaccgtctccccagctgcggacaaccctgagatgtcaggaggtggagcccctgcagaggagaccaaaggcacagctggaaaggccatcaatgaggggcctcccactgagtcaggaaagcaggaaaaggcaccagccgaggacggcatgtcagcagaactccagggggaagcaaatggattagatgaggtcaaagtggaatctcagagggaggctggtgggaaagaggatgctgaggctgaacttaaaaaggaggatggtgagaaggaagagaccactgtgggttctcaggagatgactggcaggaaagaagagaccaaatctgaacccaaagaggctgaggaaaaggagagcacgctggcctctgagaagcagaaggctgaggagaaagaggccaaacctgaatctgggcagaaagccgatgccaatgacagagacaagcctgaacctaaggcaacagttgaggaggaggacgccaagacagcctctcaggaggagacaggccagaggaaagagtgcagcactgaacccaaggagaaggctactgatgaagaggccaaggctgaatcgcagaaggctgttgtggaggatgaggctaaggctgaacccaaggagcccgatgggaaagaggaggccaaacatggtgcaaaagaggaggctgatgcaaaagaggaggcggaggatgcagaggaggcagagccaggcagtcccagcgaagagcaggagcaggacgtggaaaaagagccagagggaggggcaggggtgattcccagctccccagaggagtggcctgagagccccactggggaggggcacaacctcagcacagatgggctgggtccagactgtgtagcttccggacagaccagtccttcagccagtgagtcttcacccagcgacgtgccccagagtccccctgagtccccttcctcaggggagaagaaggagaaggcaccagagcgcagggtatcagcccctgctcggccccgggggccccgggcacagaaccgcaaagccatcgtggacaagtttggcggggcagcttccggccccacggccttgttccgcaacactaaggcagccggggcagccattggtggtgtcaagaacatgctcttggagtggtgccgagccatgacaaaaaaatacgagcatgtggacatccagaacttctcctccagctggagcagtggtatggccttctgtgccctcatccacaagttcttccctgacgcctttgactacgcagagctggatcccgcaaagcgccggcacaacttcaccctggccttctccacagcagagaaactggctgactgtgctcagctgctggacgtggatgacatggtgcggttggctgtgcccgactccaagtgcgtctacacatacatccaggaactgtaccgcagccttgtgcagaaaggactggtgaagaccaagaagaagtgaggaggtgactggctctgtgggcagagatgggcagggtgcccagctcagcagccacggcccgggggttcccttctgctccatggaggcaccagagccaggggcttaggcaagggtgtgtggcgttggttttaactgcattaaaagtacttttgtaaaatcctgtctggcccctcagtgctctctccatacttggcccaggaacctctgcactctgggataataaactctggccataggggattcctcacctgctgaggtctcaataactgcgcaaggtgtttgggaaaggacaatggcctggttcccaccactaaccagctgtgtgacacatacagttaacctctctgggccccagtttacagtctgaaaggggataatgagagttccaaccttatgaaggtgttgcaagagttaaacgagataatgaaatgggcaaaaagctttgcccagtcctgccactcaagtgttcagtaagtggtcgccaaaaataaaaaacttacattttgactctggtggcacttct

SEQ ID NO: 12605 - DNA, 4445 bp, Homo sapiens
aaaggggatgcccagagctcagttgcttgaaggcgatgggaaatctcgtcatccctctagggaagggcagggcaggcagggttgagagtgggcagaggattccacccccagctcccagaccatctgtggagtgcacaggagacgacattgcacttcagatggagaaaatgctctttcctctgaagagccctagtgccacatggctgagccctagctccactccctggatgatggatttcatcctcaccagtgtgtgtggcctagtgctcctcttcctattgctcctctacgtccacagtgacccaccctcacccccgcccgggaggaagaggagcagcagggagcctcaaagggagagaagcgggaggtccaggagcaggaagatctcagctctgaaagcttgcagaatcctcctgagggagctggaggagactcgggacctgaactaccttctggaaagccacctgaggaagctcgctggcgaaggcagctcccacctgcccttaggtggagaccccctgggggacgtgtgtaaaccagtgcctgctaaggcccaccagccgcatgggaaatgcatgcaagatccgtctcctgccagcttgtccccaccagctcccccagctcctctggcctccaccctgtcaccaggcccgatgaccttctcagagccttttggaccacactcaaccctgagtgcctccgggccaccagagcccttgcttcccctaaaatgccctgcaacccagccacatgtggtttttcctccttcaccacagccgcatggtcccctggcctcctctccacctccacccgactccagcctggctggacttcagtgtggctccacaacatgccccgtcccccagagctcccctctacacaaccaggtgctgcctcctccaaccagggtgatctctggcctggggtgctccagcgatcccatctgggacctctattgctggagggaggctgccaccacctggggcctctccacctactcacatggcaaatcccagccacggcatcttcccgaccacccctcagaggcttccttctggggagaccccacacccaagcacatggaggtaggtggctgcacattcatccaccctgacgtgcagaagctgctggagaccctcatcgccaagagagcactgatgaagatgtggcaggagaaagaaagaaaacgggccgaccacccgcacatgacatcactggggaaggagtgggacatcacgaccctaaatcccttctggaacgtgtcaacccagccacagcagctgccccgtcctcagcaagtctctgatgccacaaccgtggggaaccacttacagcagaaacgcagccagcttttctgggacctcccctctctcaatagcgagtccctggcgaccacagtctgggtttctaggaacccttcctcacagaatgcacactctgtaccactggataaagcctccacttctcttccaggtgaacctgaggttgaggcatcctcacagctttcccaggcaccgccccagccccaccacatggcccagccccaacatttcactccagcctggccccagtcccagcccccacctttggctgagatccagacccaggcccacctctcaccccctgtcccaagcctggggtgctcttctccaccccagattaggggctgtggggcatcttaccctacatcccaggagaggacacagtctgtcatccccactggaaaggagtatcttgaatggcccttgaagaagcgaccaaagtggaagagggttttgccctctctcctcaaaaagtctcaggctgttctgagccagcccactgcccaccttccccaagagaggccggcctcctggagccccaagtcagcccccatccttcccggggttgtcaccagccctgagctcccagagcactggtggcaaggaaggaatgccatccaccaggagcagtcctgtggccctcccagcagattgcaggcatctggggacctgctacagcctgatggggaattcccagggaggccccagagtcaggcagaagacacgcagcaggccctcttgccctcccagccttctgaatttgcagggaagggcaggaaggatgtgcagaagaccgggttcaggagctccggaaggttctctgacaaggggtgcttagggtccaaactagggccggacccaagccgggatcaaggctcaggaaggacctcagtgaaggctctggacgaagacaaggaggcagaaggtgacttacggaggtcctggaagtaccaatcagtaagttccacacccagggacccagacaaggagcatctggaaaacaagctgcaaatccatctggccaggaaggtaggggagatcaaagagggctggatccccatgcctgtgcgtcgctcctggctcatggccaaatgtgctgttcccaagtctgacacccacaggaaacctgagaagctggcatcctggaggggtgggaaagcccacgtgaacacctcccaggagctttccttcctccatccctgcacccagcagatactggaagtacatcttgtaaggttctgtgtgaggcacagctggggtacagacctccagtccctggagcccataaatgtctggtcaggtgaggctcaggccccgcccttcccacaatccacctttaccccctgggcctcctgggtatctcgggttgaatctgtacccaaggttcccattttcctgggaaaacgtcctcagagtggtccaggagacaacagaacaacaagcaagtcagtcccgaccgtgagtggccctctcgctgccccaccgcctgagcaggagggagtccagaggcccccgagagggtcccagtcagctgatacccatgggcgatcagaggcctttccgactggacacaagggcagggggtgttctcagcccccaacatgcagccttgtgggcagaacctggcagagcaggactgtcctggaatccgggaaacccaaacccagactagaggggagtatgggttcagaaatggctgggaacgaggcatggcttgagagtgagagcatgtccccaggagacccctgtagtagcagagccctgcaagagctcagcatagggtcccagtgggcaagggctgaagatgccctgcaggcactgaaagtgggggagaagcccccaacttgggaagtcaccttgggagccagtgtgagggcaagttcgggaagtgttcaggaggatctgaggagcacaggggctctggggaccactggtaacccctcagcgtcttcagtctgtgttgctcaggatccagagcagctgcacctgaaagcgcaggtggtcagtgagattgcgctcatagtgcaggtggactcagaggagcagctgccaggccgtgccccgggcatcctcctccaggacggcgccacaggcctgtgccttccaggccgccacatggacatgctcaccgccgcagacaggctgcccactcaagcccctctgtccacctcccagagtgtgtctggtaagaacatgacagcttcccaggggccatgtgccctcctatggaagggaggggacagtccagggcagcaggagcctgggagcccaaaagcaaaggccccacagaagagtcagaagacgctgggctgtgcgggcaagggcgaggcccacaggaggcccagaacaggggagcagggacacaggtccaagggacccaggacctctgaagccagtgggaggagccaccctgcccaagccagggaaataggagacaaacaagaaaggaaatacaaccagcttcagctggagaagggacagacaccaccagaaagccacttccagagaaagatcagtcaccatccacagggtctacaccccaggaaaggaggcacacggtgggaagatgtcctgcagaaaggcaagcctggggcagatgctttccagagctgggggtctggcccaccaaggcagtttatggactgcatggctgacaaagcctggaccatcagcagagttgtgggacaaatcctggtggacaaactggggcttcagtggggacgaggtccctcagaggtcaatcgccacaaaggtgacttccacgcccaggagaatgtgccttcctgctgccacaggggtcactgccaccaagaacgtagcagagagatgagagctctggcctgcagccctaaagccacccccaagggccaccactgtcctgtcaaaaacaggggcatcagagacagagacagcagttgggccccacctcccagggagcctgtgtccccagctggtccccaccaccacaggccaagaatggcaagcacctcgggcggcccccatccacagctgcaggaactgatgtctgcacagaggtgtcttgcctcctgaactagaccagtcttcttgcatgtctcctgggggagacagggggttctactcaaataaaactgatgcctacac

SEQ ID NO: 12606 - DNA, 3479 bp, Homo sapiens
gcggccgccatggacgagcaggcgggtcccggcgtcttcttcagcaacaaccacccgggcgccggcggtgccaaggggctcgggcctctggcggaggctgccgcggccggcgacggggcggctgcggcgggggcggcccgagcccagtacagtctcccggggatcctgcacttcctgcagcacgagtgggcccgcttcgaggtggagagagcccagtgggaggtggagcgggcggagctgcaggcccagattgccttcctgcagggagaaaggaagggccaagaaaatttgaagaaggatcttgtgaggaggatcaaaatgttggagtatgctcttaaacaggaaagagccaaataccacaagttgaaatacgggacagaattgaatcagggagatatgaagcctccaagctatgattctgatgaaggtaatgaaacagaagtgcagccacaacaaaacagccagttaatgtggaaacaaggtcgacaactactcagacagtatctacaggaggtgggttatacagatactattctagatgtgaaatctaaacgagtgcgagctttgttgggcttttcaagtgatgtcacggacagggaagatgacaaaaatcaggactcagttgtaaatggcacagaggctgaagttaaagagacagcaatgattgcaaaatctgagttaacagattctgcctccgtgctggataatttcaaattccttgaaagtgcagctgcagatttcagtgatgaagatgaagatgatgatgttgatggaagagagaaaagcgtcattgatacttcaacaattgttaggaaaaaagcattgcctgacagcggtgaagatcgagatacaaaagaagctctaaaggagtttgacttcttggttacatcagaggaaggagacaatgaatctagaagtgcaggcgatggaacagactgggaaaaggaagaccagtgtctcatgcctgaagcctggaatgtggaccagggagtaattaccaaactcaaggaacaatacaaaaaggagagaaaggggaaaaagggggtgaagaggcccaataggtcaaaactacaagatatgcttgctaatttgagagatgttgatgaacttccttcattgcagccatctgtgggttcaccttccagacccagcagctccaggcttcctgaacatgaaattaatagggcagatgaagtggaagcattgacatttcctccttcttctggaaagtcattcatcatgggagcagatgaagcccttgaaagtgaactgggacttggagaactagcaggccttacggtggccaatgaagcagactcactaacttatgatatagcaaacaataaagatgcattgaggaagacatggaaccctaagtttacattgagaagtcactttgatggcatccgagcccttgctttccatcccattgagcctgttttgataacagcatcagaggatcacacattaaaaatgtggaatttacagaaaacagccccagccaaaaagagcacttctcttgatgtagaacctatctatacattcagagcccataaaggtccagtgctttgtgtggtaatgagcagcaatggtgagcagtgttacagtggtggtactgatggactgatccagggctggaataccactaatcccaacatcgacccctatgattcttatgatccttctgttttacgaggccctctgctaggccacacggatgcagtctggggtttggcttatagtgcagcacatcagcgtttgttgtcctgttcagcagatggcactctgcgtttatggaatacaactgaggttgctccagcactaagtgtatttaatgatactaaagaactgggaatccctgcctctgtggatctagtgagcagtgacccgagccatatggtagcatcattcagcaagggatatacaagcatttttaacatggaaacacaacaacgcattctcactttagaatccaatgtagatacaacagccaactcttcctgccaaataaatagagtcatcagtcatcctactcttccgatcagcatcactgctcatgaagacaggcacatcaaattctatgataacaatacaggcaaactgatccactcgatggtagcccacctagaagctgttacaagtttagcagttgatcccaatggcctttacttgatgtctggcagtcatgactgttcaatacgtttatggaatctagaaagtaagacgtgtatccaagaattcacagctcatcgaaaaaagtttgaagaatcgattcatgatgtagctttccacccatccaaatgctatatagccagtgctggagctgacgcactggctaaagtctttgtatgacgcaatgcatcatcttcaccttctagctgtttataagtaatcaactgcacacaagagatacagaagacgagggcaagaatcatctcgtcctgcccttttgttctgctgaaggagcacagagaacatttgttgaagtatagttttgcaattcatatactgttttctaaaactaaggtttgttcaggttgctgcaagctcagctgaatctgtgagcctgaggtctgtttcaaatttctccccaataggcgcctttatttctgaggtggttctaattcgctaggcaggcctgagcgaatacaagtttagcttgtccctgttgagtaagtagggcatgctacaatggataatttaaaagcttgatagctgggactgaatagaagaaaacgggaaacttagaccaagttctcccctgagaaatcttgttaaaacacattaagtagtcaaaatagtaatctttatcatatctgccatattaacccctttgtgtataatgaccaggcagtgttaaactgagtttttaatttgactctcctttcagctgttcacataaagcacctggcaaagcattttacctgttagggggagaaaaatgcaataatatgttaaatatattattattcagaaatgctagacaaatagtttgcaagcagatttctatattgtattacagttttgaaaacagatttggtatcattctaaagtttagctatcaagcactcaccattgtgaagaatagttgatcgactctgcttttactaacagatttaacttattcaggtttgaaattctgtttatttttaagggtaaacagggcatatctctttaataatttctattttaaaattcactttattcatgtgacatttatagtaccagagtgattatttcataccaatgaaatcttacttttcagtgactgaaaagatagaatttatttgctaataatcatttatcaacacccacctaatcatgcttcagatgatctgtgctctttcttctttgtcacgttcaagttatctgacatctaccaagaacagttcataattattaatagcccaaagagtatggttaacttcacgcagctgcttttgcagaagcactaataaaaacaaatattttgtacccta

SEQ ID NO: 12607 - DNA, 7209 bp, Homo sapiens
gccccagcactcgccggcggcagtgaaaggacgcgccggagccggataacagaaagtaacgtgaaggaattcaggtgactcagacatggaggagagaagacctcatctggatgccaggcccaggaattcccataccaaccacagaggccctgtggatggagagttaccaccaagagctagaaatcaggccaataacccaccagccaatgctctccgaggaggagccagccaccctggaaggcatcctagggccaacaaccatcctgctgcttactggcagagggaagagagatttagggccatgggcaggaacccacatcaaggaaggaggaaccaggaggggcatgccagcgacgaagctagagaccaaagacatgaccaggagaatgacaccaggtggagaaatggcaaccaggactgtaggaaccgcagaccaccatggtccaatgacaacttccagcagtggcggactccccaccagaagcctacagaacagccacagcaggcgaagaaactgggctacaagttcttagaaagtcttctgcagaaagacccttctgaggtggtcatcacacttgccacaagtttagggctgaaagagctcctttctcattcttccatgaaatctaacttccttgagctcatctgtcaggttcttcggaaggcttgtagctccaaaatggatcgccagagtgttctccatgtactgggcatattgaaaaactccaaatttctcaaagtctgcctgcctgcttatgtggtagggatgatcactgaacccatccctgacatccgaaaccagtatccagagcacataagcaacatcatctccctcctccaggaccttgtaagtgtcttccctgccagctctgtgcaggaaacttccatgctggtttccctcctgccaacctctcttaatgctctgagagcctctggtgttgacatagaagaggaaacggagaagaacctggaaaaggtacagactatcattgaacatctgcaggaaaagaggcgagagggcactttgagagtggatacctacactctagtgcagcctgaggcagaagaccatgttgagagctaccgaaccatgcccatttaccctacctacaatgaagtgcacttggatgagaggcccttccttcgccccaatatcatttctggaaaatacgacagcactgctatctatctggatacccacttccggctcctgcgagaagatttcgtcagacctttacgggaaggtattttggaacttctccaaagctttgaagaccagggcctgaggaagagaaagtttgatgacatccgaatctactttgacaccaggattatcacccccatgtgttcatcatcaggcatagtctacaaggtgcagtttgacacaaaaccactgaagtttgttcgctggcagaattccaaacgattgctctatgggtctttggtatgcatgtccaaggacaacttcgagacatttctttttgccaccgtatctaacagggagcaggaagatctctgccgaggaattgtccagctctgcttcaatgagcaaagccaacagctgctagcagaggtccagccctctgactctttcctcatggtagagacaactgcatactttgaggcctacaggcacgtcctggaaggactccaggaggtccaggaggaagatgttcccttccagaggaatatcgtggagtgtaactctcatgtgaaggagccaaggtacttgctaatggggggcagatacgactttacccccttaatagagaatccttcagccactggggaatttctaagaaatgtcgagggtttgagacatcccagaattaatgtcttagatcctggccagtggccctcaaaagaagccctgaagctggatgactcccagatggaagccttgcagtttgctctcacaagggaactggctattattcaaggacctcctggaacaggcaaaacctatgtgggtctaaaaattgttcaggccctcctaaccaacgagtctgtttggcaaattagcctccagaagttccccatcttggttgtgtgttatactaatcatgctttggaccagtttctggaaggcatctacaattgtcagaagaccagcattgtgcgggtgggtggaaggagcaacagtgaaatcctgaagcagttcaccctaagggagctgaggaacaagcgggaattccgccgcaacctccccatgcacctccgaagggcctacatgagtatcatgacacagatgaaggagtcagagcaagagcttcatgaaggagccaagaccctggagtgcaccatgcgtggtgtcctacgggaacagtacctgcagaagtacatctcaccccagcactgggaaagtctcatgaatggaccagtgcaggatagtgaatggatttgcttccagcactggaagcattccatgatgctggagtggctaggtcttggtgtcggttctttcacgcaaagtgtttctccagcaggacctgagaatacagcccaggcagaaggggatgaggaggaagaaggggaggaggagagttcgctgatagagatcgcagaggaagctgacctgattcaagcagaccgggtgattgaggaggaagaggtggtgaggccccagcggcggaagaaggaagagagtggagcagaccaggagttggctaaaatgcttctggccatgaggctagaccattgtggcactgggacagcagctggacaggagcaagccacaggagagtggcagacccagcgcaaccagaaaaagaaaatgaaaaaaagagtgaaggatgagcttcgcaaactgaacaccatgactgcagccgaggccaacgagatcgaggatgtttggcagctggacctcagttctcgctggcagctttataggctctggctacagttgtaccaggctgacacccgccggaagatcctcagctatgaacgccagtaccgcacatcagcagaaagaatggccgagctgagactccaggaagacctgcacattcttaaagatgcccaggttgtaggaatgacaaccacaggtgctgccaaataccgccagatcctacagaaggtggagccgaggattgtcatagtggaagaagctgcggaagtccttgaggcccataccattgccacattgagcaaagcttgccagcacctcattttgattggggaccaccagcagctgcgccccagtgccaacgtgtatgatctggccaagaacttcaaccttgaggtgtccctttttgaacggctagtgaaagtaaacattccctttgtccgtctgaattaccagcaccgtatgtgccctgaaattgcccgccttttgaccccccacatttaccaggatctggagaatcatccatctgttcttaagtatgagaagattaagggggtgtcttccaaccttttctttgtagaacacaactttcctgaacaggaaatccaagagggcaaaagccatcagaaccagcatgaggctcactttgtggtagagctgtgcaagtacttcctgtgccaggaatacctgccttcccagatcaccatcctcactacctataccgggcagctcttctgcctgcgcaaactgatgcctgccaagacatttgctggcgtcagggtccatgttgtggacaaataccaaggggaagagaatgacatcatcctcctctcgctagtgcggagcaaccaagaaggcaaggtgggttttctgcagatatccaaccgcatctgtgtggccttgtcccgagccaagaagggaatgtactgcatcggaaacatgcagatgctggccaaggtgcccctgtggagcaagatcattcatacacttcgagagaacaatcaaataggccccatgctccggctctgctgccagaaccaccctgaaacccacaccttagtatccaaagcttctgacttccaaaaagtacccgaaggaggctgcagcctgccctgcgagttccgcctgggctgtgggcatgtctgcacccgtgcctgccacccttatgactcttcacacaaggagttccaatgcatgaagccatgccagaaggtcatctgtcaggaagggcaccggtgtccccttgtttgcttccaggagtgtcagccttgtcaggtgaaggtgcccaaaaccattcctcggtgcggccatgaacaaatggtcccttgttccgtgcctgagtcagatttctgctgccaggagccttgctccaagtctctgagatgtgggcacagatgcagccacccatgtggtgaggactgtgtgcagctgtgttcagaaatggtcaccataaaactcaagtgtgggcacagtcaaccggtaaaatgtggtcatgtggaaggcctcctgtatggtggtctgctagtcaagtgtaccacaaagtgtggcactatcttggactgcgggcatccttgcccaggctcctgccacagctgcttcgaagggcgtttccatgaacgctgtcagcagccctgcaagcgcctgcttatctgctcacacaagtgccaggaaccatgcattggtgagtgcccaccctgccagcggacctgtcagaaccgctgtgtccacagccagtgcaagaagaaatgtggggagctgtgtagtccctgcgtggaaccctgtgtctggcgctgccagcactaccagtgcaccaaactctgctctgagccctgcaaccgacccccatgctatgtgccttgtactaagctgctagtttgtggccacccctgcattggtctctgtggggagccatgccccaagaaatgccggatctgccacatggatgaggtcacccaaatattctttggctttgaggatgagcctgatgcccgctttgtgcagctggaagactgcagccacatctttgaggtgcaagccctagaccgctacatgaatgaacagaaggatgatgaagtcgccatcagattgaaagtctgccctatctgccaggtgcccatccgcaaaaacctgaggtatggaactagcataaaacagcggctagaagagattgaaatcatcaaggaaaagatccagggctcagcaggggaaatagcaaccagccaggaacggcttaaggccctgctggagaggaagagcctcctccaccagctgcttcctgaagacttcctgatgttaaaggagaagctggcccagaaaaatctgtcagtgaaggacctgggtctggttgagaattacatcagcttctatgaccacctggccagcctgtgggattccctgaaaaagatgcatgtcttagaagagaaaagagtgaggactcgactagaacaggtccatgagtggctggccaagaagcgcttgagcttcactagccaggaactaagtgacctccgaagtgaaatccagaggctcacatacctggtgaaccttctgacccgctacaagatagcagagaagaaggtgaaagatagcatagcagtagaggtctatagtgtccagaatatccttgagaaaacatgtaagttcacccaagaggatgaacaacttgtgcaggaaaagatggaagctctgaaagccacccttccctgctctggcctgggcatctcagaggaagagcgagtgcagattgtcagtgccataggttatcctcgtggtcactggttcaagtgccgcaatggccatatctatgtgattggcgattgtgggggagccatggagaggggcacgtgtcctgactgtaaggaagtgattggtggcacaaatcatactctggaaagaagcaaccagcttgcttctgaaatggatggagcccagcatgctgcctggtctgacacggccaacaacctgatgaactttgaggagatccaggggatgatgtaggaagatggtacaccactgccttttgccctcgccactgaatgactggggccagctccctaatgaaggaactgaagtttgttttttattatcatcctttttaggctgggcgcagtggcttacgcctgtaatcccagcactttgggaggccgaggcaggcggatcacgaggtcaggagttcgagaccagcctgaccaacatggcgaaaccccgtctctactaaaaatacaaaaattagctgggcgttatggcgggcgcctgtaatcccagctacttgggaggctgaggcagaagaatcgcttaaacccaggaggcggaggttgcagtgagctgagatcatgccattgcactccagtctgggcgacaggagcaagactctgtctcaaaaaaaaaaaaatcattctttttagtcttagcacctacttaaggatccacttttagggctcacccacatttgtttctagatttacccctgcgctagagtaagcactttatctccagaactgagagcaaagttaacaaatctcaccccttctctcctgcaaattagtggacagactccctggaacatgtttggggcttccacctagggccacctagtggtatctctgggtctttacttggtcagatgtttattctacattgttccccaggaacagagtatgagctcattgatgcagaccgattctaattgccaggccctaatttgcagactaactctcataataaacagaggcccatagttgtttatgaactgcttatcccttaaaggagcacaagaacccctccctgccctccttgggcaccctgcctccaggagatggaggcacgtgataagacaaaagactgcaccaactcaccctgacacagttacatagtcactgagagtggggaagatgggacagcccacatgctgcataagatgggccttatgcagcaggcccaggtcgtcattaaggagtgacccctttcctgtaacctgcactttgggatggtagaagtttctttacctgctgacaggtttggtggcactgctggttacccctgggccctgaatggagctaaaatcacatttggtaccagcagcacctatcccaagtgtgatccttcatcccaacactccctcttggagctgttccctgggtagagctagcatgccagcagcttctgcaggctccaaacccaggccagaagccagacccaggcctgctgcctgcatctgcattccctccttccagtgttccttagaacagacatttaggtatctcaggtcctttctaagtgtccctttcctatgtatgcatttcctttttttgtctttactatgcactttagcttataaagccaattaaaaacaatgattgagaaaa

SEQ ID NO: 12608 - DNA, 8054 bp, Homo sapiens
atgttagtggctgccaggaaaacttgtcatcattttagtcattcggtcaaggcccgtcagatactgcaagagttccaaaatgatcaccaacttccatggaagaatttgaagcaggacgaaactggccattggatttctactttttatatgttaaaatggctcttggagcattgctactcagttcaccatagtcttggtagagccagtggagttgtgctcacctcccttcagtggactctaatgacttatgtttgtgatattcttaagccatttgaggaggctacccagaaagtgagcgtgaagaccgcaggattgaatcaggtgctacccctaatccatcatctactcctttccctgcagaaactcagagaagattttcaagtcagaggtattactcaggccctcaatctggtggatagtttatctctgaaacttgaaacagataccctactaagtgccatgcttaaatccaagccctgtatcttggctactttgttagatccttgctttaaaaacagtttggaagacttttttcctcaaggtgctgatttagaaacttataagcagttccttgcagaagaggtctgtaattatatggaatcttcaccagagatctgccaaattccaacttcagaagcttcttgtccctcagttacagtgggagctgattcatttacctcatctctaaaagaaggcacctccagttccggttctgttgatagctcagctgtagacaatgttgcccttggaagcaaaagcttcatgttcccttctgctgtagcagttgtggatgagtacttcaaagagaagtattcagggttctcaggaggtgatgaccctttaatttactggcagaggaagataagcatatggccggctttgacccaggttgccatccagtatctaagttgccccatgtgtagttggcaatctgaatgtatctttactaaaaatagccactttcatccaaaacagatcatgagcctggactttgacaatatagaacaactgatgtttctgaaaatgaacttgaaaaatgttaactacgattattctacgttggttctgagctgggatcctgagcagaatgaagttgttcaaagcagtgaaaaagaaatactgccttaatttctttttctccatttaaaatgggcaactttttgctgtgttactgtatcttaatagctgtagttgttaaatataatcattatctttataaacacatctggggaaacctgaaatcacacaagggctgaaaattcctcagaggcaatataattttgataaaatgaagattaaagatttcatagctataactgtggcgctagcacttgaaaattttgcttataccaatgagagaggagatatttttaattaaaaaaaatatagtgcagcattgaaaggccttaggctttcttcctggtagattgaactagtaattggttttaagtaaaacttcccccaccatgggaaattttattgctctgaaatcaacgaaatgagaaaaaagtacactggctggcattcctcctgcccctgtttttctgtttccttaaaaaccctgatgcttaattacaacttggcaaaaagaaaacccgtgaaattgttttatatttggaaatttctaattgcctcctcatactggtcagctttataatttcaaattgttgagtgtgatagtgttaccctttagaattggatcttatataaaagggaaatattagaaaacaattaggaaaatatacttttagtctttgaaatgcctgttttaacctttataaaatattataaaaatagattgtgtaggtactttcaaataatttatgggtaaaaacagactaaaatgtttgcaagaattggaaaaggttgaatgggaattgtaatgagagccctttgaacatgcttggaaaaacccagtagacatttcccaaagattgtttctgtaattttaggtaatctttttaaaaacatacttaatgacccattatactgtattaactgtgcggttgttttggccactgaattcttaatgaaaactaagcagtcggtatttttatgtgttaggaatcattggtgaaatgagtgaattgatctcattttaagatccctttctactctgaaagtatgtttctgagattgagtaggaggccagaaaatgatgacttttagtaaaagtctattaaaagtttcagactgaataactaatgtgagatcccaatttttcctttttttcattttagatttggggatattccctgcccaaaaaattcctggaaaattgactagtattaagtgtgagtaaaaggtgtccacttttttttaagttttgattttagttttgtcttggatagtatttggcaagatttagcctagaaattatgtagtatttattacataagaatcaaaattgctttgttactgggctggtttcaaagtttagaactcatttctatgtatcaaaatcgggttttttttggttttgattttttttttttaaattcttaaatggtaaatatgccattgtgaaatgaaatctcaactccaaaagtttacccttttactaactggagtaaatgtatacttacaaagtctttagccgtagccattagtagtaaagaatttggacctaggctgcgtaagcaagcctttccagggccactatttaatggcaaaccagtgatactggtgttgatacaaaataagaaataaattttcccttagataaagctttctgtgttttgacagtgccagtttagaatggctataatgctgctctgccttctacagcttgctgcaccactctgtagttactctattaccatacgtttctatcttttttggttaaacactccctgatgacgatgatggatatatatacatacatccatattatacataatgatatatgtgtaaggatttaccttcgtctttattttgtgggctgggcaaaatttagtgtaacaataacttcatgatactttggtataagagtaagttctttatttttataatgaacccaaatctaaagtcttttatagtgcattttaaaaggggaaacttatccaaatgttatatttctatacatttttgtgtatatgtgtgtgtgtataagccagttagtatatatctgtatgtatattatatacataaaacgctatatttttacatacaagtatgcttttattatacagataataaagatgggggaaggtttctgtttttttcttaataggtgaagaaatcttgaagaccagaaattggatcttactgaaaaactgatgtttttttgttttttttttaaattatattgttcagctatggaagatggatttttttttcatgatcctttaactctcaagttcatctttaaatgaactcttttttttttgttttttttttgttttgttttgttttgtttttgaggagataactaaccctagctgtctccagtctgacaaaggttatttgaatggacttaatctcccagtagttgggagatgttttaaaaacacatgctgtgtttgaattgtggctgagaggttttcttggcaatgtgaggaggaaatttttttctgcctcattattattaattcatgggttgagtgttggttcgacctacaggcgtaatagattggaactcagtgaagacacagatgttcctgttcagagcaaccagctaatgattacagtttaaagacaatttctgtgatcaagttgtcatttggaagattaaacccatttcacgaggacttggagcctggtccttgctttgaggaagccgtggcttgtttcaagaagccacttctgatctaagaatctacccagcatgcctaatcaaggggaagactgctatttttttttctattccacatgtaccaaaggcgacagctgcccattccgtcactgtgaagctgcaataggaaatgaaactgtttgcacattatggcaagaagggcgctgttttcgacaggtgtgcaggtttcggcacatggagattgataaaaaacgcagtgaaattccttgttattgggaaaatcagccaacaggatgtcaaaaattaaactgcgctttccatcacaatagaggacgatatgttgatggccttttcctacctccgagcaaaactgtgttgcccactgtgcctgagtcaccagaagaggaagtgaaggctagccaactttcagttcagcagaacaaattgtctgtccagtccaatccttcccctcagctgcggagcgttatgaaagtagaaagttccgaaaatgttcctagccccacgcatccaccagttgtaattaatgctgcagatgatgatgaagatgatgatgatcagttttctgaggaaggtgatgaaaccaaaacacctaccctgcaaccaactcctgaagttcacaatggattacgagtgacttctgtccggaaacctgcagtcaatataaagcaaggtgaatgtttgaattttggaataaaaacccttgaggaaattaagtcaaagaaaatgaaggaaaaatctaagaagcaaggtgagggttcttcaggagtttccagtcttttactccaccttgagcccgttccaggtcctgaaaaagaaaatgtcaggactgtggtgaggacagtaactctctccaccaaacaaggagaagaacccttggttggattgagtcttactgagagactggggaaacgaaaattttcagcaggcggtgacagtgatcctccattaaagcgtagcctggcacagaggctagggaagaaagttgaagctccagaaactaacattgacaaaacaccaaagaaagctcaagtttccaagtctcttaaggagcgattaggcatgtcagctgatccagataatgaggatgcaacagataaagttaataaagttggtgagatccatgtgaagacattagaagaaattcttcttgaaagagccagtcagaaacgtggagaattgcaaactaaactcaagacagaaggaccttcaaaaactgatgattctacttcaggagcaagaagctcctccactatccgtatcaaaaccttctctgaggtcctggctgaaaaaaaacatcggcagcaggaagcagagagacaaaaaagcaaaaaggatacaacttgcatcaagctaaagattgatagtgaaattaaaaaaacagtagttttgccacccattgttgccagcagaggacaatcagaggagcctgcaggtaaaacaaagtctatgcaggaggtgcacatcaagacgctggaagaaattaaactggagaaggcactgagggtgcagcagagctctgagagcagcaccagctccccgtctcaacacgaggccactccaggggcaaggcggctgctgcgaatcaccaaaagaacagggatgaaagaagagaagaaccttcaggaaggaaatgaagttgattctcagagcagtattagaacagaagctaaagaggcttcaggtgagaccacaggagttgacatcactaaaattcaagtcaagagatgtgagaccatgagagagaagcacatgcagaaacagcaggagagggaaaaatcagtcttgacacctcttcggggagatgtagcctcttgcaatacccaagtggcagagaaaccagtgctcactgctgtgccaggaatcacacggcacctgaccaagcggcttcccacaaagtcatcccagaaggtggaggtagaaacctcagggattggagactcattattgaatgtgaaatgtgcagcacagaccttggaaaaaaggggtaaagctaaacccaaagtgaacgtgaagccatctgtggttaaagttgtgtcatcccccaaattggccccaaaacgtaaggcagtggagatgcacgctgctgtcattgccgctgtgaagccactcagctccagcagtgtcctacaggaacccccagccaaaaaggcagctgtggctgttgtcccgcttgtctctgaggacaaatcagtcactgtgcctgaagcagaaaatcctagagacagtcttgtgctgcctccaacccagtcctcttcagattcctcacccccggaggtgtctggcccttcctcatcccaaatgagcatgaaaactcgccgactcagctctgcctcaacaggaaagcccccactctctgtggaggatgattttgagaaactaatatgggagatttcaggaggcaaattggaagctgagattgacctggatcctgggaaagatgaagatgaccttctgcttgagctatcagaaatgattgatagctgaaggtggtagtgaggacattttaaaaaaaaaatcgccaaaaaactggacttagtttcatctattgtaacattcacctgagatgatcatttctttagtctagaatttgccccaaatcagaagtatacctctgaattatctgtatgtgtcctggattccttggggtcagatttttaaagttactttataaccattttgtccatttgatgccattgtttatcatcttttgagaaaaaagttctgtcatacccttctctccacaaaaaagagactgagagggagatcaagtgaaagggtgcaagcgaacttagtgactccttgaggtgtttgtcagttttggcttttttcttctttgttgtattctttatgtattgtcttgatgtacttaatattacctgagtttgaaatggatgaagacagctgctaccattaaggaccaaattttatgctaccactaaacaaaaatacccactcagtctgtgttaaattgtatgtctttttaaaggtatttaaagattcaactaagccttaaagagggctgagcagctcaggaagcctgtaatgtgggcataactctttggacctgatcttgatgcttctgctgctctgttagcctctgaagagcaatatctaatttattattactgtaattttttaaaaggctttaaagtgcctcaggggtcccctgaaactaattttctatttctgggattccctggattcattatatgagatggtgacatgattagaggaattcttttttagtatgaaaattgtcccttttcttcttcagtacttgcctccttgctggcattgaattaacacagggacaaaatttggttaattttttatttctaactctcccaacaaacccctgttgcccagtatttgtttggtggcctttaaccacctgagggaaaaaatgagcttattcaagctgccaatatttatctatgggctgtagcagtacactgaattgtactgtgccagggatattgagatgctctgggggtgtattgtatacctgccagttttcttcatttctgaattgagttttcttttcttgatgttggtttccttcatatcacctcaaggtttagatttgtgaaggaataagcatgatggaaataatagtcttgaaaggagatatgttgtatataatcaggaggaagaggaaggaaggacttacccattttgatattttgctgtaggtggccagttttgtttctcatagggaaatctgacccacctgtcatgttggctcctaaggaactgctgttgtaagcggctcatcaagagttgaacttcacgtagccttgttgggaatatggaaaaggaagaaagccacaggactgcccattcagtcttgggaagattgggatgattctgcacaagcaaaaatgactgaagtttatgtatagacacacctctaccaatccatcttcagctgactgaatgttgtatgatagcccttctccaaagcagaggtagaatgttcaggtttcaccatggattttctacttatttcgtttttggaatcaccttacagattccaggtcccttttgtatatattctttattcttttgctttttaaaaaataattttgtttcatatttaaagcacttgtattagtcaatgtttcgtgttccgcattatttgaaccatttgcccttacagaaagagaaatacttgttagtgttttaaataaaactgatgtaggaaaaaaaaaaaaaaaaaaaaaaaaaaaaaaaaaaaaaaaaaaaaaaaaaaaaaaaaaagaaaaaaaaaaaaaaaaaa

SEQ ID NO: 12609 - DNA, 8310 bp, Homo sapiens
ggagagggagggagggagagagagagagagggagagagacggatatctcaggtcatctgcagctgcagcgagtctgaggagccgaggaaggcagggaagatggcgatcctccattgctgagacccggcagaagcacatgagactcccaaacaacttccacaacaataacccgagcaggaagaggagaaagagaaagaggataaggaggcggtggggctggagaacccgaagcacctcccggcgccgggacgcttcttctgttcctaatgtgagaggctagacccagatcatggaggtgcttcagtgtgatggctgtgatttccgagccccgtcttatgaagatctcaaggcacacattcaggatgtccacacggcatttctgcagccaactgatgttgctgaggacaatgtgaatgagctacgatgtgggtccgtgaatgccagtaatcagacagaggtggagttttcttctataaaggatgaatttgccattgcagaagatttatcaggtcaaaatgcaacttcattggggaccggaggttactatggccacagtccaggatattatggtcagcatattgccgctaatcccaaaccaacaaacaagttttttcaatgcaagttctgtgtacgctacttcaggtcaaaaaacctcctcatagaacacactagaaaggtccatggagctcaagctgaagggagttcatcaggaccccctgtcccgggatccttaaattataatatcatgatgcacgagggatttggaaaggtcttctcttgccagttttgcacatacaagtcaccaagaagggcaagaataattaagcatcagaagatgtatcacaaaaacaatttgaaggagaccactgctcccccacctgctcctgctccaatgccagaccctgtggttccgcccgtatcactgcaggacccctgcaaggaactgccagcagaggttgtggagcgcagcatcttagagtctatggtcaagcctttgaccaaatctcgaggcaacttttgttgtgagtggtgcagctaccagaccccccgccgagaacgctggtgtgaccacatgatgaagaaacaccgcagtatggtcaagatcctttccagtctcagacagcaacaagaaggaactaatctacctgatgtgccgaacaagagtgcccccagccccacttccaactccacctatctgaccatgaatgctgcaagccgggagatacccaatactaccgtctccaacttcaggggctccatgggcaactccatcatgagacccaattcttcagcttccaagttttcgcccatgtcttaccctcagatgaagccgaagtcacctcacaattctggtctagttaacttgacagagagatcccgttatggaatgactgacatgaccaattcttctgctgacctggaaactaacagcatgctaaatgactctagttctgatgaagagttaaatgaaatagacagtgagaatggtttaagtgctatggatcaccagacatcaggcctgtctgcagagcagctgatgggctcagatggcaacaaattattggagaccaaggggattccatttagaagattcatgaataggttccagtgccccttttgtcctttcctcaccatgcatcgacgtagcatctctcgtcacatagaaaacatccacttatctggaaagacagctgtctacaaatgtgacgaatgtccgtttacttgcaagagctcgttgaaacttggggctcacaaacagtgtcacacgggtacaacgtcagattgggatgctgtgaattcccagagtgaaagcatttcttcctcactgaatgaaggtgtggtgtcttatgagagctcaagcatcaatggtagaaagtcaggagtcatgttggatcccttgcagcagcaacagccaccgcagccaccaccaccgccgccgccaccaccaccatcacagccacagccactgcagcagccacagccaccacagctgcagccaccacatcaggtgccaccccagccacaaacacagccaccaccaacgcagcagccacagccacccacacaagccgcacctctgcacccatacaaatgcaccatgtgtaattactccaccacaactctgaaagggctaagagtccatcagcagcataaacattcattctgtgacaacttgccaaaattcgaggggcagccctcaagcctaccattggaaaatgagacagacagccacccctcttccagcaacactgtgaagaaaagtcagacctcaattcttgggttgtcctccaagaacaattttgtagctaaagcctctaggaagctcgccaatgactttcctctagatttgtcacccgtgaagaagagaaccaggattgacgagatagcaagcaaccttcagagcaaaattaaccaaaccaaacagcaggaagatgcagtgatcaatgttgaggatgatgaagaggaagaggaagacaacgaagtcgagatagaggttgagttggacagggaggaagaaccgacagaacccatcatagaggttcccacttccttttctgcccaacagatatgggtaagagataccagtgagccccagaaagagcccaacttcagaaacatcacccacgattacaatgccaccaatggggctgagattgagctcaccctttctgaagatgaagaggattattatggctcctcaacaaacttgaaagatcaccaagtttccaatactgctctgctgaatacccaaactcccatctatgggactgagcacaatagtgaaaacacagactttggtgactctggaaggctttactattgtaaacactgtgactttaacaacaaatctgcccggagtgttagcacccactaccaacgaatgcacccatacattaaattcagctttaggtacatcttggaccccaatgatcacagtgcagtgtacaggtgcctggaatgctacatcgattacaccaacttcgaagatctccagcagcattatggcgagcaccacccagaagccatgaatgtactcaactttgatcactcggacctgatctaccggtgtcagttttgttcatacacgagcccgaatgttagaagcctgatgccacattaccaaagaatgcatcccacggtgaagatcaacaacgcgatgatattttcaagctatgtcgtggagcagcaggaagggctgaatacagaatcccagaccctgagggagattctgaattcggctcccaagaacatggcgacttccacacctgtggctcgtggtggtggtttgccagctacgttcaacaaaaacactcctaagacctttactcctgaatgtgaaaatcagaaggaccctttggtcaacactgttgttgtttatgattgtgatgtttgttcgtttgcaagccccaacatgcattctgtcttggttcattatcagaagaaacaccccgaagaaaaggcttcctactttaggatccagaaaactatgcgaatggtgtctgtggacaggggctctgccctttctcaattatcatttgaggtgggtgctccaatgtctcccaaaatgtccaacatgggttccccaccccccccacaacccccgccaccagacctcagtactgagctttactactgcaaacactgttcctacagcaatcggtcagttgtgggagtgcttgtccactaccagaaaagacacccagaaataaaggttactgccaaatatatcagacaggctcctcccacagctgcaatgatgagaggggtcgaagggccccaaggctccccccggccacccgcccccatacaacagctgaaccgaagcagctctgagagagatggccctcctgtggagaatgagatgttcttttgccagcactgtgattatgggaaccggacggtcaaaggggtactcattcattatcagaagaagcaccgagacttcaaggccaacgcagatgtgatccggcagcatacggccaccattcgaagcctctgcgaccgaaatcagaagaagcctgccagctgcgtgcttgtctccccctctaatctggagcgggacaaaacgaaactccgagcactcaaatgtaggcagtgctcatatacctccccctacttctatgcactgaggaagcatatcaagaaagaccaccccgccctgaaagccacagtcacgtccatcatgcgatgggcatttctagatggcttgatagaagctggctaccactgcgagtggtgcatctactcccatacggagcccaacggtttgctcctgcattaccaacggaggcatccagaacactatgttgattacacctacatggctactaaactgtgggctgggccagacccatcccctccctctctcacaatgccagccgaagccaaaacctacagatgcagggactgtgttttcgaagctgtttccatctgggacatcactaatcactaccaagcattccacccctgggccatgaatggtgatgagtcagtgctactggacatcatcaaggagaaagatgctgtggagaagcccattctttcatccgaagagttggcaggccctgtgaattgtgaaaacagtatacccacccctttcccggagcaggaagctgaatgtccagaggatgcaagactgtcccctgagaaaagcctgcagctagcttcagccaaccctgccatatcctccaccccataccagtgcacggtatgccaatctgagtataacaacttgcacggccttctcactcattatgggaagaagcaccctggcatgaaagtgaaggctgctgactttgcccaggacattgacatcaacccaggtgccgtctacaaatgcaggcattgcccatacatcaacacccgcatccacggcgtactgacccactaccagaagcgacacccgtccatcaaggtgaccgctgaggactttgtgcacgacgtagagcagtctgctgacatatcccagaatgacgtggaggagacgagcaggatcttcaagcaagggtatggcgcctaccggtgcaaactgtgtccgtacacacacggcactttggagaaactaaaaatccactacgagaagtatcacaatcagcctgaatttgatgtcttttcccagtcgcccccgaagctgccagtccccctcgagcccgagatgaccactgaagtgagcccttcccaagtctccatcactgaggaggaggtgggagaggagcccgtgtccacttctcacttctctacctcccacctggtctcccacactgtgttccggtgccagctctgcaagtacttctgctccacgaggaaggggatcgccaggcactaccgcatcaagcacaataatgtccgagcccagccagaaggcaagaacaacctcttcaagtgtgccctgtgtgcctacaccaaccccatccgcaaaggtctggcagcccactaccagaagcgccacgacattgatgcgtattacactcactgcttggcagcctccaggaccatcagcgacaagcccaacaaagtgatcatcccatccccgcccaaggacgactcccctcagctgagcgaggaactccggcgggcagtggagaagaaaaagtgctccttgtgctctttccagtcgttcagcaagaagggcatcgtgtcccattacatgaaacgccacccaggggtgttcccaaagaagcagcacgccagcaagttggggggctacttcacggccgtctatgcagatgagcatgagaagcccacactgatggaagaagaggagagaggcagctttgagaaagccgaggtggagggtgaagctcaggaaatcgagtggctcccattccgctgcatcaaatgcttcaagctgtcctttagcactgcagagctgctgtgcatgcattacactgaccaccacagtcgggacctaaagagggacttcatcattctgggcaacggcccccgcttgcagaactccacctaccagtgtaagcactgtgatagcaaactgcaaagcacagccgagctgacctcacacttgaacattcacaatgaggaattccagaagcgtgccaaacgtcaggagaggaggaaacagcttttgagcaagcagaaatatgcagatggtgcttttgcagatttcaaacaagagaggccttttggtcacttagaagaggtgccaaagatcaaggagaggaaagtggtgggctacaaatgtaaattctgtgtggaagtgcacccaacgctccgagccatctgcaatcacctccgaaagcacgtccagtatggcaatgtcccagctgtgtcagctgctgtgaaggggctgcgttctcatgagaggagccacctggccctggccatgtttacccgcgaggacaagtacagctgccagtattgctcgtttgtttctgctttcaggcacaatttggatcgccatatgcaaacccaccacggacaccataaaccattccgatgcaaactctgctccttcaagtcctcctataacagccggctgaaaacacatatactcaaagctcatgctggtgagcatgcctacaagtgttcttggtgctcattctccaccatgacaatcagccagctgaaggaacactccctcaaggtccacggaaaagccctgaccctccccaggccacggatcgtcagtctcctctcctcacactcccaccactcctcccaaaaagctaccccggctgaagaagtggaagactccaatgactcatcatattcagagcccccagatgttcagcagcagttgaaccactatcagtcagctgccctggcaaggaacaacagccgtgttagccctgtgcctctttctggggctgctgctggcactgagcagaaaactgaagccgtgcttcactgcgaattctgtgaattctcctccggctacatccagagcatcaggcgtcattaccgggacaagcatggtgggaagaagcttttcaagtgcaaagactgctccttttacacaggctttaaatctgcttttactatgcacgtggaagctgggcactcagcagttcccgaggagggccccaaagatcttcgctgtcctctctgcctctatcacaccaaatacaagcgcaacatgattgaccacatcgtgctgcaccgagaagagcgtgttgtccccattgaagtttgccggtccaaactgtccaaatacttgcagggagtagttttccgctgtgataagtgtaccttcacctgctccagtgatgagagcctccagcaacatatagaaaagcacaatgaactgaaaccttacaaatgccagctctgctactatgagaccaagcacacggaggaactggacagccaccttcgggatgagcataaggtaagccgtaactttgagctggttggacgggttaacttggatcagctggaacagatgaaggagaaaatggagagctccagcagcgatgatgaggacaaggaagaagaaatgaacagcaaggctgaagacagagagctgatgagattttctgaccacggggctgctcttaacactgagaagcgttttccatgtgaattttgtggacgggcgttttcacagggctctgagtgggaaagacatgtgctgagacacggcatggcattgaatgacaccaagcaggtgagcagagaagaaatccacccaaaagagatcatggagaacagtgttaaaatgccctccatagaggaaaaggaagatgacgaggccattgggatagacttttccctaaagaatgaaacagtagccatctgtgtagtaactgccgacaaatctctcctggagaatgcagaggccaaaaaagaatgagcgtttggtgaaattcttaatcaaaccttacttgaacagtgatgaaaaagtgggagggctggcttgggctgagaagggagggacagaaaagagaagacagaacaaagctgctttttaggactgaacaatctattttcaaagcactggtacctgtgtgagtgagtatgtaaattaaagttatttaaatggttggaatatgtggctccttttccatcactacatcttttcttccggatcttcatcatggaagtttcatttgttgcggaatatggaagcacctcccaatggtacggtgcaccctgtggtggtcttggacagtatgtggaaacagaagctccatgacggtagaagacttctcattggggagcaactttttgacgcacaacttttggtgcgtttttctagttttaataccttaagctttttcaagacctaactgcagccactttgggaaaaaaaaacaaaaaacaaaaaacagaaaacaaaaaaaaaaaaaaaaa

SEQ ID NO: 12610 - DNA, 3027 bp, Homo sapiens
ggtacatggaaggccacaggaagaaacaagatcttgagctgagcaagaacatcccagcatcttcattgactttaaaagtatattctggagtcttccgtggttcactattccagtactacagagattccttatattacatggcaggaggggggtaaactgagggatagtgaagacaacaataaattaatcaagagctttcctcatatctcagaacctatcctctgtaagaatgtcagaaaaggttgactggttacaaagccaaaatggagtatgcaaagttgatgtctattctcctggagacaaccaagcccaggactggaaaatggacacctccacggatcctgtcagagtgctcagctggctccgcagagacctggagaagagtacagcagagttccaagatgttcggttcaaacccggagaatcatttggtggggaaacgtccaactcaggagacccacacaaaggtttctctgtagactattacaacaccaccaccaagggcactccagaaagattgcattttgagatgactcacaaagagattccttgccagggccccagggcccaacttggcaacgggagttcagtagatgaagtttccttctatgctaaccgcctcacgaatctagtcatagccatggcccgcaaagagatcaatgagaagatcgatggctctgaaaacaaatgtgtctatcagtcattgtacatggggaatgaacccacacccaccaaaagcctcagtaagatagcatcagagcttgtgaatgagaccgtctctgcatgttccaggaatgctgccccagacaaggctcctggctctggagacagagtctcgggatcatcacaaagtcccccaaatttgaaatacaagtccactttgaagatcaaggagagcaccaaagaaagacagggtccagatgacaagcctccttctaagaagtctttcttctataaggaagtgtttgaatctcgtaatggagattatgccagagagggtggaaggttctttcctcgggagagaaagaggtttcgagggcaggaaaggcctgatgactttacggcttctgttagtgaagggatcatgacctatgctaacagtgtggtatctgatatgatggtctccatcatgaagacactgaagatccaagtgaaagacacaaccattgccaccatcctactgaagaaggttctgctcaagcatgcaaaagaggtggtctcggatctcatcgactccttcttgaggaatctccacagcgtcacagggaccctcatgactgacacacagtttgtctcggctgtgaaaagaactgtcttctctcatggaagccaaaaggccacagatatcatggatgccatgctaaggaagctgtacaatgtaatgtttgccaagaaagtccctgagcatgtcaggaaagcccaagacaaggctgagagttattccctcatctccatgaaaggaatgggtgatcctaaaaaccgaaatgtgaactttgccatgaaatctgaaactaaattgagagaaaaaatgtattctgaacccaaatcagaggaggagacttgtgcgaaaactctgggtgagcacattatcaaagaggggcttaccttgtggcataaaactcagcagaaagaatgtaaatctctaggtttccagcatgcagcatttgaagctcccaacacacagcgtaagcctgcatcagacatttcctttgagtaccctgaagatattggcaacctcagccttcctccatatcctccagagaaacctgagaattttatgtatgattcagactcctgggccgaggacctgatcgtgtctgccctgcttctgattcaatatcacctggcccagggaggaagaagggatgcacggagcttcgttgaagctgctggcaccaccaactttcctgccaatgaacctcctgtagctcccgatgaatcttgccttaagtctgctcccattgtaggtgaccaagaacaagcagaaaagaaggacctaaggagtgttttctttaatttcatccggaacttacttagtgagaccattttcaagcgtgaccagagccctgaacccaaggtgccggaacagccagttaaggaagataggaagttgtgtgaaagaccgttggcgtcttctccccccaggctatatgaggatgatgagacccctggtgccctttctgggctgaccaagatggctgtcagccagatagatggccacatgagtgggcagatggtagaacatctgatgaactcagtgatgaagctgtgtgtcatcattgctaagtcctgtgatgcttcgttggcagagctgggagatgacaagtctggagatgccagtaggctaacttcggccttcccagatagtttatatgagtgcttaccagccaagggcacagggtcagcagaagctgtcctgcagaatgcctatcaagctatccataatgaaatgagaggcacatcaggacagccccctgaagggtgtgcagcacccacggtgattgtcagcaatcacaacctaacggacacagttcagaacaagcaactccaagccgtccttcaatgggtagctgcctctgagctcaatgtccctattttgtattttgctggtgatgatgaagggatccaggagaagctacttcagctctcagctgctgctgtggacaaaggatgcagtgtgggcgaggttctgcagtcggtgctgcgctatgagaaggagcgccagctgaatgaggcggtggggaatgtcacaccgctgcagctgctggactggctgatggtgaacctgtaatcggcaaccccactgctttcccctcttctggcagtggggccggcccttatccccgcccttctttctcacttccacatctccccctctatatcctcacagagccctaacattatcttcacaccactctcatcaaagacatgtcatcttgtgctagccactggattttgcagattttcctgtccatgcaagcaaggacgtaaaattaaaaaattacaattaaagggctccaaaaaaaa

SEQ ID NO: 12611 - DNA, 2712 bp, Homo sapiens
ctcccgcgcgcgggctcaactttgtagagcgaggggccaacttggcagagcgcgcggccagctttgcagagagcgccctccagggactatgcgtgcggggacacgggtcgctttgggctcttccacccctgcggagcgcactaccccgagccaggggcggtgcaagccccgcccggccctacccagggcggctcctccctccgcagcgccgagacttttagtttcgctttcgctaaaggggccccagacccttgctgcggagcgacggagagagactgtgccagtcccagccgccctaccgccgtgggaacgatgctgtaatggactgtgttggttggcctccaggcaggaagtggcacttggaaaagaacaccagctgcggtggtagcagtgggatttgtgcttcttatgttacccagatggcagatgatcagggctgtattgaagagcagggggttgaggattcagcaaatgaagattcagtggatgctaagccagaccggtcctcgtttgtaccgtccctcttcagtaagaagaagaaaaatgtcaccatgcgatccatcaagaccacccgggaccgagtgcctacatatcagtacaacatgaattttgaaaagctgggcaaatgcatcataataaacaacaagaactttgataaagtgacaggtatgggcgttcgaaacggaacagacaaagatgccgaggcgctcttcaagtgcttccgaagcctgggttttgacgtgattgtctataatgactgctcttgtgccaagatgcaagatctgcttaaaaaagcttctgaagaggaccatacaaatgccgcctgcttcgcctgcatcctcttaagccatggagaagaaaatgtaatttatgggaaagatggtgtcacaccaataaaggatttgacagcccactttaggggggatagatgcaaaacccttttagagaaacccaaactcttcttcattcaggcttgccgagggaccgagcttgatgatggcatccaggccgactcggggcccatcaatgacacagatgctaatcctcgatacaagatcccagtggaagctgacttcctcttcgcctattccacggttccaggctattactcgtggaggagcccaggaagaggctcctggtttgtgcaagccctctgctccatcctggaggagcacggaaaagacctggaaatcatgcagatcctcaccagggtgaatgacagagttgccaggcactttgagtctcagtctgatgacccacacttccatgagaagaagcagatcccctgtgtggtctccatgctcaccaaggaactctacttcagtcaatagccatatcaggggtacattctagctgagaagcaatgggtcactcattaatgaatcacatttttttatgctcttgaaatattcagaaattctccaggattttaatttcaggaaaatgtattgattcaacagggaagaaactttctggtgctgtcttttgttctctgaattttcagagactttttttataatgttattcatttggtgactgtgtaactttctcttaagattaattttctctttgtatgtctgttaccttgttaatagacttaatacatgcaacagaagtgacttctggagaaagctcatggctgtgtccactgcaattggtggtaacagtggtagagtcatgtttgcacttggcaaaaagaatcccaatgtttgacaaaacacagccaaggggatatttactgctctttattgcagaatgtgggtattgagtgtgatttgaatgatttttcattggcttagggcagattttcatgcaaaagttctcatatgagttagaggagaaaaagcttaatgattctgatatgtatccatcaggatccagtctggaaaacagaaaccattctaggtgtttcaacagagggagtttaatacaggaaattgacttacatagatgataaaagagaagccaaacagcaagaagctgttaccacacccagggctatgaggataatgggaagaggtttggtttcctgtgtccagtagtgggatcatccagaggagctggaaccatggtgggggctgcctagtgggagttaggaccaccaatggattgtggaaaatggagccatgacaagaacaaagccactgactgagatggagtgagctgagacagataagagaataccttggtctcacctatcctgccctcacatcttccaccagcaccttactgcccaggcctatctggaagccacctcaccaaggaccttggaagagcaagggacagtgaggcaggagaagaacaagaaatggatgtaagcctggcccataatgtgaacataagtaatcactaatgctcaacaatttatccattcaatcatttattcattgggttgtcagatagtctatgtatgtgtaaaacaatctgttttggctttatgtgcaaaatctgttatagctttaaaatatatctggaactttttagattattccaagccttattttgagtaaatatttgttacttttagttctataagtgaggaagagtttatggcaaagatttttggcactttgttttcaagatggtgttatcttttgaattcttgataaatgactgtttttttctgcctaatagtaactggttaaaaaacaaatgttcatatttattgattaaaaatgtggttgcttaattcctaaaaaaaaaaaaaaaaaa

SEQ ID NO: 12612 - DNA, 2605 bp, Homo sapiens
ctcccgcgcgcgggctcaactttgtagagcgaggggccaacttggcagagcgcgcggccagctttgcagagagcgccctccagggactatgcgtgcggggacacgggtcgctttgggctcttccacccctgcggagcgcactaccccgagccaggggcggtgcaagccccgcccggccctacccagggcggctcctccctccgcagcgccgagacttttagtttcgctttcgctaaaggggccccagacccttgctgcggagcgacggagagagactgtgccagtcccagccgccctaccgccgtgggaacgatggcagatgatcagggctgtattgaagagcagggggttgaggattcagcaaatgaagattcagtggatgctaagccagaccggtcctcgtttgtaccgtccctcttcagtaagaagaagaaaaatgtcaccatgcgatccatcaagaccacccgggaccgagtgcctacatatcagtacaacatgaattttgaaaagctgggcaaatgcatcataataaacaacaagaactttgataaagtgacaggtatgggcgttcgaaacggaacagacaaagatgccgaggcgctcttcaagtgcttccgaagcctgggttttgacgtgattgtctataatgactgctcttgtgccaagatgcaagatctgcttaaaaaagcttctgaagaggaccatacaaatgccgcctgcttcgcctgcatcctcttaagccatggagaagaaaatgtaatttatgggaaagatggtgtcacaccaataaaggatttgacagcccactttaggggggatagatgcaaaacccttttagagaaacccaaactcttcttcattcaggcttgccgagggaccgagcttgatgatggcatccaggccgactcggggcccatcaatgacacagatgctaatcctcgatacaagatcccagtggaagctgacttcctcttcgcctattccacggttccaggctattactcgtggaggagcccaggaagaggctcctggtttgtgcaagccctctgctccatcctggaggagcacggaaaagacctggaaatcatgcagatcctcaccagggtgaatgacagagttgccaggcactttgagtctcagtctgatgacccacacttccatgagaagaagcagatcccctgtgtggtctccatgctcaccaaggaactctacttcagtcaatagccatatcaggggtacattctagctgagaagcaatgggtcactcattaatgaatcacatttttttatgctcttgaaatattcagaaattctccaggattttaatttcaggaaaatgtattgattcaacagggaagaaactttctggtgctgtcttttgttctctgaattttcagagactttttttataatgttattcatttggtgactgtgtaactttctcttaagattaattttctctttgtatgtctgttaccttgttaatagacttaatacatgcaacagaagtgacttctggagaaagctcatggctgtgtccactgcaattggtggtaacagtggtagagtcatgtttgcacttggcaaaaagaatcccaatgtttgacaaaacacagccaaggggatatttactgctctttattgcagaatgtgggtattgagtgtgatttgaatgatttttcattggcttagggcagattttcatgcaaaagttctcatatgagttagaggagaaaaagcttaatgattctgatatgtatccatcaggatccagtctggaaaacagaaaccattctaggtgtttcaacagagggagtttaatacaggaaattgacttacatagatgataaaagagaagccaaacagcaagaagctgttaccacacccagggctatgaggataatgggaagaggtttggtttcctgtgtccagtagtgggatcatccagaggagctggaaccatggtgggggctgcctagtgggagttaggaccaccaatggattgtggaaaatggagccatgacaagaacaaagccactgactgagatggagtgagctgagacagataagagaataccttggtctcacctatcctgccctcacatcttccaccagcaccttactgcccaggcctatctggaagccacctcaccaaggaccttggaagagcaagggacagtgaggcaggagaagaacaagaaatggatgtaagcctggcccataatgtgaacataagtaatcactaatgctcaacaatttatccattcaatcatttattcattgggttgtcagatagtctatgtatgtgtaaaacaatctgttttggctttatgtgcaaaatctgttatagctttaaaatatatctggaactttttagattattccaagccttattttgagtaaatatttgttacttttagttctataagtgaggaagagtttatggcaaagatttttggcactttgttttcaagatggtgttatcttttgaattcttgataaatgactgtttttttctgcctaatagtaactggttaaaaaacaaatgttcatatttattgattaaaaatgtggttgcttaattcctaaaaaaaaaaaaaaaaaa

SEQ ID NO: 12613 - DNA, 2679 bp, Homo sapiens
ctcccgcgcgcgggctcaactttgtagagcgaggggccaacttggcagagcgcgcggccagctttgcagagagcgccctccagggactatgcgtgcggggacacgggtcgctttgggctcttccacccctgcggagcgcactaccccgagccaggggcggtgcaagccccgcccggccctacccagggcggctcctccctccgcagcgccgagacttttagtttcgctttcgctaaaggggccccagacccttgctgcggagcgacggagagagactgtgccagtcccagccgccctaccgccgtgggaacggcaggaagtggcacttggaaaagaacaccagctgcggtggtagcagtgggatttgtgcttcttatgttacccagatggcagatgatcagggctgtattgaagagcagggggttgaggattcagcaaatgaagattcagtggatgctaagccagaccggtcctcgtttgtaccgtccctcttcagtaagaagaagaaaaatgtcaccatgcgatccatcaagaccacccgggaccgagtgcctacatatcagtacaacatgaattttgaaaagctgggcaaatgcatcataataaacaacaagaactttgataaagtgacaggtatgggcgttcgaaacggaacagacaaagatgccgaggcgctcttcaagtgcttccgaagcctgggttttgacgtgattgtctataatgactgctcttgtgccaagatgcaagatctgcttaaaaaagcttctgaagaggaccatacaaatgccgcctgcttcgcctgcatcctcttaagccatggagaagaaaatgtaatttatgggaaagatggtgtcacaccaataaaggatttgacagcccactttaggggggatagatgcaaaacccttttagagaaacccaaactcttcttcattcaggcttgccgagggaccgagcttgatgatggcatccaggccgactcggggcccatcaatgacacagatgctaatcctcgatacaagatcccagtggaagctgacttcctcttcgcctattccacggttccaggctattactcgtggaggagcccaggaagaggctcctggtttgtgcaagccctctgctccatcctggaggagcacggaaaagacctggaaatcatgcagatcctcaccagggtgaatgacagagttgccaggcactttgagtctcagtctgatgacccacacttccatgagaagaagcagatcccctgtgtggtctccatgctcaccaaggaactctacttcagtcaatagccatatcaggggtacattctagctgagaagcaatgggtcactcattaatgaatcacatttttttatgctcttgaaatattcagaaattctccaggattttaatttcaggaaaatgtattgattcaacagggaagaaactttctggtgctgtcttttgttctctgaattttcagagactttttttataatgttattcatttggtgactgtgtaactttctcttaagattaattttctctttgtatgtctgttaccttgttaatagacttaatacatgcaacagaagtgacttctggagaaagctcatggctgtgtccactgcaattggtggtaacagtggtagagtcatgtttgcacttggcaaaaagaatcccaatgtttgacaaaacacagccaaggggatatttactgctctttattgcagaatgtgggtattgagtgtgatttgaatgatttttcattggcttagggcagattttcatgcaaaagttctcatatgagttagaggagaaaaagcttaatgattctgatatgtatccatcaggatccagtctggaaaacagaaaccattctaggtgtttcaacagagggagtttaatacaggaaattgacttacatagatgataaaagagaagccaaacagcaagaagctgttaccacacccagggctatgaggataatgggaagaggtttggtttcctgtgtccagtagtgggatcatccagaggagctggaaccatggtgggggctgcctagtgggagttaggaccaccaatggattgtggaaaatggagccatgacaagaacaaagccactgactgagatggagtgagctgagacagataagagaataccttggtctcacctatcctgccctcacatcttccaccagcaccttactgcccaggcctatctggaagccacctcaccaaggaccttggaagagcaagggacagtgaggcaggagaagaacaagaaatggatgtaagcctggcccataatgtgaacataagtaatcactaatgctcaacaatttatccattcaatcatttattcattgggttgtcagatagtctatgtatgtgtaaaacaatctgttttggctttatgtgcaaaatctgttatagctttaaaatatatctggaactttttagattattccaagccttattttgagtaaatatttgttacttttagttctataagtgaggaagagtttatggcaaagatttttggcactttgttttcaagatggtgttatcttttgaattcttgataaatgactgtttttttctgcctaatagtaactggttaaaaaacaaatgttcatatttattgattaaaaatgtggttgcttaattcctaaaaaaaaaaaaaaaaaa

SEQ ID NO: 12614 - DNA, 5758 bp, Homo sapiens
tttctgtactctgggtgactcagagagggaagagattcagccagcacactcctcgcgagcaagcattactctactgactggcagagacaggagaggtagatgtccacgcccacagaccctggtgcgatgccccacccagggccttcgccggggcctgggccttcccctgggccaattcttgggcctagtccaggaccaggaccatccccaggttccgtccacagcatgatggggccaagtcctggacctccaagtgtctcccatcctatgccgacgatggggtccacagacttcccacaggaaggcatgcatcaaatgcataagcccatcgatggtatacatgacaaggggattgtagaagacatccattgtggatccatgaagggcactggtatgcgaccacctcacccaggcatgggccctccccagagtccaatggatcaacacagccaaggttatatgtcaccacacccatctccattaggagccccagagcacgtctccagccctatgtctggaggaggcccaactccacctcagatgccaccaagccagccgggggccctcatcccaggtgatccgcaggccatgagccagcccaacagaggtccctcacctttcagtcctgtccagctgcatcagcttcgagctcagattttagcttataaaatgctggcccgaggccagcccctccccgaaacgctgcagcttgcagtccaggggaaaaggacgttgcctggcttgcagcaacaacagcagcagcaacagcagcagcagcagcagcagcagcagcagcagcagcagcaacagcagccgcagcagcagccgccgcaaccacagacgcagcaacaacagcagccggcccttgttaactacaacagaccatctggcccggggccggagctgagcggcccgagcaccccgcagaagctgccggtgcccgcgcccggcggccggccctcgcccgcgccccccgcagccgcgcagccgcccgcggccgcagtgcccgggccctcagtgccgcagccggccccggggcagccctcgcccgtcctccagctgcagcagaagcagagccgcatcagccccatccagaaaccgcaaggcctggaccccgtggaaattctgcaagagcgggaatacagacttcaggcccgcatagctcataggatacaagaactggaaaatctgcctggctctttgccaccagatttaagaaccaaagcaaccgtggaactaaaagcacttcggttactcaatttccagcgtcagctgagacaggaggtggtggcctgcatgcgcagggacacgaccctggagacggctctcaactccaaagcatacaaacggagcaagcgccagactctgagagaagctcgcatgaccgagaagctggagaagcagcagaagattgagcaggagaggaaacgccgtcagaaacaccaggaatacctgaacagtattttgcaacatgcaaaagattttaaggaatatcatcggtctgtggccggaaagatccagaagctctccaaagcagtggcaacttggcatgccaacactgaaagagagcagaagaaggagacagagcggattgaaaaggagagaatgcggcgactgatggctgaagatgaggagggttatagaaaactgattgatcaaaagaaagacaggcgtttagcttaccttttgcagcagaccgatgagtatgtagccaatctgaccaatctggtttgggagcacaagcaagcccaggcagccaaagagaagaagaagaggaggaggaggaagaagaaggctgaggagaatgcagagggtggggagtctgccctgggaccggatggagagcccatagatgagagcagccagatgagtgacctccctgtcaaagtgactcacacagaaaccggcaaggttctgttcggaccagaagcacccaaagcaagtcagctggacgcctggctggaaatgaatcctggttatgaagttgcccctagatctgacagtgaagagagtgattctgattatgaggaagaggatgaggaagaagagtccagtaggcaggaaaccgaagagaaaatactcctggatccaaatagcgaagaagtttctgagaaggatgctaagcagatcattgagacagctaagcaagacgtggatgatgaatacagcatgcagtacagtgccaggggctcccagtcctactacaccgtggctcatgccatctcggagagggtggagaaacagtctgccctcctaattaatgggaccctaaagcattaccagctccagggcctggaatggatggtttccctgtataataacaacttgaacggaatcttagccgatgaaatggggcttggaaagaccatacagaccattgcactcatcacttatctgatggagcacaaaagactcaatggcccctatctcatcattgttcccctttcgactctatctaactggacatatgaatttgacaaatgggctccttctgtggtgaagatttcttacaagggtactcctgccatgcgtcgctcccttgtcccccagctacggagtggcaaattcaatgtcctcttgactacttatgagtatattataaaagacaagcacattcttgcaaagattcggtggaaatacatgatagtggacgaaggccaccgaatgaagaatcaccactgcaagctgactcaggtcttgaacactcactatgtggcccccagaaggatcctcttgactgggaccccgctgcagaataagctccctgaactctgggccctcctcaacttcctcctcccaacaatttttaagagctgcagcacatttgaacaatggttcaatgctccatttgccatgactggtgaaagggtggacttaaatgaagaagaaactatattgatcatcaggcgtctacataaggtgttaagaccatttttactaaggagactgaagaaagaagttgaatcccagcttcccgaaaaagtggaatatgtgatcaagtgtgacatgtcagctctgcagaagattctgtatcgccatatgcaagccaaggggatccttctcacagatggttctgagaaagataagaaggggaaaggaggtgctaagacacttatgaacactattatgcagttgagaaaaatctgcaaccacccatatatgtttcagcacattgaggaatcctttgctgaacacctaggctattcaaatggggtcatcaatggggctgaactgtatcgggcctcagggaagtttgagctgcttgatcgtattctgccaaaattgagagcgactaatcaccgagtgctgcttttctgccagatgacatctctcatgaccatcatggaggattattttgcttttcggaacttcctttacctacgccttgatggcaccaccaagtctgaagatcgtgctgctttgctgaagaaattcaatgaacctggatcccagtatttcattttcttgctgagcacaagagctggtggcctgggcttaaatcttcaggcagctgatacagtggtcatctttgacagcgactggaatcctcatcaggatctgcaggcccaagaccgagctcaccgcatcgggcagcagaacgaggtccgggtactgaggctctgtaccgtgaacagcgtggaggaaaagatcctcgcggccgcaaaatacaagctgaacgtggatcagaaagtgatccaggcgggcatgtttgaccaaaagtcttcaagccacgagcggagggcattcctgcaggccatcttggagcatgaggaggaaaatgaggaagaagatgaagtaccggacgatgagactctgaaccaaatgattgctcgacgagaagaagaatttgacctttttatgcggatggacatggaccggcggagggaagatgcccggaacccgaaacggaagccccgtttaatggaggaggatgagctgccctcctggatcattaaggatgacgctgaagtagaaaggctcacctgtgaagaagaggaggagaaaatatttgggagggggtcccgccagcgccgtgacgtggactacagtgacgccctcacggagaagcagtggctaagggccatcgaagacggcaatttggaggaaatggaagaggaagtacggcttaagaagcgaaaaagacgaagaaatgtggataaagatcctgcaaaagaagatgtggaaaaagctaagaagagaagaggccgccctcccgctgagaaactgtcaccaaatccccccaaactgacaaagcagatgaacgctatcatcgatactgtgataaactacaaagataggtgtaacgtggagaaggtgcccagtaattctcagttggaaatagaaggaaacagttcagggcgacagctcagtgaagtcttcattcagttaccttcaaggaaagaattaccagaatactatgaattaattaggaagccagtggatttcaaaaaaataaaggaaaggattcgtaatcataagtaccggagcctaggcgacctggagaaggatgtcatgcttctctgtcacaacgctcagacgttcaacctggagggatcccagatctatgaagactccatcgtcttacagtcagtgtttaagagtgcccggcagaaaattgccaaagaggaagagagtgaggatgaaagcaatgaagaggaggaagaggaagatgaagaagagtcagagtccgaggcaaaatcagtcaaggtgaaaattaagctcaataaaaaagatgacaaaggccgggacaaagggaaaggcaagaaaaggccaaatcgaggaaaagccaaacctgtagtgagcgattttgacagcgatgaggagcaggatgaacgtgaacagtcagaaggaagtgggacggatgatgagtgatcagtatggacctttttccttggtagaactgaattccttcctcccctgtctcatttctacccagtgagttcatttgtcatataggcactgggttgtttctatatcatcatcgtctataaactagctttaggatagtgccagacaaacatatgatatcatggtgtaaaaaacacacacatacacaaatatttgtaacatattgtgaccaaatgggcctcaaagattcagattgaaacaaacaaaaagcttttgatggaaaatatgtgggtggatagtatatttctatgggtgggtctaatttggtaacggtttgattgtgcctggttttatcacctgttcagatgagaagatttttgtcttttgtagcactgataaccaggagaagccattaaaagccactggttattttatttttcatcaggcaattttcgaggtttttatttgttcggtattgtttttttacactgtggtacatataagcaactttaataggtgataaatgtacagtagttagatttcacctgcatatacatttttccattttatgctctatgatctgaacaaaagctttttgaattgtataagatttatgtctactgtaaacattgcttaatttttttgctcttgatttaaaaaaaagttttgttgaaagcgctattgaatattgcaatctatatagtgtattggatggcttcttttgtcaccctgatctcctatgttaccaatgtgtatcgtctccttctccctaaagtgtacttaatctttgctttctttgcacaatgtctttggttgcaagtcataagcctgaggcaaataaaattccagtaatttcgaagaatgtggtgttggtgctttcctaataaagaaataatttagcttgacaaaa

SEQ ID NO: 12615 - DNA, 3290 bp, Homo sapiens
ctctagagaacgctctgcactatggctggtcccgtgagcttgcgagaccttctaatgggagcgtcagcctggatgggctctgaaagtcccggagggtcccctactgagggcggagggagcgcggctggcggaccggagcctccatggcgggaggatgagatctgcgttgtgggaatcttcggcaagacggctctacgcctgaattccgagaagttctctcttgtgaatacggtgtgcgaccgacaggtctttcctctctttcgccaccaagatcctggggatccaggacctggaatcagaactgaggctggcgccgtgggtgaggccggtggagccgaggaccctggggctgcagccgggggttcagttcggggaagtggagctgtcgcggaaggtaaccgaactgaggcaggctcccaggactacagccttctgcaggcctactacagtcaggaaagcaaagttctgtatcttctcctcacctccatctgtgacaattcacagcttctccgggcttgtcgggctcttcagagcggggaagctggaggtggactctctttacctcatgcagaagcacacgagttctggaagcatcaagagaagctgcagtgcctcagtctcctttacctattctctgtctgtcatatcttgcttctggtccatcccacttgttcctttgatatcacttatgatcgagtattcagagccctggatgggctgagacagaaggtcctgccgctccttaaaacagccattaaggattgtccagttggcaaagactggaagctaaactgccgaccttgcccacctagactccttttcctctttcaactcaatggagccctcaaggtagaacctcctcggaaccaagacccagctcatccagacaagcccaagaaacattctcccaaaaggaggctgcagcatgccctggaggaccagatctatagaatcttccggaagagtcgtgtcttgactaatcagagcatcaactgcctctttactgtgcctgccaaccaagctttcgtgtacatagtaccgggaagccaggaggaggacccagtaggtatgttgctggaccaacttaggagtcattgtactgtgaaggacccggaatctttgctggtgcctgcacccctttctgggcctaggcgataccaggtgatgaggcagcacagccgacaacaactttcctttcacattgacagcagcagttccagttcttcaggccagctagtggatttcactcttcgggaattcctatggcagcatgtggagctagttctaagcaagaaaggtttcgatgacagtgtgggcaggaacccacagccttcccattttgaacttcctacttatcagaagtggatctcagcagcttcaaaactgtatgaggtggctattgatgggaaagaagaggacttggggtcacccactggagagctaacatctaagattttaagcagtattaaagtcttggaaggatttttggatattgacacaaaattctcagaaaaccgatgccaaaaagctttacccatggcccacagtgcctaccagtcaaatttgcctcataattacacaatgactgtccataagaatcagcttgcccaggctcttcgagtgtacagtcaacatgctagaggtccagcatttcacaaatacgccatgcagttacatgaggactgctacaaattttggagcaatggccatcagctctgtgaggagaggagtttaactgatcaacactgtgtgcacaaatttcactcattacctaaatcaggagaaaaaccagaggctgatagaaatccgcctgtgctatatcacaatagccgagctcgatctactggtgcttgcaactgtggaaggaaacaagcacctcgagatgatccctttgatatcaaagcagccaattatgacttctatcagcttctggaagaaaagtgttgtggaaaattggatcatatcaatttcccagtatttgaaccaagtactccagatcctgctcctgctaaaaatgaatcctctcctgctcctccagattcggatgctgataaacttaaagaaaaagaacctcaaacccaaggagagagcacgagcctgagtttagctttgagtttgggccaatccacagatagcttaggtacctatccagctgatccacaagcaggaggagataatccagaagttcatggtcaagtagaagtgaaaactgagaagaggccaaacttcgttgatcgacaggcatccacagttgagtatctcccaggcatgctacattcaaattgccctaaaggtctcctacccaaattctccagctggtctttggttaaactaggccctgctaagtcttataactttcatacaggtttggaccaacagggctttattccaggaacaaattatcttatgccttgggacattgtcatcaggactagagctgaagatgaaggagacttagacacaaactcttggcctgctccaaataaagctattcctggaaagagaagtgcggttgtaatgggaagaggaagacggcgagatgacatagctcgagcttttgtgggctttgaatatgaagactctcgaggtcggagattcatgtgctctgggcctgacaaagtaatgaaagtaatgggaagtgggccaaaggaatcagctttaaaagccctaaatagtgacatgcccttatatattctgtcatcctctcaaggtagagggctgaaacctcattatgctcaacttatgaggctttttgttgtggttcctgatgctcctttgcagataatactaatgcctcaggttcagccaggcccaccaccatgtccggtattctacccagaaaaacaagaaatcacccttccacctgatggcctttgggttttgagatttccttatgcatatgtgactgagagaggaccttgtttcccccctaaggaaaatgtgcagttaatgagctacaaggtgctccgtggggttcttaaggcagtaacacaataagtgttttccagccagttcaatcctatacttgagctggtttttgtttttggtatttgtggctgtgtttttggtatgtgtttactgtgttttcccaaatccaaaatgtgttttggttacaggagttcagtatttggaaactaatttgttctactttttcattatattgttgatatttattgtaaacgtgactacaactttctaataaagattggttgttctagaaaagaatataaaataaaaaaaaaaaaaaaaaaaaaaaaaaaaaaaaaaaaaaaaaaaaaaaaaaaaaaaag

SEQ ID NO: 12616 - DNA, 1863 bp, Homo sapiens
acccaaagtcttcaagcctggagttcctgcttggttcttcctgaggtctgagcaccttctagactacatccagatctgttttccctgcagattcatgaagatgagcatccggactccacccagactcctggagcttgcagggcggagcctgctgagggaccaagctttggccatgtccaccctggaggagctgcccacagaacttttccccccactgttcatggaggccttcagcaggagacgctgtgaggccctgaagctgatggtgcaggcctggcccttccgccgcctccctctgaggcctctgataaagatgccttgtctggaggccttccaagctgtgctcgatgggcttgatgcactgcttacccaaggggttcgtcccaggaggtggaaactccaagtgctggatttacaggatgtctgtgagaacttctggatggtttggtctgaagctatggcccatgggtgcttcctcaatgccaagaggaacaaaaaaccagtgcaggactgtccaaggatgagaggacggcagcccttgactgtgttcgtagaactttggctcaagaacaggactctggatgaatacctcacctacctccttctatgggtcaagcagaggaaagatttactacacctgtgctgtaagaagctgaaaattttgggaatgcccttccgcaatatcagaagcatcctgaaaatggtgaacctagactgtatccaggaggtggaagtgaattgcaagtgggtactgcccatcctgacacagtttaccccatacctgggccacatgaggaatcttcagaagctcgttctctcccacatggatgtctctcgctacgtttccccagagcagaagaaggagattgttacccagttcaccactcagttcctcaagctgcgctgcctccaaaagctttatatgaactctgtttctttcctcgaaggccacctggaccagctgctcagctgtctgaagacctcgttaaaagtcctcacaataactaactgtgtgcttttggaatcagacttgaagcatctatcccagtgcccgagtatcagtcaactaaagaccctggacctgagtggcatcagactgaccaattatagtcttgtgcctctccaaattctcctagaaaaagttgcagccacccttgagtacctggatttagatgactgtggcatcatagactcccaagtcaacgccatcctgcctgccctgagccgctgctttgagctcaacaccttcagcttctgtggaaatcccatctgcatggccaccctggagaacctgctgagccacacaatcatactcaaaaacttatgtgtggagctgtatcctgccccccgagagagttatggtgctgatggtactctctgctggagcagatttgctcaaattagggctgagctgatgaacagagtgagggacttaaggcaccccaagaggatcttgttctgtactgactactgccctgactgtggcaacaggtcattttatgacctggaggcagatcaatactgctgttgaatgcctgcctatttggatgggtatgtcaaacgctttcttctggacacttggaaactaaaacctaggtcttaggtacatcctaaagggagcacagaacccatcatttcacacataggctctgaaagtgggaaaggaaagctgatcaagcaggggccggacttgggggaaatgttgccatggattcgatgggactttggggacctgtgtcctgtagattcgaaaatgggaatctgaatgtctagagtggaattcaggcttgagaatacatgagggagttactcttgcatggatggttgtaaagaaacaatcagaaataaaggaaaactgagcag

SEQ ID NO: 12617 - DNA, 2354 bp, Homo sapiens
cagccacgtcctcatggccctgctgctcttgctgttcctgggcctcctggggctctgggggctgctctgcgcctgcgcccaagacccctccccagctgcccggtggcccccggggcctcgcccgctgccgctcgtcgggaacctgcacttgctgcgtctgtcgcaacaggaccggtccctgatggagctctcagaacgctacgggccggtgttcaccgtgcacctggggcgccagaagacggtggtgctgacggggttcgaggcggtcaaagaggcgctggcgggccccgggcaggagctggccgaccggcctcccatcgccatcttccagctcatccagcgaggtggaggcatcttcttctcatctggggcgcgctggagggctgcccgccagttcacggtgcgtgccctgcacagcctgggcgtgggccgggagccggtggctgacaagattctgcaggagctgaaatgcctctctgggcagctggatggctacagaggccggcccttcccgctggccctactgggctgggctccctccaatatcaccttcgcgctcctcttcggccgccgatttgactaccgggaccccgtgtttgtgtccctgctgggtctcatcgatgaggtcatggtcctcttggggtcccctggcctgcagctgttcaacgtctacccatggctcggggccctgctccagctgcaccggcccgtcctgcgcaagatcgaggaggtccgtgccattctgaggaccctcctggaggcgcggaggccccacgtgtgcccgggggaccccgtgtgcagctatgtggacgccctgatccagcagggacagggggatgaccccgagggcctgtttgctgaggccaacgcggtggcctgcaccctggacatggtcatggccgggacggagacgacctcggccacgctgcagtgggccgcacttctgatgggccggcacccggacgtgcagggccgggtgcaggaggagctagaccgcgtgctgggccctgggcggactccccggctggaggaccagcaggctctgccctacacaagcgccgtgctccacgaggtgcagcggttcatcacgctcctgccgcacgtgccccgctgcaccgcggccgacacacagctgggcggcttcctgctccccaagggcacgcccgtgattcccctgctgacctcggtgctcctggatgagacacagtggcagaccccaggccagttcaaccccggccatttcctggacgcgaatgggcactttgtgaagcgggaggccttcctgcctttctctgcaggccgccgcgtctgtgttggggagcgcctggccaggaccgagctcttcctgctgtttgccggcctcctgcagaggtaccgcctgctgcccccgcctggcgtcagtccggcctccctggacaccacgcccgcccgggcttttaccatgaggccgagggcccaggccctgtgtgcggtgcccaggccctaggagctcccccagcccccaggtcctcctgaccactcccctcccagccctgggtcctcccaccctctctcctcccaccccacagctcggactgctctgggagggccctgaggactcccaccctcacccccacccccacagggtcagcaactgcttccggttacacccaggactacccctgcccgaccctgtgggacccccacccctctgatgctgtctgcagctcagtccctgccagcccccaggagcgcctccagggccccgcccactctcccacccctgaagctgcactcccacccacctagctccccccagggccccccagcacctacagctggggctgcagggagacaacgggtggctgcatccagccagagacaggcgcaggtgggtgtcctcagcgtgcgagccctgcaccccccaggtcctgggactcctgcagaccccactccattcccgctcctggaacacttcctgcagctgtgcctggaggcagtcggcctgcagtgccagactctgagccaagccactggggccatgcgtatgactggtgcagggaggcaaggcccacattctccttcagagacaggcactggcgccagaggcttccttggggcggggggagggcacctcagcccctgaagacaagcagcactgcagtggcaaaaatggaaacactgacccggtgcggtggctcatgcctgtaatcccagcactttgggaggccgaggcaggcgaatcacgaggtcaggagttcgagaccagcctgcccaacatggtgaaaccctgtctctactaaaaatacaaaaaaattaaccgagaaaaaaaaaaaaaaaaaaaaaaaaaaaaaaaaaaaaaaaaaaaaaaaaaa

SEQ ID NO: 12618 - DNA, 2725 bp, Homo sapiens
ggggaccggcctgggcccttgagcctggctggagtaggtggaatatcctggggagaggaagtttggtcgttgggcagcggccgactttcctctcaggaaattgatactttatcaacatagagattaattatttgtatttgggagcagcagaactggggaccaattacctgtcaagagttttataaacccgtgacataaactgttattccattgctttcatcctccatctcaccttggaacttgtattacttatggcgttcaggagacaagtgaaaaactttgtgaaaaattactcagatgctgaaataaaagtcagggaagcaacttctaacgacccttggggtccctctagttctctgatgttagatatcagtgacttgactttcaacacaatttctctctcagagattatgaatatgctgtggcacagactcaatgaccatgggaagaactggcgccacgtgtataaatcccttaccctaatggattatctcatcaagaatggatcaaagaaagttattcagcattgcagagaggggttctgtaaccttcaaacactaaaagattttcagcacatagatgaagctggaaaagaccaaggttattatatccgggaaaaatctaagcaagtcatcacattgctgatggatgaaccattgctgtgtaaagagagggaagtggcatgtcggactagacagcgtacctcccactctatattgttttctaaaagacaacttggttcaagtaactcactgacagcgtgcacttctgcccccacaccggatatttctgcttcagagaagaagtataagcttcctaagtttggaaggttacataataaaagaaatgtgtgcaaggcaggattgaaacaagagcattgccaagatgttcatttgcctacagaaactatgttgtcccaggaaacacttccactcaagattcatggttggaaatcaacagaggacctgatgacatttttggatgatgatccagagctgcctttactagcaacacctccttccattgtctctccaatcacttgcttgtcagaagcagaagaagtttgtaatctttcgggtgcagatgctgtgcctactctctcagaaaatagtccttctgggcagagagatgtgagtttggacaagagatcagatggtatctttacaaatactgtcacagaaaacctcttggaaacacctttagaaaagcaatcagctgcagaaggtcttaaaacattgacaattttaccagcatgttggtcaagtaaagaggagtttatcagccccgacttaagggtatcaaagtcagattctactttccataaccaggcctctgtagaaacactctgtctctctccctcattcaaaatatttgaccgagtgaaggagattgtaatcaacaaggcctaccagaaaccagcacaatccagcattcagatggatgataaaatcctcaagacaaccacacgggtttcaactgcttctgagggagcatcttccttttctcctttatccatgtcatctcctgatttagcctctccagagaagtcagctcatctcttatcaccaattctggccggaccttccttctggactctgtcccatcaacagttgtcttctacctcctttaaagatgaagataagacagccaagctgcatcactcctttgcttctaggggcccagtgtcttctgatgtagaggaaaatgatagcctcaatctactgggaattcttccaaataactctgattctgctaaaaagaatataagtcacatttctagtagtcactggggggagttttccacccaaaatgtagaccagttcatccctctgtcctgttctggttttcagtcaaccaaagacttcccccaggaacctgaagcaaagaattccattagtgttcttttaagggaggtaaaacgtgcgatcgctagattacatgaagatctgagcacagtgatccaagaacttaatgtcatcaataacatcttgatgagcatgagtctgaatagttcacaaataagccagtcttcccaggtcccccagtcttctgaggggagctcagatcagatctaatcatcacaatatctatttttgatagaactcgtgtggttccacttccccaagacttacgttagcattgtataaattcatattattatggcaaaaaaggggatggtttaatttttccttgtcaggtttattagcaagtatctttcaaactaatactttcatttgggtggtttattttttaaaagggaaagatgtcacctttgataatttcagatttagatattagttcatttgaaacagaagagaatttcattctttcatgctctgtacctcaaatgggttaagcattagtgaaaattgtggtaagacctcaaactgcaaatgactattcaagagcttttggataaggaggcaggaagaagctctttatctttcaactgtatggagcttgttaacaagcctctgaggtgacctaggaggattgagtttgggggtatacatttcacacattcttttgcaagttttaggttctgcaaccaagggccagaaatcttttctttcttccagatgctagtgttaggagttaaatggaaacaagaaggacatggggcaaatgtttttactgtcaatgtatattgcaaggtgaattcaaatgcatccttttattctacttcagaaaataaatttgatatttttcaaaaaaaaaaaaaaaa

SEQ ID NO: 12619 - DNA, 3145 bp, Homo sapiens
ctccggcccagccccggcccgcagtccagatccgagacccaaactccgcccgccccgccgcgcgactctcacggtccggcctccggcgcgcgccccttcggcctccctcttcctgcgccggcgcccggcccggcccggcccgtcctgacccggtcacgagggccgcgacggcccgcgcttctccttgcccttcctcctcgagcgcccgcgccaggcagcagccgggcagggatgctcctgcgctcccgggcggcctcgggcccagccacctgctcgccggggaagaggacacgcagaggagcagctggcttgcccggagtcctcccaccttgacccaagcatgcagggcccaccccgcagcctccgcgctgggctcagcctggacgacttcatccctggccacctccagtcccacatagggtcttcctcccgggggacacgggtgcccgtgatccggaatggtggctccaacacccttaatttccagttccacgaccccgcgcccaggactgtgtgcaatgggggctacacaccaagacgagatgcttcccagcacccggaccctgcgtggtatcagacctggccaggccctgggagcaagccctctgcaagcacaaagatccctgcctcccagcacacccagaactggtcagccacgtggaccaaggacagcaagcgtcgggacaagcgctgggtcaagtacgagggaatcgggcccgtggacgagagcggcatgcccattgccccccgatccagcgttgacagacccagagactggtaccggagaatgttccagcagattcaccggaaaatgccagacttgcagctggactggaccttcgaggagccacccagagaccccaggcatctaggagcccagcaaagacctgcccacaggcccggcccggcaacatcttccagtggaagaagctgggaccactctgaagagttacctagaagcaccttcaactacagacctggagcattctccactgtgctgcagccctcaaatcaggtgctcagacgccgggaaaaagtagacaacgtctggacggaagagtcctggaaccagtttctgcaggaactagagactgggcagaggcccaagaaaccgctggtggacgaccctggtgagaagccctcccagcccattgaggtgctgctggagagagagctggccgagctgagcgccgagctggacaaggacctgcgggcaattgagacccgactgccgtcccccaagagctcgccggcgccccgacgggccccggagcagcggcccccggccggcccggcctcagcctggagctccagctacccacatgcaccttacctgggttccgcccggtccctgagtccccacaaaatggctgatggaggaagccccttcctaggtcggagggactttgtctacccttcctcaacccgagaccctagtgcctctaacggagggggcagcccagccaggagggaagagaagaagagaaaggccgccaggctcaagtttgacttccaggcgcagtcccccaaggagctgactctgcagaagggtgacattgtctacatccacaaggaggtggacaagaactggctggagggagagcaccacggccgcctgggcatcttccctgctaattatgtggaggtgctgcccgcagatgagatccctaagcccatcaagcccccgacctaccaggtgctggagtatggagaggctgtggcccagtacaccttcaagggggacctggaggtggagctgtccttccgcaagggagagcacatctgcctgatccgcaaggtgaacgagaactggtacgagggacgcatcacgggcacggggcgccaaggcatattccctgccagctacgtgcaggtgtctcgtgaaccccggctccggctctgtgacgacggcccccagctccccacgtctccccgcctgaccgctgccgcccgctcagcccgtcaccccagctccccctcagccctgcgcagcccagctgaccccaccgacttggggggacagacctccccccgtcgcactggcttctccttccccacccaggagcctagaccccagacccagaatcttggcacccctggtccagctctgtcccactctcgaggtcccagccatcccctggacctggggacctcctctcctaacacctctcagatacactggaccccgtaccgggcgatgtaccagtacaggccccagaacgaagacgagctggagctgcgcgagggggacagggtggatgtcatgcagcagtgtgacgatggctggtttgtgggtgtctcccggaggacccagaaattcggaacgttccctggaaattacgttgccccggtgtgagtggtctccatggcaacttggagccagccaggatggggtggggagcggtggcactcgtgggagggagaggacccccgcccacatcctccttccccaggacctgagctcccagcatctgcagacgacccccgcagcatttccctcggacccccctcgaagccccctggactgattcccacccacgactcacaggcattcctcccacagccctttcatttcctccccaccccactccccaaatacagaggtctgctttgaagcggagaccatttccaggccttattgagaccagaccccaagtcccccacccccatcctgctccagcgtttcctctaacagggaccagctctccgctttgcccccacggggttcctctaaccagaaccagcttcctagcctcgtagagaccaaaggccgcccccgcctgctggggttcctcccagcaccccagcttgctggctgccctctttgccttctggcctccagctgggtgtgggggggcggagcaaggcgggggacagacgcagcaccttcttagcgatctaggcctggcaagagctctggccccaaggcctcctcttcccaggggctgccaagtcctggccctggccctggcatatcaccccgcactgtggggccaggcaccactagcctggctcaaatattccccagggagactgctgtgtgctgcccgcctgcctgctggctctcccccagccccacatcccctctggaagagaatgtaaaataaacctggacacaaggaaaaaaaaaaaaaaaaaaaaaaaa

SEQ ID NO: 12620 - DNA, 3877 bp, Homo sapiens
cgcccccttgttcccgcaagcccggaactgcccaaatcccgcccctcccctcccaaaaaaacacccctcatccagtctcttccagcctagagatcctggcctacccctccgccaaagcgcgcactgagtgcaaaccccagagtcaatccctgtcccggctccgccccccgcgtccgaatcccgcccagccgggccctcaagcccagtcgggactcgagcctagggaggcgaggttcccgcaccggataggaacattctgttgttttcctctgccatctagtggcaaaagaaagtaattttcctggttttttgaatggatagccataccttaaaaagcatccagattgcgcagtagtgctagcggcttcgcggttcagtcctcctaactgacagccgccactggtgctgagctgctaggaagcccctgtcggcgagcttgttggagcttgaacccactgtcacccctccgactcaccggcaaaaaaaaaaatggttgaagcagatcgcccaggaaagctcttcattggtgggcttaatacggaaacaaatgagaaagctcttgaaacagtatttggcaaatatggacgaatagtggaagtactcttgataaaagaccgtgaaaccaacaaatcaagaggatttgcttttgtcacctttgaaagcccagcagacgctaaggatgcagccagagacatgaatggaaagtcattagatggaaaagccatcaaggtggaacaagccaccaaaccatcatttgaaagaggtagacatggaccgcccccacctccaagaagtagaggtcctccaagaggttttggagctggaagaggaggaagtggaggaaccaggggacctccttcacgaggaggacacatggatgatggtggatattccatgaattttaacatgagttcttccaggggaccactcccagtaaaaagaggaccaccaccaagaagtgggggtccttctcctaagagatctgcaccttcaggactagttcgcagcagcagtggaatgggaggaagagctcctctatcacgtggaagagatagttatggaggtccacctcgaagggaaccgctcccctctcgtagagatgtttatttgtccccaagagatgatgggtattctactaaagacagctattcaagcagagattacccaagttctcgtgatacaagagattatgcaccaccaccacgagattatacttaccgtgattatggtcattccagttcacgtgatgactatccatcaagaggctatggcgatagagatggatatggtcgtgatcgtgactattcagatcatccaagtggaggttcctacagagattcatatgagagttatggtaactcacgtagtgctccacttacacgagggcccccgccatcttatggtggaagcagtcgctatgatgattatagcagctcacgtgatggatatggtggaagtcgagacagttactcaagcagccgaagtgatctctactcaagttgtgacagggttggcagacaagaaagagggcttcccccttctgtagaaagggggtacccttcttcacgtgattcctacagcagttcaagccgcggagcaccaagaggtgctggccctggaggaagccgatctgatagagggggaggcagaagcagatactagaaacaaacaaaactttggaccaaaatcccagttcaaagaaacaaaaaaaagagtggaaactattctatcataactacccaaggactactaaaaggaaaaattgtgttaccttttttaaattccctgttaagtcccttccgtaatttttatgttcttgtgaggaaaaaagtaaaacatgtttaattttatttgactttatgacattgcttttcaacaagcaaatgttaaatgtgttaagccttgtagtactagtgttgtaactttccaagtaaaggtgtccctaaagaccacttcctatctggtttttcccagtaaatgaggcaagcaattctaagatcttccacaaaacatctagccatctaaaatggagagatgaatcattctgcctatacaaacaagctagctattagagggtggttggagtatgctactcataagatttcagggtgttttctaactgaaatctcactgttctcagtatgcaaaacctgaaatcagatgcctatgtaaggaaagtgctattcacccagtaaacccaaaaaaagcaaatggataatgctggccattttgcctttctgacatttccttgggaatctgcaagaacctcccctttcccctcccacaataagaccatttaagtgtgtgctaaacaactacggaatactaaataaaaagtttggccaaaaccaaccatgaagctgcaaaggtgcttgctcttactctttcaaatttttgcaactctaatgtctcacttttaaaggaacagcttgattgcaaaggagaaaatagataagcaatgaatttatctccaacttcctaaaggcttatgacttctaaaaagtgaatctatcagcattccacatcagatttaaagcatcaaatgcctgtgaaacagcaaagatggttgaagattgtgctcattatgtttgtggagtgctgattgattcacagtagataacgctggcagtaagagaaatcaaatgctaagagttgttgaagcagaaggcggctgattgttggtaagtcagtgcagttgcataagcagtgctgtcagaattggtttggtgcaggcaatagattttgccttcaagggttcctgtggatctcaggaaggcatcagtgttgattaacactcataactagggagtgagtggtagttacttaagtaattgaccaaatggaaaaggggaagtaattaaggaaattggtaagtggaggtagtcaggaggttctcgtggtcctttacacagattttacagctttgggtttcattttgtttagctaaagtcatggggacaactcttcaatttagaacttaagatgaattataaaaatgatggatataagtggtagctctatctggtgaagtgtcttgtcagtaagtgaaacatttttttgtggtggcttatccacaaacagtttagttgtagaataaaacttatgagtgacatctggaaagtaacaaccatgctaagatggcaaacacactggaaacaattgggccacttggctttcttttgctgtattgttttataagcctgctttacctccccgtcttggaaacaagttttagtttattgctttggagactagagccaatagtgtaatgttctcaaaggaaacagacttgagttgttggattagaggaactaactcaacttctaattttttttgttgtaattatggcactgtcatgttttaacatttgcaactagggatagtaagtacaacatttttaactctcatttggcagactactactaatcacagaccacaagggtaatgaccaaatttatgtggttgttacacttccatagttgtcttagccgaatccttccatattcttatgattacttgggttaaagcttctgtgaggaccttttggctcttaagatatcctaaatatttaaaatatttagatatcctaaatataggatatagagtttgtaccaaatatgaatgaatattgttcaaagcaaggagtatgttaaaatgaccagacacctgtttgataaatagtttactgaactagcagacgtgtggaaaaagaatcagatcttgattcttctgggtttatactggttgtaaaacagaatgatattagaaaatgttttccttgtttaagtggtagttgaacatagaacttgggtattatagatcacttttcactttttggaatgttttgtattgaaacttaatacaactttaacatggc

SEQ ID NO: 12621 - DNA, 2078 bp, Homo sapiens
ggtccttcagcctcgttcccgggcagtataaagtttgctgtctcctttgttcgccctcgttgcgcagtagtgctagcggcttcgcggttcggtcctcgcacccggcagccgccactggtgctgagctgctaggaagcccctatcgccgagctcgttggagcttgaacccattgtcacccctccgactcaccggcccaaaaaaaaaaaaacatggttgaagcagatcgcccaggaaagctcttcattggtgggcttaatacggaaacaaatgagaaagctcttgaagcagtatttggcaaatatggacgaatagtggaagtactcttgatgaaagaccgtgaaaccaacaaatcaagaggatttgcttttgtcacctttgaaagcccagcagacgctaaggatgcagccagagacatgaatggaaagtcattagatggaaaagccatcaaggtggaacaagccaccaaaccatcatttgaaagtggtagacgtggaccgcctccacctccaagaagtagaggccctccaagaggtcttagaggtggaagaggaggaagtggaggaaccaggggacctccctcacggggaggacacatggatgacggtggatattccatgaattttaacatgagttcttccaggggaccactcccagtaaaaagaggaccaccaccaagaagtgggggtcctcctcctaagagatctgcaccttcaggaccagttcgcagtagcagtggaatgggaggaagagctcctgtatcacgtggaagagatagttatggaggtccacctcgaagggaaccgctgccctctcgtagagatgtttatttgtccccaagagatgatgggtattctactaaagacagctattcaagcagagattacccaagttctcgtgatactagagattatgcaccaccaccacgagattatacttaccgtgattatggtcattccagttcacgtgatgactatccatcaagaggatatagcgatagagatggatatggtcgtgatcgtgactattcagatcatccaagtggaggttcctacagagattcatatgagagttatggtaactcacgtagtgctccacctacacgagggcccccgccatcttatggtggaagcagtcgctatgatgattacagcagctcacgtgacggatatggtggaagtcgagacagttactcaagcagccgaagtgatctctactcaagtggtcgtgatcgggttggcagacaagaaagagggcttcccccttctatggaaagggggtaccctcctccacgtgattcctacagcagttcaagccgcggagcaccaagaggtggtggccgtggaggaagccgatctgatagagggggaggcagaagcagatactagaaacaaacaaaactttggaccaaaatcccagttcaaagaaacaaaaagtggaaactattctatcataactacccaaggactactaaaaggaaaaattgtgttactttttttaaattccctgttaagttcccctccataatttttatgttcttgtgaggaaaaaagtaaaacatgtttaattttatttgactttcgcattgcttttcaacaagcaaatgttaaatgtgttaagacttgtactagtgttgtaactttccaagtaaaagtatcccctaaaggccacttcctatctgatttttcccagcaaatgaggcaggcaattctaagatcttccacaaaacatctagccatctaaaatggagagatgaatcattctacctatacaaacaagctagctattagagggtggttggggtatgctactcataagatttcagggtgtcttccaactgaaatctcaatgttctcagtacgaaaaacctgaaatcacatgcctatgtaaggaaagtgctattcacccagtaaacccaaaaaagcaaatggataatgctggccattttgcctttctgacatttccttgggaatctgcaagaacctcccctttcccttcccccaataagaccatttaagtgtgtgttaaacaactacagaatactaaataaaaagtttggccaaaaccaacaaaaaaaaaa

SEQ ID NO: 12622 - DNA, 4000 bp, Homo sapiens
tccgcggtcttctctctccacccccgacaccgcggggctccccccgcccgcccacggcgggccccggctgcccgatccccctcgcttcccgcgctctccagcggggccccagccccggccccctctctccctcccttctctctaattccccttccggacgctgccatcatgttgaagcctcagccgctacaacagccctcccagccccagcagccgccccccacgcaacaggccgtggcccgtcggccccccgggggcaccagccctcccaacggcggcctcccggggccgctggccacctctgcggctcctcccgggcctccagcggccgcctccccctgcctggggcctgtggccgctgccgggagcgggctccgccggggagccgaaggcatcttggcgccgcagccgccgccgccgcagcaacaccaggagaggccgggggcagccgccatcggcagcgccaggggacagagcacaggaaagggacccccacagtcacctgtgtttgaaggcgtctacaacaattccagaatgctgcatttccttacagctgttgtgggctccacttgtgatgtaaaggtgaaaaatggtaccacttatgagggtatcttcaagacgctaagctcaaagtttgaactagccgtggatgctgtgcaccggaaagcatctgagccagcaggtggccctcgtcgggaggacattgtggacaccatggtgtttaagccaagtgatgtcatgcttgttcacttccgaaatgttgacttcaactatgctactaaagacaagttcaccgattcagccattgccatgaactcgaaagtgaatggggaacacaaagagaaggtgcttcagcgctgggaggggggtgacagcaacagcgacgactatgacctcgagtctgacatgtccaatggatgggaccccaatgaaatgttcaagttcaatgaggagaactacggtgtgaagactacctatgatagcagtctttcttcttatacggtgcccttagaaaaggacaactcagaagagtttcgtcagcgagagctgcgtgcggcccagttggctcgagagattgaatcaagcccccagtaccgcctacggatcgccatggagaacgacgatgggcgcactgaagaggagaagcacagtgcagtccagcggcagggctcagggcgggagagccccagcttggcatccagggaggggaagtatatccctctgcctcaacgagtccgggaaggtccccggggaggagttcgatgcagcagctctcggggcggtcggcctggccttagctctttgccacctcgtggccctcaccatctggacaacagcagccctggcccaggttctgaggcccgtggtatcaatggaggcccttcccgcatgtccccaaaggcacagcggcctctgagaggtgccaagactctgtcttcgcccagtaataggccttctggagaaacttctgttccacctcctcctgcagtgggccggatgtatcccccgcgttctcccaagtctgctgcccctgccccaatctcagcttcctgtccagagcctcccatcggctcggcagtgccaacctcttcagcctccatccctgtgacctcatcagtctcagatcctggagtgggctccatttctccagcttctccaaagatctccctggcccccacagatgtaaaagaactctctaccaaggaacctgggagaactctggagccccaggagctggctcggatagctgggaaagtccctggtcttcagaatgaacagaaacgattccaactggaagaactgagaaagtttggggcccagtttaagcttcagcccagtagctcccctgagaacagcctggatccttttcctccccggatcttaaaggaggagcccaaaggaaaggagaaagaggttgatggtctgttgacttcagagcccatggggtctcccgtctcctccaagacagagtccgtatcggataaggaggacaaaccacccctggcaccatcaggaggcactgaggggccagagcagcccccaccaccttgtccaagccaaactggcagccccccggtgggcctcatcaagggagaagacaaagatgagggccctgttgctgaacaagtaaagaaatcaacgttgaaccctaatgctaaggagttcaatcctacaaagcctctgctgtctgtgaataaatccaccagtaccccaacttctccggggccccggactcattcaactccctccatcccggtgctgacagcaggccagagtgggctatacagcccccagtacatctcctacatacctcagatccacatgggaccagctgtgcaggcacctcagatgtatccatatcctgtatccaattcagtgcctgggcagcagggcaagtaccggggagcaaaaggctcccttcctccgcagcgctcggaccaacaccagccagcctcagccccgccgatgatgcaggccgccgcggctgctggcccgcctctggtggctgccacgccctattcttcctacatcccctacaaccctcagcagttcccaggccagccagccatgatgcagcccatggcccactacccctcacagccggtgtttgcccccatgcttcagagcaacccacgcatgctgacgtcgggcagccatccccaggccatcgtgtcatcctctacccctcagtacccttctgcagagcagcctaccccccaagccctttatgccactgttcaccagtcctacccacaccatgccacacagctccatgcccaccagccgcagccggctaccacgcctactggaagccagccgcagtcccagcatgcggcccccagtcctgtccagcatcaggcggggcaggccccacacttgggcagtggacagccacagcagaatctgtaccacccaggggccctgacaggcacgccgccctctctgccaccgggaccttctgcccagtcccctcagagcagcttcccccagccagccgctgtgtatgccatccaccaccagcagctgccccacggcttcaccaacatggcccatgttacccaggcccatgtccaaactggaatcacagcagccccgccccctcaccctggggctccccacccgccccaggtgatgctgctgcacccaccccagagtcatggggggcccccccaaggcgcggtgccccagagtggggtgcctgcactctcagcttccacaccctcaccctacccctacatcggacacccccaaggtgagcagcctggccaggcgcctggatttccaggaggagccgatgacaggattctatgtagggtgggcagaagccacagtcgccgccgccaggggcttgctcctggctctgtcctttgcttccctccgtcctcgctcagttgtgatccagcagcccccctccccactgcctccccagctctcagtgaccccgactgtctcctgacttagccgaggtaagttcaatctcatccctcccagcagctccccttccaccccccggggaactgaagattgtcctggccgcgacctgagacctccatgagtggagggaagagtgatctatgtctcttcccccagcagctcggaccactcccagccccccatccccccgttccccaggggagctggggaattcctgccaagcaccttgaatgggaggggcctcacagagggcagggccagggtccagcaggggtggggggttcctgctctgcccctgcccgtccccacccagtcttgccctcccatcctctcatctattcccccgctggagacggaagatcttttattttctattatttataacttcagacttgggccccctgttctttctttcccattaacttgagtgacctgtgtgagagacagacagatgccccacgaggatggctggacaaggacttttactttttattacataaaaatattaaaaaataaataaaaaaaataaaattttaaactaacttaaaaaaaaaaaaaaaaaaaa

SEQ ID NO: 12623 - DNA, 3781 bp, Homo sapiens
tccgcggtcttctctctccacccccgacaccgcggggctccccccgcccgcccacggcgggccccggctgcccgatccccctcgcttcccgcgctctccagcggggccccagccccggccccctctctccctcccttctctctaattccccttccggacgctgccatcatgttgaagcctcagccgctacaacagccctcccagccccagcagccgccccccacgcaacaggccgtggcccgtcggccccccgggggcaccagccctcccaacggcggcctcccggggccgctggccacctctgcggctcctcccgggcctccagcggccgcctccccctgcctggggcctgtggccgctgccgggagcgggctccgccggggagccgaaggcatcttggcgccgcagccgccgccgccgcagcaacaccaggagaggccgggggcagccgccatcggcagcgccaggggacagagcacaggaaagggacccccacagtcacctgtgtttgaaggcgtctacaacaattccagaatgctgcatttccttacagctgttgtgggctccacttgtgatgtaaaggtgaaaaatggtaccacttatgagggtatcttcaagacgctaagctcaaagtttgaactagccgtggatgctgtgcaccggaaagcatctgagccagcaggtggccctcgtcgggaggacattgtggacaccatggtgtttaagccaagtgatgtcatgcttgttcacttccgaaatgttgacttcaactatgctactaaagacaagttcaccgattcagccattgccatgaactcgaaagtgaatggggaacacaaagagaaggtgcttcagcgctgggaggggggtgacagcaacagcgacgactatgacctcgagtctgacatgtccaatggatgggaccccaatgaaatgttcaagttcaatgaggagaactacggtgtgaagactacctatgatagcagtctttcttcttatacggtgcccttagaaaaggacaactcagaagagtttcgtcagcgagagctgcgtgcggcccagttggctcgagagattgaatcaagcccccagtaccgcctacggatcgccatggagaacgacgatgggcgcactgaagaggagaagcacagtgcagtccagcggcagggctcagggcgggagagccccagcttggcatccagggaggggaagtatatccctctgcctcaacgagtccgggaaggtccccggggaggagttcgatgcagcagctctcggggcggtcggcctggccttagctctttgccacctcgtggccctcaccatctggacaacagcagccctggcccaggttctgaggcccgtggtatcaatggaggcccttcccgcatgtccccaaaggcacagcggcctctgagaggtgccaagactctgtcttcgcccagtaataggccttctggagaaacttctgttccacctcctcctgcagtgggccggatgtatcccccgcgttctcccaagtctgctgcccctgccccaatctcagcttcctgtccagagcctcccatcggctcggcagtgccaacctcttcagcctccatccctgtgacctcatcagtctcagatcctggagtgggctccatttctccagcttctccaaagatctccctggcccccacagatgtaaaagaactctctaccaaggaacctgggagaactctggagccccaggagctggctcggatagctgggaaagtccctggtcttcagaatgaacagaaacgattccaactggaagaactgagaaagtttggggcccagtttaagcttcagcccagtagctcccctgagaacagcctggatccttttcctccccggatcttaaaggaggagcccaaaggaaaggagaaagaggttgatggtctgttgacttcagagcccatggggtctcccgtctcctccaagacagagtccgtatcggataaggaggacaaaccacccctggcaccatcaggaggcactgaggggccagagcagcccccaccaccttgtccaagccaaactggcagccccccggtgggcctcatcaagggagaagacaaagatgagggccctgttgctgaacaagtaaagaaatcaacgttgaaccctaatgctaaggagttcaatcctacaaagcctctgctgtctgtgaataaatccaccagtaccccaacttctccggggccccggactcattcaactccctccatcccggtgctgacagcaggccagagtgggctatacagcccccagtacatctcctacatacctcagatccacatgggaccagctgtgcaggcacctcagatgtatccatatcctgtatccaattcagtgcctgggcagcagggcaagtaccggggagcaaaaggctcccttcctccgcagcgctcggaccaacaccagccagcctcagccccgccgatgatgcaggccgccgcggctgctggcccgcctctggtggctgccacgccctattcttcctacatcccctacaaccctcagcagttcccaggccagccagccatgatgcagcccatggcccactacccctcacagccggtgtttgcccccatgcttcagagcaacccacgcatgctgacgtcgggcagccatccccaggccatcgtgtcatcctctacccctcagtacccttctgcagagcagcctaccccccaagccctttatgccactgttcaccagtcctacccacaccatgccacacagctccatgcccaccagccgcagccggctaccacgcctactggaagccagccgcagtcccagcatgcggcccccagtcctgtccagcatcaggcggggcaggccccacacttgggcagtggacagccacagcagaatctgtaccacccaggggccctgacaggcacgccgccctctctgccaccgggaccttctgcccagtcccctcagagcagcttcccccagccagccgctgtgtatgccatccaccaccagcagctgccccacggcttcaccaacatggcccatgttacccaggcccatgtccaaactggaatcacagcagccccgccccctcaccctggggctccccacccgccccaggtgatgctgctgcacccaccccagagtcatggggggcccccccaaggcgcggtgccccagagtggggtgcctgcactctcagcttccacaccctcaccctacccctacatcggacacccccaagttcaatctcatccctcccagcagctccccttccaccccccggggaactgaagattgtcctggccgcgacctgagacctccatgagtggagggaagagtgatctatgtctcttcccccagcagctcggaccactcccagccccccatccccccgttccccaggggagctggggaattcctgccaagcaccttgaatgggaggggcctcacagagggcagggccagggtccagcaggggtggggggttcctgctctgcccctgcccgtccccacccagtcttgccctcccatcctctcatctattcccccgctggagacggaagatcttttattttctattatttataacttcagacttgggccccctgttctttctttcccattaacttgagtgacctgtgtgagagacagacagatgccccacgaggatggctggacaaggacttttactttttattacataaaaatattaaaaaataaataaaaaaaataaaattttaaactaacttaaaaaaaaaaaaaaaaaaaa

SEQ ID NO: 12624 - DNA, 4386 bp, Homo sapiens
tccgcggtcttctctctccacccccgacaccgcggggctccccccgcccgcccacggcgggccccggctgcccgatccccctcgcttcccgcgctctccagcggggccccagccccggccccctctctccctcccttctctctaattccccttccggacgctgccatcatgttgaagcctcagccgctacaacagccctcccagccccagcagccgccccccacgcaacaggccgtggcccgtcggccccccgggggcaccagccctcccaacggcggcctcccggggccgctggccacctctgcggctcctcccgggcctccagcggccgcctccccctgcctggggcctgtggccgctgccgggagcgggctccgccggggagccgaaggcatcttggcgccgcagccgccgccgccgcagcaacaccaggagaggccgggggcagccgccatcggcagcgccaggggacagagcacaggaaagggacccccacagtcacctgtgtttgaaggcgtctacaacaattccagaatgctgcatttccttacagctgttgtgggctccacttgtgatgtaaaggtgaaaaatggtaccacttatgagggtatcttcaagacgctaagctcaaagtttgaactagccgtggatgctgtgcaccggaaagcatctgagccagcaggtggccctcgtcgggaggacattgtggacaccatggtgtttaagccaagtgatgtcatgcttgttcacttccgaaatgttgacttcaactatgctactaaagacaagttcaccgattcagccattgccatgaactcgaaagtgaatggggaacacaaagagaaggtgcttcagcgctgggaggggggtgacagcaacagcgacgactatgacctcgagtctgacatgtccaatggatgggaccccaatgaaatgttcaagttcaatgaggagaactacggtgtgaagactacctatgatagcagtctttcttcttatacggtgcccttagaaaaggacaactcagaagagtttcgtcagcgagagctgcgtgcggcccagttggctcgagagattgaatcaagcccccagtaccgcctacggatcgccatggagaacgacgatgggcgcactgaagaggagaagcacagtgcagtccagcggcagggctcagggcgggagagccccagcttggcatccagggaggggaagtatatccctctgcctcaacgagtccgggaaggtccccggggaggagttcgatgcagcagctctcggggcggtcggcctggccttagctctttgccacctcgtggccctcaccatctggacaacagcagccctggcccaggttctgaggcccgtggtatcaatggaggcccttcccgcatgtccccaaaggcacagcggcctctgagaggtgccaagactctgtcttcgcccagtaataggccttctggagaaacttctgttccacctcctcctgcagtgggccggatgtatcccccgcgttctcccaagtctgctgcccctgccccaatctcagcttcctgtccagagcctcccatcggctcggcagtgccaacctcttcagcctccatccctgtgacctcatcagtctcagatcctggagtgggctccatttctccagcttctccaaagatctccctggcccccacagatgtaaaagaactctctaccaaggaacctgggagaactctggagccccaggagctggctcggatagctgggaaagtccctggtcttcagaatgaacagaaacgattccaactggaagaactgagaaagtttggggcccagtttaagcttcagcccagtagctcccctgagaacagcctggatccttttcctccccggatcttaaaggaggagcccaaaggaaaggagaaagaggttgatggtctgttgacttcagagcccatggggtctcccgtctcctccaagacagagtccgtatcggataaggaggacaaaccacccctggcaccatcaggaggcactgaggggccagagcagcccccaccaccttgtccaagccaaactggcagccccccggtgggcctcatcaagggagaagacaaagatgagggccctgttgctgaacaagtaaagaaatcaacgttgaaccctaatgctaaggagttcaatcctacaaagcctctgctgtctgtgaataaatccaccagtaccccaacttctccggggccccggactcattcaactccctccatcccggtgctgacagcaggccagagtgggctatacagcccccagtacatctcctacatacctcagatccacatgggaccagctgtgcaggcacctcagatgtatccatatcctgtatccaattcagtgcctgggcagcagggcaagtaccggggagcaaaaggctcccttcctccgcagcgctcggaccaacaccagccagcctcagccccgccgatgatgcaggccgccgcggctgctggcccgcctctggtggctgccacgccctattcttcctacatcccctacaaccctcagcagttcccaggccagccagccatgatgcagcccatggcccactacccctcacagccggtgtttgcccccatgcttcagagcaacccacgcatgctgacgtcgggcagccatccccaggccatcgtgtcatcctctacccctcagtacccttctgcagagcagcctaccccccaagccctttatgccactgttcaccagtcctacccacaccatgccacacagctccatgcccaccagccgcagccggctaccacgcctactggaagccagccgcagtcccagcatgcggcccccagtcctgtccagcatcaggcggggcaggccccacacttgggcagtggacagccacagcagaatctgtaccacccaggggccctgacaggcacgccgccctctctgccaccgggaccttctgcccagtcccctcagagcagcttcccccagccagccgctgtgtatgccatccaccaccagcagctgccccacggcttcaccaacatggcccatgttacccaggcccatgtccaaactggaatcacagcagccccgccccctcaccctggggctccccacccgccccaggtgatgctgctgcacccaccccagagtcatggggggcccccccaaggcgcggtgccccagagtggggtgcctgcactctcagcttccacaccctcaccctacccctacatcggacacccccaaggtgagcagcctggccaggcgcctggatttccaggaggagccgatgacaggattcgtgagttctcattagctgggggaatttggcatggaagagctgaggggctgcaggtggggcaggatgcacgggttctgggtggggagtgaggggtcttggaggcagggctgtcccacagggcgcccgccgacctgcacctgtctgtgaagtatgtagggtgggcagaagccacagtcgccgccgccaggggcttgctcctggctctgtcctttgcttccctccgtcctcgctcagttgtgatccagcagcccccctccccactgcctccccagctctcagtgaccccgactgtctcctgacttagccgaggtaaggtcagtgcagcagacagggccagactggggtgtggggggctgagctgggcacatgagtgagggctctggcttactgggaaacagcgattgacctgtgcttctgacagcccccgagacaccttgaggaggccgctccttcccagacacacccccacgcccccactggacggcattggaggaagggacagctgcttgggttctaatgctcctgctctcttctctttcccctccaaccagttcaatctcatccctcccagcagctccccttccaccccccggggaactgaagattgtcctggccgcgacctgagacctccatgagtggagggaagagtgatctatgtctcttcccccagcagctcggaccactcccagccccccatccccccgttccccaggggagctggggaattcctgccaagcaccttgaatgggaggggcctcacagagggcagggccagggtccagcaggggtggggggttcctgctctgcccctgcccgtccccacccagtcttgccctcccatcctctcatctattcccccgctggagacggaagatcttttattttctattatttataacttcagacttgggccccctgttctttctttcccattaacttgagtgacctgtgtgagagacagacagatgccccacgaggatggctggacaaggacttttactttttattacataaaaatattaaaaaataaataaaaaaaataaaattttaaactaacttaaaaaaaaaaaaaaaaaaaa

SEQ ID NO: 12625 - DNA, 3805 bp, Homo sapiens
tccgcggtcttctctctccacccccgacaccgcggggctccccccgcccgcccacggcgggccccggctgcccgatccccctcgcttcccgcgctctccagcggggccccagccccggccccctctctccctcccttctctctaattccccttccggacgctgccatcatgttgaagcctcagccgctacaacagccctcccagccccagcagccgccccccacgcaacaggccgtggcccgtcggccccccgggggcaccagccctcccaacggcggcctcccggggccgctggccacctctgcggctcctcccgggcctccagcggccgcctccccctgcctggggcctgtggccgctgccgggagcgggctccgccggggagccgaaggcatcttggcgccgcagccgccgccgccgcagcaacaccaggagaggccgggggcagccgccatcggcagcgccaggggacagagcacaggaaagggacccccacagtcacctgtgtttgaaggcgtctacaacaattccagaatgctgcatttccttacagctgttgtgggctccacttgtgatgtaaaggtgaaaaatggtaccacttatgagggtatcttcaagacgctaagctcaaagtttgaactagccgtggatgctgtgcaccggaaagcatctgagccagcaggtggccctcgtcgggaggacattgtggacaccatggtgtttaagccaagtgatgtcatgcttgttcacttccgaaatgttgacttcaactatgctactaaagacaagttcaccgattcagccattgccatgaactcgaaagtgaatggggaacacaaagagaaggtgcttcagcgctgggaggggggtgacagcaacagcgacgactatgacctcgagtctgacatgtccaatggatgggaccccaatgaaatgttcaagttcaatgaggagaactacggtgtgaagactacctatgatagcagtctttcttcttatacggtgcccttagaaaaggacaactcagaagagtttcgtcagcgagagctgcgtgcggcccagttggctcgagagattgaatcaagcccccagtaccgcctacggatcgccatggagaacgacgatgggcgcactgaagaggagaagcacagtgcagtccagcggcagggctcagggcgggagagccccagcttggcatccagggaggggaagtatatccctctgcctcaacgagtccgggaaggtccccggggaggagttcgatgcagcagctctcggggcggtcggcctggccttagctctttgccacctcgtggccctcaccatctggacaacagcagccctggcccaggttctgaggcccgtggtatcaatggaggcccttcccgcatgtccccaaaggcacagcggcctctgagaggtgccaagactctgtcttcgcccagtaataggccttctggagaaacttctgttccacctcctcctgcagtgggccggatgtatcccccgcgttctcccaagtctgctgcccctgccccaatctcagcttcctgtccagagcctcccatcggctcggcagtgccaacctcttcagcctccatccctgtgacctcatcagtctcagatcctggagtgggctccatttctccagcttctccaaagatctccctggcccccacagatgtaaaagaactctctaccaaggaacctgggagaactctggagccccaggagctggctcggatagctgggaaagtccctggtcttcagaatgaacagaaacgattccaactggaagaactgagaaagtttggggcccagtttaagcttcagcccagtagctcccctgagaacagcctggatccttttcctccccggatcttaaaggaggagcccaaaggaaaggagaaagaggttgatggtctgttgacttcagagcccatggggtctcccgtctcctccaagacagagtccgtatcggataaggaggacaaaccacccctggcaccatcaggaggcactgaggggccagagcagcccccaccaccttgtccaagccaaactggcagccccccggtgggcctcatcaagggagaagacaaagatgagggccctgttgctgaacaagtaaagaaatcaacgttgaaccctaatgctaaggagttcaatcctacaaagcctctgctgtctgtgaataaatccaccagtaccccaacttctccggggccccggactcattcaactccctccatcccggtgctgacagcaggccagagtgggctatacagcccccagtacatctcctacatacctcagatccacatgggaccagctgtgcaggcacctcagatgtatccatatcctgtatccaattcagtgcctgggcagcagggcaagtaccggggagcaaaaggctcccttcctccgcagcgctcggaccaacaccagccagcctcagccccgccgatgatgcaggccgccgcggctgctggcccgcctctggtggctgccacgccctattcttcctacatcccctacaaccctcagcagttcccaggccagccagccatgatgcagcccatggcccactacccctcacagccggtgtttgcccccatgcttcagagcaacccacgcatgctgacgtcgggcagccatccccaggccatcgtgtcatcctctacccctcagtacccttctgcagagcagcctaccccccaagccctttatgccactgttcaccagtcctacccacaccatgccacacagctccatgcccaccagccgcagccggctaccacgcctactggaagccagccgcagtcccagcatgcggcccccagtcctgtccagcatcaggcggggcaggccccacacttgggcagtggacagccacagcagaatctgtaccacccaggggccctgacaggcacgccgccctctctgccaccgggaccttctgcccagtcccctcagagcagcttcccccagccagccgctgtgtatgccatccaccaccagcagctgccccacggcttcaccaacatggcccatgttacccaggcccatgtccaaactggaatcacagcagccccgccccctcaccctggggctccccacccgccccaggtgatgctgctgcacccaccccagagtcatggggggcccccccaaggcgcggtgccccagagtggggtgcctgcactctcagcttccacaccctcaccctacccctacatcggacacccccaaggtgagcagcctggccaggcgcctggatttccaggaggagccgatgacaggattcctccccttccaccccccggggaactgaagattgtcctggccgcgacctgagacctccatgagtggagggaagagtgatctatgtctcttcccccagcagctcggaccactcccagccccccatccccccgttccccaggggagctggggaattcctgccaagcaccttgaatgggaggggcctcacagagggcagggccagggtccagcaggggtggggggttcctgctctgcccctgcccgtccccacccagtcttgccctcccatcctctcatctattcccccgctggagacggaagatcttttattttctattatttataacttcagacttgggccccctgttctttctttcccattaacttgagtgacctgtgtgagagacagacagatgccccacgaggatggctggacaaggacttttactttttattacataaaaatattaaaaaataaataaaaaaaataaaattttaaactaaaaaaaaaaaaaaaaaa

SEQ ID NO: 12626 - DNA, 3758 bp, Homo sapiens
tccgcggtcttctctctccacccccgacaccgcggggctccccccgcccgcccacggcgggccccggctgcccgatccccctcgcttcccgcgctctccagcggggccccagccccggccccctctctccctcccttctctctaattccccttccggacgctgccatcatgttgaagcctcagccgctacaacagccctcccagccccagcagccgccccccacgcaacaggccgtggcccgtcggccccccgggggcaccagccctcccaacggcggcctcccggggccgctggccacctctgcggctcctcccgggcctccagcggccgcctccccctgcctggggcctgtggccgctgccgggagcgggctccgccggggagccgaaggcatcttggcgccgcagccgccgccgccgcagcaacaccaggagaggccgggggcagccgccatcggcagcgccaggggacagagcacaggaaagggacccccacagtcacctgtgtttgaaggcgtctacaacaattccagaatgctgcatttccttacagctgttgtgggctccacttgtgatgtaaaggtgaaaaatggtaccacttatgagggtatcttcaagacgctaagctcaaagtttgaactagccgtggatgctgtgcaccggaaagcatctgagccagcaggtggccctcgtcgggaggacattgtggacaccatggtgtttaagccaagtgatgtcatgcttgttcacttccgaaatgttgacttcaactatgctactaaagacaagttcaccgattcagccattgccatgaactcgaaagtgaatggggaacacaaagagaaggtgcttcagcgctgggaggggggtgacagcaacagcgacgactatgacctcgagtctgacatgtccaatggatgggaccccaatgaaatgttcaagttcaatgaggagaactacggtgtgaagactacctatgatagcagtctttcttcttatacggtgcccttagaaaaggacaactcagaagagtttcgtcagcgagagctgcgtgcggcccagttggctcgagagattgaatcaagcccccagtaccgcctacggatcgccatggagaacgacgatgggcgcactgaagaggagaagcacagtgcagtccagcggcagggctcagggcgggagagccccagcttggcatccagggaggggaagtatatccctctgcctcaacgagtccgggaaggtccccggggaggagttcgatgcagcagctctcggggcggtcggcctggccttagctctttgccacctcgtggccctcaccatctggacaacagcagccctggcccaggttctgaggcccgtggtatcaatggaggcccttcccgcatgtccccaaaggcacagcggcctctgagaggtgccaagactctgtcttcgcccagtaataggccttctggagaaacttctgttccacctcctcctgcagtgggccggatgtatcccccgcgttctcccaagtctgctgcccctgccccaatctcagcttcctgtccagagcctcccatcggctcggcagtgccaacctcttcagcctccatccctgtgacctcatcagtctcagatcctggagtgggctccatttctccagcttctccaaagatctccctggcccccacagatgtaaaagaactctctaccaaggaacctgggagaactctggagccccaggagctggctcggatagctgggaaagtccctggtcttcagaatgaacagaaacgattccaactggaagaactgagaaagtttggggcccagtttaagcttcagcccagtagctcccctgagaacagcctggatccttttcctccccggatcttaaaggaggagcccaaaggaaaggagaaagaggttgatggtctgttgacttcagagcccatggggtctcccgtctcctccaagacagagtccgtatcggataaggaggacaaaccacccctggcaccatcaggaggcactgaggggccagagcagcccccaccaccttgtccaagccaaactggcagccccccggtgggcctcatcaagggagaagacaaagatgagggccctgttgctgaacaagtaaagaaatcaacgttgaaccctaatgctaaggagttcaatcctacaaagcctctgctgtctgtgaataaatccaccagtaccccaacttctccggggccccggactcattcaactccctccatcccggtgctgacagcaggccagagtgggctatacagcccccagtacatctcctacatacctcagatccacatgggaccagctgtgcaggcacctcagatgtatccatatcctgtatccaattcagtgcctgggcagcagggcaagtaccggggagcaaaaggctcccttcctccgcagcgctcggaccaacaccagccagcctcagccccgccgatgatgcaggccgccgcggctgctggcccgcctctggtggctgccacgccctattcttcctacatcccctacaaccctcagcagttcccaggccagccagccatgatgcagcccatggcccactacccctcacagccggtgtttgcccccatgcttcagagcaacccacgcatgctgacgtcgggcagccatccccaggccatcgtgtcatcctctacccctcagtacccttctgcagagcagcctaccccccaagccctttatgccactgttcaccagtcctacccacaccatgccacacagctccatgcccaccagccgcagccggctaccacgcctactggaagccagccgcagtcccagcatgcggcccccagtcctgtccagcatcaggcggggcaggccccacacttgggcagtggacagccacagcagaatctgtaccacccaggggccctgacaggcacgccgccctctctgccaccgggaccttctgcccagtcccctcagagcagcttcccccagccagccgctgtgtatgccatccaccaccagcagctgccccacggcttcaccaacatggcccatgttacccaggcccatgtccaaactggaatcacagcagccccgccccctcaccctggggctccccacccgccccaggtgatgctgctgcacccaccccagagtcatggggggcccccccaaggcgcggtgccccagagtggggtgcctgcactctcagcttccacaccctcaccctacccctacatcggacacccccaagctccccttccaccccccggggaactgaagattgtcctggccgcgacctgagacctccatgagtggagggaagagtgatctatgtctcttcccccagcagctcggaccactcccagccccccatccccccgttccccaggggagctggggaattcctgccaagcaccttgaatgggaggggcctcacagagggcagggccagggtccagcaggggtggggggttcctgctctgcccctgcccgtccccacccagtcttgccctcccatcctctcatctattcccccgctggagacggaagatcttttattttctattatttataacttcagacttgggccccctgttctttctttcccattaacttgagtgacctgtgtgagagacagacagatgccccacgaggatggctggacaaggacttttactttttattacataaaaatattaaaaaataaataaaaaaaataaaattttaaactaacttaaaaaaaaaaaaaaaaaaaa

SEQ ID NO: 12627 - DNA, 3277 bp, Homo sapiens
gcgtgctgtgggcggtgccgcgcggacccccgggaagtgtctctgtgggcggccgccgggttgagctgcggcacacgtgcgacggccgtgatgaagttcgcttaccggttttcaaatttgctgggtacggtgtaccggcgtgggaacctaaattttacctgcgatggaaattcagttatcagtcccgtgggcaatagagtcactgtatttgaccttaaaaacaacaaatctgacacgctgcccctggccactcggtacaacgtcaagtgcgtggggctgtccccggatggccgcctcgctatcatcgtcgatgaagggggcgatgcgctgctggtcagcctggtctgcaggtctgtgctgcaccacttccacttcaagggctctgtgcacagtgtgtccttctcccctgatggcaggaagtttgttgtcacaaagggtaacattgcccagatgtatcatgcccctgggaagaagcgggagttcaacgccttcgttctggacaagacctattttgggccctacgatgagaccacctgcatcgactggacggatgactccaggtgctttgtggttgggagcaaagacatgtccacctgggtgttcggagccgagcgctgggacaacctcatctactatgcactggggggacataaggatgccatcgtggcctgcttctttgaatccaacagcctggacctgtactcactcagccaggacggagtgctgtgcatgtggcagtgtgacacgccccccgagggcttgcggctgaagccccctgcgggctggaaagcagacctgttgcagcgggaggaggaagaggaggaggaggaggaccaggagggcgacagagagaccaccatccggggaaaagccactccggccgaggaggagaagacaggaaaagtgaagtactcacggctggccaagtacttcttcaataaagaaggggattttaacaacctgacagctgcagcatttcataagaagtctcacctcttggtcactggctttgcttctggaatcttccatcttcatgagctgccagagtttaacctcatccactccctgagcatttcagatcagagcatcgcctcagtggccatcaatagctcgggggactggattgcttttggctgttcaggcctgggccagctgctggtgtgggagtggcagagtgagtcctacgtgctcaagcagcagggccacttcaacagcatggtggccctggcctactcgcccgacggacagtacatcgtgactggcggggacgacggcaaggtcaaggtgtggaacaccctcagcggcttctgcttcgtcacttttacggagcactccagcggggtgaccggtgtgacctttactgccaccggctacgttgtggtgacctcatccatggacgggaccgtgcgagcctttgaccttcacaggtaccgaaacttccgcaccttcacctctccacgccccacccagttctcctgtgtggcggtggatgcgagcggtgagatcgtctctgcaggggcgcaggactcctttgagattttcgtgtggtccatgcagacaggcaggctccttgatgttttgtctggacacgaagggcccatcagtggtctgtgttttaacccaatgaagtccgtcctggccagtgcctcctgggacaagacagtgcgcctatgggacatgtttgacagctggaggaccaaggagacgctggccctgacctctgatgctctggctgtgacttttcgccctgatggtgcggagctggctgtggccacactgaactcacagatcaccttctgggaccctgagaacgcggtgcagacgggctccattgagggcaggcatgacctcaagactggcaggaaggagctggacaagattacagccaagcacgcggccaaggggaaggccttcaccgccctgtgctactctgcagacggccacagcatcctggcgggaggcatgtccaagttcgtgtgcatctaccacgtccgtgagcagattctcatgaagaggttcgagatctcttgcaacctgtctttggacgccatggaggaatttttgaaccgaagaaaaatgacagagtttggcaacctggcactaattgatcaggatgctgggcaggaggatggagtcgcgataccactgccaggcgtcaggaaaggtgacatgagttctcggcacttcaaacctgagatcagggtgacctcactccgcttctctcccactgggcgctgctgggcggccaccaccacggagggactcctcatctactccctggacacccgcgtgctctttgacccgtttgagctggacaccagcgtcacccccgggagggtgcgcgaggcactgcgccagcaggacttcaccagggccatcctcatggccctccggctcaacgagagcaaactggtgcaggaggccctggaggcggtgcccaggggcgagattgaagtggtcacctcctcccttcctgaactgtatgtggagaaagtgctggagtttttagcttcctcctttgaagtgtctcgccacctggaattctacctcctctggactcacaaactgctcatgttgcacggacagaagctgaagtccagagccgggacgctgctgcctgtcattcagttcctccagaagagcatccagcggcacctggacgacctgtcgaaactctgtagctggaaccactataacatgcagtacgcactagcagtttccaagcagcggggcacaaaacgctccctagacccgctgggaagtgaggaggaggcagaagcatctgaagatgacagcctgcatctgcttggaggaggaggcagagactcagaagaagagatgctggcctagagccagccggttgcagcgttggattgtgccggctaagacctgccagggagatgggacccttgtgccacctgggccagcaaagaggaggggtccagagaacagctgaaatactgtcactagtggtagtgacttgcttttcctgtgcacacatgtagcccatcaggacagcgagccgacgggtcacgccaggggccggcacgcactggcacctggccccaggagcggggccgtgtgaacggtgatgaatgttgaaaatgcgtctcagagaggtattcacatgaactttgtatgagacttatttatatctttaacataaaggtttgataaagaacttagggattaaaaaaaagatggagttttctaacgtgaggatgaagtctacacttcagattaaaaagggttatgttgtaaaaaaaaaaaaaaaaaa

SEQ ID NO: 12628 - DNA, 2625 bp, Homo sapiens
atgctgaagcggaggcggccgctgctcgaggatcaaacagagcatactgaatcagcaggactggctggtggtgcagcagacatcatgagtaagcaccgagaagtctgttccttatcacgtgtgtaaggggaaaaaggtttaaacaagtctcttaagtggtgtttcctcaccgatggagaattacttccaagcagaagcttacaacctggacaaggtgttagatgaatttgaacaaaacgaagatgaaacagtttcttctactttattggatacaaagtggaataagattctagatcccccttctcaccggctgtcatttaaccctactttggccagtgtgaatgaatctgcagtttctaatgagtcacaaccacaactgaaagtcttctccctggctcattcagctcccctgaccacagaggaagaggatcactgtgctaatggacaggactgtaatctaaatccagagattgccacaatgtggattgatgaaaatgctgttgcagaagaccagttaattaagagaaactatagttgggatgatcaatgcagtgctgttgaagtgggagagaagaaatgtggaaacctggcttgtctgccagatgagaagaatgttcttgttgtagccgtcatgcataactgtgataaaaggacattacaaaacgatttacaggattgtaataattataatagtcaatcccttatggatgcttttagctgttcactggataatgaaaacagacaaactgatcaatttagttttagtataaatgagtccactgaaaaagatatgaattcagagaaacaaatggatccattgaatagaccgaaaacagaggggagatctgttaaccatctgtgtcctacttcatctgatagtctagccagtgtctgttccccttcacaattaaaggatgacggaagtataggtagagacccctccatgtctgcgattacaagtttaacggttgattcagtaatctcatcccagggaacagatggatgtcctgctgttaaaaagcaagagaactatataccagatgaggacctcactggcaaaatcagctctcctaggacagatctagggagtccaaattccttttcccacatgagtgaggggattttgatgaaaaaagagccagcagaggagagcaccactgaagaatccctccggtctggtttacctttgcttctcaaaccagacatgcctaatgggtctggaaggaataatgactgtgaacggtgttcagattgccttgtgcctaatgaagttagggctgatgaaaatgaaggttatgaacatgaagaaactcttggcactacagaattccttaatatgacagagcatttctctgaatctcaggacatgactaattggaagttgactaaactaaatgagatgaatgatagccaagtaaacgaagaaaaggaaaagtttctacagattagtcagcctgaggacactaatggtgatagtggaggacagtgtgttggattggcagatgcaggtctagatttaaaaggaacttgcattagtgaaagtgaagaatgtgatttctccactgttatagacacaccagcagcaaattatctatctaatggttgtgattcctatggaatgcaagacccaggtgtttcttttgttccaaagactttaccctccaaagaagattcagtaacagaagaaaaagaaatagaggaaagcaagtcagaatgctactcaaatatttatgaacagagaggaaatgaggccacagaagggagtggactacttttaaacagcactggtgacctaatgaagaaaaattatttacataatttctgtagtcaagttccatcagtgcttgggcaatcttcccccaaggtagtagcaagcctgccatctatcagtgttccttttggtggtgcaagacccaagcaaccttctaatcttaaacttcaaattccaaagccattatcagaccatttacaaaatgactttcctgcaaacagtggaaataatactaaaaataaaaatgatattcttgggaaagcaaaattaggggaaaactcagcaaccaatgtatgcagtccatctttgggaaacatctctaatgtcgatacaaatggggaacatttagaaagttatgaggctgagatctccactagaccatgccttgcattagctccagatagcccagataatgatctcagagctggtcagtttggaatttctgccagaaagccattcaccactctgggtgaggtggctccagtatgggtaccggattctcaggctccaaattgcatgaaatgtgaagccaggtttacattcaccaaaaggaggcatcactgcagagcatgtgggaaggttttctgtgcttcctgctgtagcctgaaatgtaaactgttatacatggacagaaaggaagctagagtgtgtgtaatctgccattcagtgctaatgaatggtaagtattaaaacaggttgatttcatagttattgagacaaaacaagggaattacgatgagaagacttttttccccctgcctttctttacaagttgctcaccttctcaaatgtcataactttaactgaaaatatttagctaaatttccatgttttgaaagtatcttagcatttca

SEQ ID NO: 12629 - DNA, 4930 bp, Homo sapiens
atgctgaagcggaggcggccgctgctcgaggatcaaacagagcatactgaatcagcaggactggctggtggtgcagcagacatcatgagtaagcaccgagaagtctgttccttatcacgtgtgtaaggggaaaaaggtttaaacaagtctcttaagtggtgtttcctcaccgatggagaattacttccaagcagaagcttacaacctggacaaggtgttagatgaatttgaacaaaacgaagatgaaacagtttcttctactttattggatacaaagtggaataagattctagatcccccttctcaccggctgtcatttaaccctactttggccagtgtgaatgaatctgcagtttctaatgagtcacaaccacaactgaaagtcttctccctggctcattcagctcccctgaccacagaggaagaggatcactgtgctaatggacaggactgtaatctaaatccagagattgccacaatgtggattgatgaaaatgctgttgcagaagaccagttaattaagagaaactatagttgggatgatcaatgcagtgctgttgaagtgggagagaagaaatgtggaaacctggcttgtctgccagatgagaagaatgttcttgttgtagccgtcatgcataactgtgataaaaggacattacaaaacgatttacaggattgtaataattataatagtcaatcccttatggatgcttttagctgttcactggataatgaaaacagacaaactgatcaatttagttttagtataaatgagtccactgaaaaagatatgaattcagagaaacaaatggatccattgaatagaccgaaaacagaggggagatctgttaaccatctgtgtcctacttcatctgatagtctagccagtgtctgttccccttcacaattaaaggatgacggaagtataggtagagacccctccatgtctgcgattacaagtttaacggttgattcagtaatctcatcccagggaacagatggatgtcctgctgttaaaaagcaagagaactatataccagatgaggacctcactggcaaaatcagctctcctaggacagatctagggagtccaaattccttttcccacatgagtgaggggattttgatgaaaaaagagccagcagaggagagcaccactgaagaatccctccggtctggtttacctttgcttctcaaaccagacatgcctaatgggtctggaaggaataatgactgtgaacggtgttcagattgccttgtgcctaatgaagttagggctgatgaaaatgaaggttatgaacatgaagaaactcttggcactacagaattccttaatatgacagagcatttctctgaatctcaggacatgactaattggaagttgactaaactaaatgagatgaatgatagccaagtaaacgaagaaaaggaaaagtttctacagattagtcagcctgaggacactaatggtgatagtggaggacagtgtgttggattggcagatgcaggtctagatttaaaaggaacttgcattagtgaaagtgaagaatgtgatttctccactgttatagacacaccagcagcaaattatctatctaatggttgtgattcctatggaatgcaagacccaggtgtttcttttgttccaaagactttaccctccaaagaagattcagtaacagaagaaaaagaaatagaggaaagcaagtcagaatgctactcaaatatttatgaacagagaggaaatgaggccacagaagggagtggactacttttaaacagcactggtgacctaatgaagaaaaattatttacataatttctgtagtcaagttccatcagtgcttgggcaatcttcccccaaggtagtagcaagcctgccatctatcagtgttccttttggtggtgcaagacccaagcaaccttctaatcttaaacttcaaattccaaagccattatcagaccatttacaaaatgactttcctgcaaacagtggaaataatactaaaaataaaaatgatattcttgggaaagcaaaattaggggaaaactcagcaaccaatgtatgcagtccatctttgggaaacatctctaatgtcgatacaaatggggaacatttagaaagttatgaggctgagatctccactagaccatgccttgcattagctccagatagcccagataatgatctcagagctggtcagtttggaatttctgccagaaagccattcaccactctgggtgaggtggctccagtatgggtaccggattctcaggctccaaattgcatgaaatgtgaagccaggtttacattcaccaaaaggaggcatcactgcagagcatgtgggaaggttttctgtgcttcctgctgtagcctgaaatgtaaactgttatacatggacagaaaggaagctagagtgtgtgtaatctgccattcagtgctaatgaatgctcaagcctgggagaacatgatgagtgcctcaagccagagccctaaccctaacaatcctgctgaatactgttctactatccctcccttgcagcaagctcaggcctcaggagctctgagctctccacctcccactgtgatggtacctgtgggagttttaaagcaccctggagcagaagtggctcagcccagagagcagaggcgagtttggtttgctgatgggatcttgcccaatggagaagttgctgatgcagccaaattaacaatgaatggaacttcctctgcaggaaccctggctgtgtcacacgacccagtcaagccagtaactaccagtcctctaccagcagagacggatatttgtctattctctgggagtataactcaggttggaagtcctgttggaagtgcaatgaatcttattcctgaagatggccttcctcccattctcatctccactggtgtaaaaggagactatgctgtggaagagaaaccatcacagatttcagtaatgcagcagttggaggatggtggccctgacccacttgtatttgttttaaatgcaaatttgttgtcaatggttaaaattgtaaattatgtgaacaggaagtgctggtgtttcacaaccaagggaatgcatgcagtgggtcagtctgagatagtcattcttctacagtgtttaccggatgaaaagtgtttgccaaaggatatctttaatcactttgtgcagctttatcgggatgctctggcagggaatgtggtgagcaacttgggacattccttcttcagtcaaagtttccttggcagtaaagaacatggtggattcttatatgtgacatctacctaccagtcactgcaagacctagtactcccaaccccaccttacttgtttgggattcttatccagaaatgggaaactccttgggctaaagtatttcctatccgtctgatgttgagacttggagctgaatatcgactttatccatgcccactattcagtgtcagatttcggaagccattgtttggagagacggggcataccatcatgaatcttcttgcagacttcagaaattaccagtataccttgccagtagttcaaggtttggtggttgatatggaagttcggaaaactagcatcaaaattcccagcaacagatacaatgagatgatgaaagccatgaacaagtccaatgagcatgtcctggcaggaggtgcctgcttcaatgaaaaggcagactctcatcttgtgtgtgtacagaatgatgatggaaactatcagacccaggctatcagtattcacaatcagcccagaaaagtgactggtgccagtttctttgtgttcagtggcgctctgaaatcctcttctggataccttgccaagtccagtattgtggaagatggtgttatggtccagattactgcagagaacatggattccttgaggcaggcactgcgagagatgaaggacttcaccatcacctgtgggaaggcggacgcggaggaaccccaggagcacatccacatccagtgggtggatgatgacaagaacgttagcaagggtgtcgtaagtcctatagatgggaagtccatggagactataacaaatgtgaagatattccatggatcagaatataaagcaaatggaaaagtaatcagatggacagaggtgtttttcctagaaaacgatgaccagcacaattgcctcagtgatcctgcagatcacagtagattgactgagcatgttgccaaagctttttgccttgctctctgtcctcacctgaaacttctgaaggaagatggaatgaccaaactgggactacgtgtgacacttgactcagatcaggttggctatcaagcagggagcaatggccagccccttccctcgcagtacatgaatgatctggacagcgccttggtgccggtgatccatggaggggcctgccagcttagtgagggccccgttgtcatggaactcatcttttatattctggaaaacatcgtataaacagagaagacttcatttttttctgttcagacttgttgcaacagcagtcatacccaaatcatttgcactttaaaactggaagattaagcttttgttaacactattaatggggtggggaatagggtgggagtgggggtttgggagacgggtgggaaagggtggttggggggaccgatgttccataattctaagtcttctatgcattgtccaccaagaagatctgggcagcttctgttcctgcacaacagttatgctatccttgcagctaatccccttctgttactgtttagacaagaattccgctcctctctcaagatttacttatggtcatgtgctcagaaatgctcaaatgggtacaaccatcaccaagggtgggatgggagggcagaggggaaataaaatataaagcatcagttcttgcactctttgtacagaattggtataaaaaggataattccacactgaaaaaaaaaaaaaaaa

SEQ ID NO: 12630 - DNA, 4753 bp, Homo sapiens
atgctgaagcggaggcggccgctgctcgaggatcaaacagagcatactgaatcagcaggactggctggtggtgcagcagacatcatgagtaagcaccgagaagtctgttccttatcacgtgtgtaaggggaaaaaggtttaaacaagtctcttaagtggtgtttcctcaccgatggagaattacttccaagcagaagcttacaacctggacaaggtgttagatgaatttgaacaaaacgaagatgaaacagtttcttctactttattggatacaaagtggaataagattctagatcccccttctcaccggctgtcatttaaccctactttggccagtgtgaatgaatctgcagtttctaatgagtcacaaccacaactgaaagtcttctccctggctcattcagctcccctgaccacagaggaagaggatcactgtgctaatggacaggactgtaatctaaatccagagattgccacaatgtggattgatgaaaatgctgttgcagaagaccagttaattaagagaaactatagttgggatgatcaatgcagtgctgttgaagtgggagagaagaaatgtggaaacctggcttgtctgccagatgagaagaatgttcttgttgtagccgtcatgcataactgtgataaaaggacattacaaaacgatttacaggattgtaataattataatagtcaatcccttatggatgcttttagctgttcactggataatgaaaacagacaaactgatcaatttagttttagtataaatgagtccactgaaaaagatatgaattcagagaaacaaatggatccattgaatagaccgaaaacagaggggagatctgttaaccatctgtgtcctacttcatctgatagtctagccagtgtctgttccccttcacaattaaaggatgacggaagtataggtagagacccctccatgtctgcgattacaagtttaacggttgattcagtaatctcatcccagggaacagatggatgtcctgctgttaaaaagcaagagaactatataccagatgaggacctcactggcaaaatcagctctcctaggacagatctagggagtccaaattccttttcccacatgagtgaggggattttgatgaaaaaagagccagcagaggagagcaccactgaagaatccctccggtctggtttacctttgcttctcaaaccagacatgcctaatgggtctggaaggaataatgactgtgaacggtgttcagattgccttgtgcctaatgaagttagggctgatgaaaatgaaggttatgaacatgaagaaactcttggcactacagaattccttaatatgacagagcatttctctgaatctcaggacatgactaattggaagttgactaaactaaatgagatgaatgatagccaagtaaacgaagaaaaggaaaagtttctacagattagtcagcctgaggacactaatggtgatagtggaggacagtgtgttggattggcagatgcaggtctagatttaaaaggaacttgcattagtgaaagtgaagaatgtgatttctccactgttatagacacaccagcagcaaattatctatctaatggttgtgattcctatggaatgcaagacccaggtgtttcttttgttccaaagactttaccctccaaagaagattcagtaacagaagaaaaagaaatagaggaaagcaagtcagaatgctactcaaatatttatgaacagagaggaaatgaggccacagaagggagtggactacttttaaacagcactggtgacctaatgaagaaaaattatttacataatttctgtagtcaagttccatcagtgcttgggcaatcttcccccaaggtagtagcaagcctgccatctatcagtgttccttttggtggtgcaagacccaagcaaccttctaatcttaaacttcaaattccaaagccattatcagaccatttacaaaatgactttcctgcaaacagtggaaataatactaaaaataaaaatgatattcttgggaaagcaaaattaggggaaaactcagcaaccaatgtatgcagtccatctttgggaaacatctctaatgtcgatacaaatggggaacatttagaaagttatgaggctgagatctccactagaccatgccttgcattagctccagatagcccagataatgatctcagagctggtcagtttggaatttctgccagaaagccattcaccactctgggtgaggtggctccagtatgggtaccggattctcaggctccaaattgcatgaaatgtgaagccaggtttacattcaccaaaaggaggcatcactgcagagcatgtgggaaggttttctgtgcttcctgctgtagcctgaaatgtaaactgttatacatggacagaaaggaagctagagtgtgtgtaatctgccattcagtgctaatgaatgtggctcagcccagagagcagaggcgagtttggtttgctgatgggatcttgcccaatggagaagttgctgatgcagccaaattaacaatgaatggaacttcctctgcaggaaccctggctgtgtcacacgacccagtcaagccagtaactaccagtcctctaccagcagagacggatatttgtctattctctgggagtataactcaggttggaagtcctgttggaagtgcaatgaatcttattcctgaagatggccttcctcccattctcatctccactggtgtaaaaggagactatgctgtggaagagaaaccatcacagatttcagtaatgcagcagttggaggatggtggccctgacccacttgtatttgttttaaatgcaaatttgttgtcaatggttaaaattgtaaattatgtgaacaggaagtgctggtgtttcacaaccaagggaatgcatgcagtgggtcagtctgagatagtcattcttctacagtgtttaccggatgaaaagtgtttgccaaaggatatctttaatcactttgtgcagctttatcgggatgctctggcagggaatgtggtgagcaacttgggacattccttcttcagtcaaagtttccttggcagtaaagaacatggtggattcttatatgtgacatctacctaccagtcactgcaagacctagtactcccaaccccaccttacttgtttgggattcttatccagaaatgggaaactccttgggctaaagtatttcctatccgtctgatgttgagacttggagctgaatatcgactttatccatgcccactattcagtgtcagatttcggaagccattgtttggagagacggggcataccatcatgaatcttcttgcagacttcagaaattaccagtataccttgccagtagttcaaggtttggtggttgatatggaagttcggaaaactagcatcaaaattcccagcaacagatacaatgagatgatgaaagccatgaacaagtccaatgagcatgtcctggcaggaggtgcctgcttcaatgaaaaggcagactctcatcttgtgtgtgtacagaatgatgatggaaactatcagacccaggctatcagtattcacaatcagcccagaaaagtgactggtgccagtttctttgtgttcagtggcgctctgaaatcctcttctggataccttgccaagtccagtattgtggaagatggtgttatggtccagattactgcagagaacatggattccttgaggcaggcactgcgagagatgaaggacttcaccatcacctgtgggaaggcggacgcggaggaaccccaggagcacatccacatccagtgggtggatgatgacaagaacgttagcaagggtgtcgtaagtcctatagatgggaagtccatggagactataacaaatgtgaagatattccatggatcagaatataaagcaaatggaaaagtaatcagatggacagaggtgtttttcctagaaaacgatgaccagcacaattgcctcagtgatcctgcagatcacagtagattgactgagcatgttgccaaagctttttgccttgctctctgtcctcacctgaaacttctgaaggaagatggaatgaccaaactgggactacgtgtgacacttgactcagatcaggttggctatcaagcagggagcaatggccagccccttccctcgcagtacatgaatgatctggacagcgccttggtgccggtgatccatggaggggcctgccagcttagtgagggccccgttgtcatggaactcatcttttatattctggaaaacatcgtataaacagagaagacttcatttttttctgttcagacttgttgcaacagcagtcatacccaaatcatttgcactttaaaactggaagattaagcttttgttaacactattaatggggtggggaatagggtgggagtgggggtttgggagacgggtgggaaagggtggttggggggaccgatgttccataattctaagtcttctatgcattgtccaccaagaagatctgggcagcttctgttcctgcacaacagttatgctatccttgcagctaatccccttctgttactgtttagacaagaattccgctcctctctcaagatttacttatggtcatgtgctcagaaatgctcaaatgggtacaaccatcaccaagggtgggatgggagggcagaggggaaataaaatataaagcatcagttcttgcactctttgtacagaattggtataaaaaggataattccacactgaaaaaaaaaaaaaaaa

SEQ ID NO: 12631 - DNA, 2129 bp, Homo sapiens
gatgagcaatgagggaataatccccattccgtctggaatcagagggcgggcctgccgcggaggcatctgggaaacggagttcccaggcaggcgaagcccaggggccgtcaggaagtcagcggcgcctgcgcgggcgcctcagattcaggatgcgcgcgcagcgctctccgcccagcggaagttttcgctgggcaactgagaaggtgagtccgggtaactgcggaggatccgagggtcaggctgcagaagcccagaatcccaccccagtccccaagtacagaggtcgctgtcaagatggagtttccaacccagtaaatccaagggccagaccgtgacctcataaagcatgatctccttctgtccagactgtggcaaaagtatccaagcggcattcaaattctgcccctactgtggaaattctttgcctgtagaggagcatgtagggtcccagacctttgtcaatccacatgtgtcatccttccaaggctcaaagagagggctgaactccagttttgaaacctctcctaagaaagtgaaatggtccagcaccgtcacctctccccgattatccctcttctcagatggtgacagttctgagtctgaagatactctgagttcctctgagagatccaaaggctccgggagcagacccccaacccccaaaagcagccctcagaagaccaggaagagccctcaggtgaccaggggtagccctcagaagaccagctgtagccctcagaagaccaggcagagccctcagacgctgaagcggagccgagtgaccacctcacttgaagctttgcccacagggacagtgctgacagacaagagtgggcgacagtggaagctgaagtccttccagaccagggacaaccagggcattctctatgaagctgcacccacctccaccctcacctgtgactcaggaccacagaagcaaaagttctcactcaaactggatgccaaggatgggcgcttgttcaatgagcagaacttcttccagcgggccgccaagcctctgcaagtcaacaagtggaagaagctgtactcgaccccactgctggccatccctacctgcatgggtttcggtgttcaccaggacaaatacaggttcttggtgttacccagcctggggaggagccttcagtcggccctggatgtcagcccaaagcatgtgctgtcagagaggtctgtgctgcaggtggcctgccggctgctggatgccctggagttcctccatgagaatgagtatgttcatggaaatgtgacagctgaaaatatctttgtggatccagaggaccagagtcaggtgactttggcaggctatggcttcgccttccgctattgcccaagtggcaaacacgtggcctacgtggaaggcagcaggagccctcacgagggggaccttgagttcattagcatggacctgcacaagggatgcgggccctcccgccgcagcgacctccagagcctgggctactgcatgctgaagtggctctacgggtttctgccatggacaaattgccttcccaacactgaggacatcatgaagcaaaaacagaagtttgttgataagccggggcccttcgtgggaccctgcggtcactggatcaggccctcagagaccctgcagaagtacctgaaggtggtgatggccctcacgtatgaggagaagccgccctacgccatgctgaggaacaacctagaagctttgctgcaggatctgcgtgtgtctccatatgaccccattggcctcccgatggtgccctaggtggaatccagaactttccatttgcagtgtgcaacagaaaaaaaaaaatgaagtaatgtgactcaaggcctgctgtttaatcacagataagcttctagaacaagccctggaatgtgcattcctgccactggtttcaggatactcatcagtcctgattagcctcccggagggccccagtttccctcccgtgaatgtgaagttccccatcttggtggcctgcccttcagccagtgtcctagcaaagctggatggggttgggccggcccacaggggggacccctcctacccttgacacctctgtgctttggtaataaattgttttaccagagaaaaaaaaaaaaaaaaaaaaaaaaaaaaa

SEQ ID NO: 12632 - DNA, 1674 bp, Homo sapiens
gcggccgcccgccgccgcgctcctcctcctcctcctccagcgcccggcggcccgctgcctcctccgcccgacgccccgcgtcccccgccgcgccgccgccgccaccctctgcgccccgcgccgccccccggtcccgcccgccatgcccggcccggccgcgggcagcagggcccgggtctacgccgaggtgaacagtctgaggagccgcgagtactgggactacgaggctcacgtcccgagctggggtaatcaagatgattaccaactggttcgaaaacttggtcggggaaaatatagtgaagtatttgaggccattaatatcaccaacaatgagagagtggttgtaaaaatcctgaagccagtgaagaaaaagaagataaaacgagaggttaagattctggagaaccttcgtggtggaacaaatatcattaagctgattgacactgtaaaggaccccgtgtcaaagacaccagctttggtatttgaatatatcaataatacagattttaagcaactctaccagatcctgacagactttgatatccggttttatatgtatgaactacttaaagctctggattactgccacagcaagggaatcatgcacagggatgtgaaacctcacaatgtcatgatagatcaccaacagaaaaagctgcgactgatagattggggtctggcagaattctatcatcctgctcaggagtacaatgttcgtgtagcctcaaggtacttcaagggaccagagctcctcgtggactatcagatgtatgattatagcttggacatgtggagtttgggctgtatgttagcaagcatgatctttcgaagggaaccattcttccatggacaggacaactatgaccagcttgttcgcattgccaaggttctgggtacagaagaactgtatgggtatctgaagaagtatcacatagacctagatccacacttcaacgatatcctgggacaacattcacggaaacgctgggaaaactttatccatagtgagaacagacaccttgtcagccctgaggccctagatcttctggacaaacttctgcgatacgaccatcaacagagactgactgccaaagaggccatggagcacccatacttctaccctgtggtgaaggagcagtcccagccttgtgcagacaatgctgtgctttccagtggtctcacggcagcacgatgaagactggaaagcgacgggtctgttgcggttctcccacttttccataagcagaacaagaaccaaatcaaacgtcttaacgcgtatagagagatcacgttccgtgagcagacacaaaacggtggcaggtttggcgagcacgaactagaccaagcgaagggcagcccaccaccgtatatcaaacctcacttccgaatgtaaaaggctcacttgcctttggcttcctgttgacttcttcccgacccagaaagcatggggaatgtgaagggtatgcagaatgttgttggttactgttgctccccgagcccctcaactcgtcccgtggccgcctgtttttccagcaaaccacgctaactagctgaccacagactccacagtggggggacgggcgcagtatgtggcatggcggcagttacatattattattttaaaagtatatattattgaataaaaggttttaaaagaaaaaaaaaaaaaaaaaa

SEQ ID NO: 12633 - DNA, 4071 bp, Homo sapiens
ccacgcgtccgcgggttcccagaaagtagcttgatgagtgtccaaagtagcagtggaagtttggaggggccgccatcttggtcccagctctccacgtctccaaccccgggctcggcggcggcggccaggtccctgctgaatcacacgccgccatccgggaggcccagggaaggtgcaatggatgagcttcatagtctggatccaagaaggcaagagttattggaagctagatttactggagttgcaagtgggagcactggaagtacgggcagttgcagtgttggagctaaagcctcaacaaataacgaaagctctaatcacagttttggaagcttgggatctttaagtgacaaagaatcagagacaccggagaagaaacaatcggaatcatccaggggaagaaagagaaaagcagaaaaccagaatgaaagtagtcagggaaaaagtattgggggacgtggccacaaaattagcgactattttgaataccagggtggaaatggctcaagtccagtaagaggcatacctcctgcaatccgttctcctcaaaattcacattcacattccactccttcctcatctgttcgaccgaatagcccttctcctactgcattagcatttggggaccaccctattgtacaaccaaagcaattatcctttaaaattattcagactgatctcacaatgctgaaattagcagcattagaaagtaataaaatccaggacctggaaaagaaggagggacgtatagatgatttgctcagggctaactgtgatctcagacggcaaatagatgaacaacaaaaattacttgaaaaatacaaagaacgattaaataagtgcatatcaatgagcaagaaacttcttattgaaaagagtacacaagaaaagctgtcaagcagagagaagagtatgcaagatcgattacgccttgggcactttacaacagttagacatggcgcttcatttactgaacaatggacagatggttttgcatttcagaatcttgtgaagcaacaagaatgggtgaatcagcaaagggaagatattgaaaggcaaaggaaacttctagccaaacgcaaacctcccacagctaataattctcaggcaccctctaccaattctgaaccaaaacaaaggaaaaacaaagcagtcaatggagcagagaatgatccctttgttagaccaaatttaccacaactgttgactttggcagaatatcatgaacaggaagaaattttcaaacttagactaggacatctcaaaaaggaagaggcagaaatccaggcagaacttgaacgtttggaaagagtcagaaatcttcacatacgtgagctgaaaagaataaacaatgaagataattcacagttcaaagatcacccaacattaaatgaaagatatttattacttcatctgcttggtagaggtggctttagtgaagtgtataaggcttttgacctttatgaacaaagatatgctgctgtgaagatacatcagcttaataaaagctggagagatgagaagaaagaaaactaccacaaacatgcctgcagagagtatagaatacacaaagaactggatcaccccagaatagttaaactctatgattatttctccttggatacagatacgttttgtacagtgttagaatactgtgaaggcaatgacttggatttctatctgaagcaacacaagttaatgtcagagaaagaagctcggtctattgtaatgcagattgtaaatgcactaagatatctcaatgagatcaaaccccctattatacattatgatcttaagccaggaaacatcctactggtagatggaacagcatgtggtgaaatcaaaatcactgattttggtctgtccaagattatggatgatgatagctatggtgtagatggaatggatctaacttcccagggggcaggcacttactggtatttacctcctgagtgttttgtagttggaaaagagccaccaaagatttccaacaaggttgatgtatggtcggttggagtcatcttctttcagtgtctttatggtagaaagccatttggtcacaatcaatctcaacaagacattcttcaagaaaatacaatattaaaagccacagaagtccagttccctgtaaaaccggttgtaagcagtgaagccaaggcatttataagacgctgtttggcatatcgaaaagaagatcgatttgatgtgcaccagctggcaaatgacccataccttctcccacacatgagaagatcaaattcttcaggaaacctacacatggctgggctgacagcatcccctacacccccttcttcaagcataattacttactgactttcctccaagattggcatgatatctttgaatttgcttccagatgcacacttaagtttgagagcatttgagtgtttgttttctttttctttttttttttttttttttttacacaagacgtggttaagaactgtttgtgaactgaagttcctcatagtgtcatttgtatgagagaggatcatggacaatgaataaatgcacacttctgactataattttgagcagtgaaggaaggatgactgcctgttacacagaaacaggaataccatgttaagatagaggaaaaaaattttgtttatttgggggaacactgtaaataacgtttataatacttaaatacatttggttgttactagagagttctaatatgaagggtagtttttcattatttaaaaacacatggaaaaatatgagacatatttctaacatacgaactatagtgcctggatacattcttcagcatttggcagttaatctgctgaaaccaaagtaagaactgaatgacagtgacagttgtgttttatagtaatagaatgtgagagttagaatctttggacaaagttaggctttgtcatttgcctattcagacttttaccaagttgtacctcgagatcacatgtccgttttctttcactggttatattaaagggagagctattatttctaaatactttacacctttgacaaaatgagctgcttgtgttgaaatcagttgaattcactaaattataatattgccagtgttttcaacacgttagaattgataacaggtatttttcttttgttaccaggccttgttcatcaaaacaggtgacagtgagtaaccaaatgcagaccagttctatgcaggataatgataaattcccttctagctctattgtaaattgttgtacagatgtcatatttcaattactaagtttcagcagcttattcttgtacaaatgtttaaaatatggcttttctaattggatattgtattttttttaagtcttcttgaaggcactctaattgctgctaaatgatgttgcttctttgctaaaaaattaaatgacctagaaggtgcaagttgactgtacatcatagatattaaaaagcagacagtcattaacaatcaagatgtaaaagtgatccatgttggacataattgagtttttaaatcagtttattgggttctagggctgtagaacacatagatactagatttttaatttgttcatggttattctacatttctagaaagttcttatcagcaagatggtcccataagcaaatttcttgtggtttgtacagatttgttaaaatgtgaacgttttctaactgcctcgtagggtagaaaccaatatttttcaggatgctgtatttcactcctgtaaggactttttctttattgtcacattcataatgctgatacttacatgtaagttgttcatgttgcagaaaaaggttatacgtaccacggattctctttaatattgtacagttaaactgtatttctgatgttgcaagccattttgttttttcattgtacatagacacattgtctctttaaaatgctgctgaaattgtagagagtatagccaaaacagtaataaacaatgacagttaaaatgtaaagactatgaaaattacattggaagggagctttcaagatggtaggatattgactaactgagctccttcacttaaaaatcagctgaataaattccttaagtatacttcaaaaaaaaaaaaaaaaaa

SEQ ID NO: 12634 - DNA, 2291 bp, Homo sapiens
aaataagggagtccggcggctcctctatcaggaagattgtgcatgccgtgggtctgacggcttgagtagcgctagggagaatccctgcaggtaatatttgacttttgcttcatattaatctgagtggaaaataaaagggccctcttctcctctcgcttccctgccgggcaggcgccatggcggaagcctcggcgacgggcgcctgcggagaggcgatggcagcggcggaaggctcctcgggcccggcgggcttgactctgggccggagcttctcgaactaccggcccttcgagccccaggcgttgggcctcagcccgagctggcggctgacgggcttctccggcatgaagggctgaggctgcaaggtcccgcaggaggcgctgctcaaactcctggcgggactgacgcggccggacgtgcggcccccgctgggccggggcctggtgggtggccaggaagaggcgtcccaggaagccggcctgccggcaggagcgggccccagccccacctttccagccctgggcatcgggatggactcctgcgtcatccccctgaggcacgggggcctgtcactggtgcagaccacggacttcttttaccccttggtagaagatccctacatgatggggcgcatagcttgtgccaacgtgctgagtgacctctacgccatggggattactgagtgtgacaacatgttgatgttactcagcgtcagccagagtatgagtgaggaggaacgcgaaaaggtaacgccactcatggtcaaaggctttcgggatgcggctgaggaaggagggacggcagtgaccggtgggcaaacggtggtcaacccttggattataatcggtggagttgccactgtagtatgccaaccaaatgagttcataatgccggacagcgccgtcgttggggacgtgctggtgttaaccaaaccgttaggaacccaggttgctgtcaatgcccaccaatggctggataatcctgaaagatggaataaagtaaagatggtggtctccagagaagaggtggagctggcctatcaggaagccatgttcaatatggctaccctcaacagaactgctgcaggtttaatgcacacatttaatgcccatgcggccacagatatcacaggctttggcattctaggacactcccagaaccttgcaaaacaacaaagaaatgaagtgtcctttgttattcataatctgccaataattgccaagatggctgccgtcagcaaggccagtggacggtttgggcttcttcaaggaacctcagctgaaacctctgggggattactgatttgtctgccaagagaacaggcggctcgcttttgttctgaaatcaaatcctccaagtacggagagggtcaccaagcgtggatcgttggcattgtggaaaagggaaaccgaacggcccggatcattgacaagccgcgagttattgaagtcctgcctcgtggggccacagctgctgttcttgctcctgacagttcaaatgcctcctctgagcctagctcgtgagatgaaagaacagaagttgtttggaccttagagccattgtccacaatcacggatggttctcaagagttgattgtaagaaatttccaaagaaggctgcctgcatagtggttccggctgccctttctaggtgattggaatcagcccatctaaagcagtctttatatgcattccgaggccagagtaacattttgaactttggggggatatttgttcatcacttgggtagaagaggagcaaaaatacctctgttttctcttgccaaagtaagatgaagctattccaggttgagggatttttctttgcacggggttgattaatttctgcacagggagtgagattattaaagtaacacacacacaaagtaaattgcaaaatgaaaaaaattagaagcaaatgagttttggaccaatattgttgataaatctaaattgttaagagagatcttataatgcaacatcaaattctttattcaattttactgaagtactggctctttcctgctctggacaagaattgagcaacttgtctgatgactgggaaaggaggacctgcaaccatctgacttggtctctgttaatgacgtctctccctctaaaccccattaaggactgggagaggcagagcaagcctcagagcccaggcctcagtggtcattaagatgttaagtcttttgcggcagattcctggtgatttgatcaataaagagtaatttcttgctaaataaataaaagaaaccttgttgaaaaactaaaaaaaaaaaaaaaaaaa

SEQ ID NO: 12635 - DNA, 3379 bp, Homo sapiens
ctggcctgggcctgaagtgagtgagaggcacatgaagagaagtattcaagtatttatacagataggaatcaagataatcaacaatgtctgtcactgaggaagacctgtgccaccatatgaaagtagtagttcgtgtacgtccggaaaacactaaagaaaaagcagctggatttcataaagtggttcatgttgtggataaacatatcctagtttttgatcccaaacaagaagaagtcagttttttccatggaaagaaaactacaaatcaaaatgttataaagaaacaaaataaggatcttaaatttgtatttgatgctgtttttgatgaaacgtcaactcagtcagaagtttttgaacacactactaagccaattcttcgtagttttttgaatggatataattgcacagtacttgcctatggtgccactggtgctgggaagacccacactatgctaggatcagctgatgaacctggagtgatgtatctaacaatgttacacctttacaaatgcatggatgagattaaagaagagaaaatatgtagtactgcagtttcatatctggaggtatataatgaacagattcgtgatctcttagtaaattcagggccacttgctgtccgggaagatacccaaaaaggggtggtcgttcatggacttactttacaccagcccaaatcctcagaagaaattttacatttattggataatggaaacaaaaacaggacacaacatcccactgatatgaatgccacatcttctcgttctcatgctgttttccaaatttacttgcgacaacaagacaaaacagcaagtatcaatcaaaatgtccgtattgccaagatgtcactcattgacctggcaggatctgagcgagcaagtacttccggtgctaaggggacccgatttgtagaaggcacaaatattaatagatcacttttagctcttgggaatgtcatcaatgccttagcagattcaaagagaaagaatcagcatatcccttacagaaatagtaagcttactcgcttgttaaaggattctcttggaggaaactgtcaaactataatgatagctgctgttagtccttcctctgtattctacgatgacacatataacactcttaagtatgctaaccgggcaaaggacattaaatcttctttgaagagcaatgttcttaatgtcaataatcatataactcaatatgtaaagatctgtaatgagcagaaggcagagattttattgttaaaagaaaaactaaaagcctatgaagaacagaaagccttcactaatgaaaatgaccaagcaaagttaatgatttcaaaccctcaggaaaaagaaatcgaaaggtttcaagaaatcctgaactgcttgttccagaatcgagaagaaattagacaagaatatctgaagttggaaatgttacttaaagaaaatgaacttaaatcattctaccaacaacagtgccataaacaaatagaaatgatgtgttctgaagacaaagtagaaaaggccactggaaaacgagatcatagacttgcaatgttgaaaactcgtcgctcctacctggagaaaaggagggaggaggaattgaagcaatttgatgagaatactaattggctccatcgtgtcgaaaaagaaatgggactcttaagtcaaaacggtcatattccaaaggaactcaagaaagatcttcattgtcaccatttgcacctccagaacaaagatttgaaagcacaaattagacatatgatggatctagcttgtcttcaggaacagcaacacaggcagactgaagcagtattgaatgctttacttccaaccctaagaaaacaatattgcacattaaaagaagccggcctgtcaaatgctgcttttgaatctgacttcaaagagatcgaacatttggtagagaggaaaaaagtggtagtttgggctgaccaaactggcgaacaaccaaagcaaaacgatctacccgggatttctgttcttatgaccttttcacaacttggaccagttcagcctattccttgttgctcatcttcaggtggaactaatctggttaagattcctacagaaaaaagaactcggagaaaactaatgccatctcccttgaaaggacagcatactctaaagtctccaccatctcaaagtgtgcagctcaatgattctcttagcaaagaacttcagcctattgtatatacaccagaagactgtagaaaagcttttcaaaatccgtctacagtaaccttaatgaaaccatcatcatttactacaagttttcaggctatcagctcaaacataaacagtgataattgtctgaaaatgttgtgtgaagtagctatccctcataatagaagaaaagaatgtggacaggaggacttggactctacatttactatatgtgaagacatcaagagctcgaagtgtaaattacccgaacaagaatcactaccaaatgataacaaagacattttacaacggcttgatccttcttcattctcaactaagcattctatgcctgtaccaagcatggtgccatcctacatggcaatgactactgctgccaaaaggaaacggaaattaacaagttctacatcaaacagttcgttaactgcagacgtaaattctggatttgccaaacgtgttcgacaagataattcaagtgagaagcacttacaagaaaacaaaccaacaatggaacataaaagaaacatctgtaaaataaatccaagcatggttagaaaatttggaagaaatatttcaaaaggaaatctaagataaatcacttcaaaaccaagcaaaatgaagttgatcaaatctgcttttcaaagtttatccaataccctttcaaaaatatatttaaaatctttgaaagaagacccatcttaaagctaagtttacccaagtactttcagcaagcagaaaaatgaaactctttgttttcttcttttgtgttctaaaaaaataaaatttcaaaagaaaaggttgtcttttaagttttttaaatatttgttgccttttaaaatccctgagtgtaagttaccatggtggcagcttagttttactatgccacaacaagttgactaggacattttagtaaatggtagtgagttaaattatctttattattttttaaaaataagaatttagaagtggtaaaattatggcccaagatgtatttggttctctattatgttttgatacattattttaatcatatatatgactttccttttcaaaaatactttaatgtacaagtgtaaatatatgtgcccataaaatcattgtaaatattatttagtcatcacaaataaaatattgtcccttgctacttgatatattaaagatgtagattttaaagtgaaaaaaaaaaaaaaaaa

SEQ ID NO: 12636 - DNA, 2088 bp, Homo sapiens
ggtccgagttcggaatttcggttcaaggcccagttcctcggattgttcctgcgcaacttcagtttcccttccaggcacgggcaatgagtgtttggccgcgacgagttggaaagcccggatgcgtccttcggttgggcggggtgtctcagtgacgtcactgggggtataaaagggcctgggtggcgggcgcctgggcagagcgtcctagcagtgtcactgcgtgggttggtttgtgtagagaggcgtgagcgagcccgttgtccggagtgcacctgctgcctgttctgtccctcccgggagcccccgccgctgtcgccgtcgagtcgccatggaagtgcagaaagaggcacagcgcatcatgaccctgtcggtgtggaagatgtatcactcccgcatgcagcgcggtggcctgcggctgcaccggagtctgcagctgtcgctggtcatgcgcagcgcccgggagctctacctctcggccaaggtggaggccctcgagcccgaggtgtcgttgccggccgccctcccctctgaccctcgcctgcacccgccccgagaagccgagtccacggccgagacagcgacccccgacggtgagcacccgtttccggagccaatggacacgcaggaggcgccgacagccgaggagacctccgcctgctgtgccccgcgccccgccaaagtcagccgcaaacgacgcagcagcagcctgagcgacggcggggacgctggactggtcccgagcaagaaagcccgtctggaagaaaaggaagaagaggagggagcgtcatccgaagtcgccgatcgcctgcagccccctccggcgcaagcggagggcgcctttcccaacctggcccgcgtcctgcagaggcgcttctccggcctcctgaactgcagccccgcggcccctccgacggcgccgcccgcgtgcgaggcaaagcccgcttgccgcccggcggacagcatgctcaacgtgctcgtgcgggccgtggtggccttctgaggaccccgagcggcgctgccggagcccagagcgcgcgtcgaaccgtcggcccgagggcgcagacctgaggcgaggccacccccctccatcctgggggaagcgcccgcgaaaaccgtggagagaagccgccgcccgggctgctgagaggcccggagagggactctgtccccggggagccatcgccttcagtgtgcagggacggcaccgaggagtctgagccgggggcgcgggcgccttccgcagagacctgcgcccacaggtgctgtcttagtggactgggacgtgaacctttcgctctccttctggactgggagaagggaggcttgggtgttgtgttttttgttttgtttgtttgtttgtttttaaagatctcctcagggtcggacttcattttgtactgtgggctgtgctggccctttcaaggtttttcaagagttggttttgcgtttccaacctcggagaattccaggcactccccttccccctccgctgacatacttgtataagcggtcatcgttgcgtcatggggcaggcgtggggagcttcctgtcgccttgcgtgggtgtggggcctgggaggaggtcctggggcgtgcacccgccctgggcagtggggaggagagtggcctgagttacttcacccccgcgtgctgctggttaatgtcccgcgtctctgcaccttcgggtgggagcggggactgatctactttcacattctcaagtttttctcatctgcattagaggtgcccagtaggttcccaggttccagcgtgcccctccctcagacacacggacacaatcagccgagaagttcctggtctgaatcacgagaatgtggaggggtggggggtgtcagtggaaaggcataaggctgagctgagaccagttgctggtgaaactgggccaatctggggaggggaacatccttgccagggagtttctgagggtctgctttgtttacctttcgtgcggtggattctttttaactccgtctacctggcgttttgttagaaatgtcagataggaaaataaaaaccatttgagtaaaaaaaaaaaaaaaaaaaaaaaaaaaaaaaaaaaaaaaaaaaa

SEQ ID NO: 12637 - DNA, 2591 bp, Homo sapiens
gccaagggcactattggccagttccgttcaacgaagtggttgctttttttagttccggcaatgagttgcgccggggcggcggcggctccccgcctttggcggctgcgcccgggggcccggcggtccctctcagcttatggaagaagaaccagtgtcagatttcgcagttcaggaatgactttagacaatatcagtcgggcagctgtggatcgaataatccgggtggatcatgcaggcgaatatggagcaaaccgcatctatgccgggcagatggctgtcctgggtcggaccagcgtcgggccagtcattcagaaaatgtgggatcaagaaaaggaccatttgaaaaagttcaatgagttgatggttacgttcagggtccggccaacagttctgatgcccttgtggaacgtgctggggtttgcactgggggcggggaccgccttgctcgggaaggaaggtgccatggcctgcaccgtggcggtggaagagagcatagcacatcactacaacaaccagatcaggacgctgatggaggaggaccctgaaaaatacgaggaacttcttcagctgataaagaaatttcgggatgaagagcttgagcaccatgacataggcctcgaccatgatgcagaattggctccagcctatgccgtcctgaagagcattatccaggccggatgcagagtggcgatatatttatcagaaagattataaagtgtgtccagttttgcctgtctataaaagatgatagtaatttaccaagtgacatttgcagagaaacaggtgtacagttatcgttgtacttttgtacaatgtgaattttgttaataaattataaggtttgtttttttttttttaaactctgcagtgttgatttttctctgggttgttttttctgccatgagaccaacaggtcaccagccttgttcaagttacagcaaacgaagctgggccttgtttggtctcatacttaattttcttttatatacatgtttttcttttacatgcatatatatatattttattttattttatgttttttggagacagggcctcgctcttttgtccaggccgggtcacaactcactgcagcctggacctcctagcctcaagcaatccacccacctcagccttccaagtagctgggactacaggtgtgcaccaccacagctggctaattctatttttttatagaggcgaagtctcactatgtcgccaggctggtctctaactcctgggctcagtgatcctcccgtttcgacttcccaaagtgctgggattacaggtgtgagccacttcaccaggcccattttctcctaaaacttcaaggacaaatcattaataatgtaacaggaatctttaggagaaaaaacaatttggtttactgataacaaaagataattggaaacatgagagtatttgagattggccaagcagaactatgaagtccatcaagtaagtcaaagatcatcgtttctgttttgaattgtgggtgataatgggtgggagagtgctacagtctgtatgtctgtgtctccctagaattcatacgatgaaatcttcactctcaagttgatagaaggtggggcccttgggaagtgtgaggtcatgagagtggagccctcatgaatgggatcagtgccttatgaaaggccctagagagatacctcatcctctccacagtgtgagacttcaaggggaagtatgagacttctctgaggaagcagacccttcacaagcaaaatcagccagcactttgatcacggacttcccagcctctaggactgtgagcaataaatgtttgatgtttataagccacccagactgtggtattttgttatagcagcctgaacagactaagacgggggtgttgcttccatcaaaggatgtactaagttgtggattatttgtgaaattgaattacaaccttttccttaaggtcttttaccacctcccccccaaaaaaatcccccaaaactgattcagattttcatactttaatgaaatattttataatttgcaaatttttaagtaatttatgaaaaacctagatcagtggatctcctctctggctgcccattagaatgtcctgtggagattaaacttttttttttcagtttatggaccaagagttttgatttatttagggtggagttcaggatcagaatggtttcagaagctcccaggtgattccggagtgagttggagctgcaagcccctgagctagattataagatgcttctgggaaagaaccacattttaggaatttgcttcccacccagtgccctgcatttaatcagcacctgatgacttggcaggacttgccccaccagggtctggctttgaagggtagtggacaccaggatcctttggattaatcctctgccacctctctcttttcctcaaccgagagtgaatttatgtaattgagtgaaagtctacgaatcataattgtaataaattaaggctgggcatttgtttgaaattagataggataaagccaaaggtttgaacaagttgtggatggtttgtaaaaattaatcttacaaaataaatgctgtgtgtgaacacgttgattaaattcaaaaaaa

SEQ ID NO: 12638 - DNA, 5618 bp, Homo sapiens
ggcgagtccagaagcagccccaggaggtgctgggggcatcgtttctctaatctggcctcccgagtgccaaggaggcgtcccggcagcggtcatcatggtgaaggagcagttccgggagacggatgtggccaagaaaataagccacatctgttttggaatgaagtcacctgaggagatgcgccagcaggcgcacatccaagttgtgagtaagaacctgtacagccaggacaaccaacatgcccccttgctatatggggtgctcgaccataggatgggtacgagtgagaaggatcgtccatgtgaaacctgtgggaaaaacttggctgactgtctaggccactatgggtatatcgacctggagttgccgtgttttcatgtagggtacttcagagcagtcataggcatcttacagatgatctgcaaaacctgctgccacatcatgctgtcccaagaggagaagaagcagtttctggactatctaaagaggcccggcctgacctaccttcagaagcgaggactgaaaaagaaaatctctgacaagtgccggaagaaaaacatctgccatcactgtggcgcttttaatggtaccgtaaagaagtgtggactgctgaaaataattcatgagaaatacaagaccaacaaaaaagtggtggatcccattgtatcaaatttccttcagtcttttgaaacagccattgaacataataaagaagtggagcctctgctgggaagggcacaggaaaacttgaatcccttagtagttctgaatttatttaaacgaatcccagctgaagatgttcctctacttctgatgaacccagaagccggaaagccgtctgatttgattctcacacgacttttggtgcctcctttgtgtatcagaccctccgttgtgagtgatttgaagtctggcaccaatgaagatgatctgacaatgaaactgacagaaatcattttcctaaacgatgttattaaaaagcatcggatctcaggagccaagacccagatgatcatggaggactgggatttcctgcagctgcagtgtgccctctacattaacagtgagctctcgggcattcccctcaacatggcacccaagaagtggaccagaggcttcgtccaacgcctgaagggaaaacagggtcgatttagaggaaatctctcaggaaagagagtggatttttctggcagaacagtcatctcgcccgaccccaacctccggattgatgaggtagctgtgccagttcatgtggccaaaattctaacttttcctgagaaggtaaacaaagcaaacatcaatttcttgaggaaactggttcaaaacggccctgaggttcacccaggagcaaacttcattcagcagagacatacgcagatgaaaaggtttttgaaatacggaaatcgagaaaagatggctcaagagctcaagtatggtgacatcgtagagagacacctcatcgatggagatgtggtgctgttcaatcggcagccctcgctgcacaaattgagcattatggctcatctggccagggtcaagccccaccggaccttcagatttaatgagtgtgtctgtacaccctataatgctgactttgatggtgatgaaatgaaccttcatcttcctcaaacagaagaagctaaagcagaggcccttgttctgatggggactaaagcaaatcttgtaaccccgaggaatggggaaccgctgattgctgctattcaggattttctaacaggtgcctatctcctcactctcaaggacactttctttgatcgagccaaggcttgccaaatcattgcttcaatactggttggcaaggatgagaaaattaaagttcgcctcccaccgcctacaatcctaaagcctgtcaccctgtggacgggaaagcagatcttcagtgtcatcctcaggcctagcgatgacaatccagtgagggccaacctgcgaaccaagggcaagcagtactgtggcaaaggggaagatctctgtgccaatgattcctatgttacaatccagaacagtgagttgatgagtggcagcatggacaaaggaaccctagggtcaggatccaagaacaatattttttacattttgctgcgagactggggacagaatgaagctgcagatgccatgtcacggctcgccaggctggctcctgtctacctgtctaaccgtggtttctcaattgggatcggtgatgtcacacctggccaaggactgctgaaggccaagtatgagttgctgaatgccggctacaagaaatgtgatgagtacatcgaagccctgaacacgggcaagctgcagcagcagcctggctgcactgctgaggagaccctggaggcactgatcctgaaggagctgtctgtgatccgtgaccacgctggcagtgcctgcctccgggagctggacaagagcaacagccccctcaccatggctctgtgcggctccaaaggttccttcattaacatatcacagatgattgcctgtgtgggacagcaggccatcagtggctctcgagtgccagacggctttgaaaacaggtccttgcctcattttgaaaaacactcaaagctcccagctgccaaaggctttgtggctaatagcttttattccggtttgacaccaactgagtttttcttccacacaatggccggccgggaaggtctagtcgacacggctgtaaagacagctgaaacgggatacatgcagcgaaggcttgtcaaatctcttgaagatctttgctcccagtatgatctgacagtccgaagctctactggcgatattatccagttcatttatggaggagatggcttagatcctgcagctatggagggaaaagatgaacctttggagtttaaaagggttctggacaacatcaaagcagtcttcccgtgtcccagtgagcctgctctcagcaaaaacgagctgatcctgaccacagagtccatcatgaagaagagtgagttcctctgctgccaggacagcttcctgcaggaaataaaaaaattcattaagggggtctctgagaagatcaagaaaaccagagataaatatggcatcaatgataacggcacaacagagccccgtgtgctgtaccagctggaccgcatcacccccacccaagtagaaaagtttctggagacctgtagggacaagtacatgagggcacagatggagccaggttctgcagtgggtgctctgtgtgcccagagcattggtgagccaggcacccagatgaccctgaagactttccactttgcaggtgtggcctccatgaacatcaccctgggcgtgccccggattaaagagatcatcaacgcttccaaggccatcagcactccaattatcacagcacagctagacaaggatgacgacgcggattatgctcgcctcgtgaaagggagaattgagaaaaccctcttgggagagatttccgagtatattgaagaagtgtttcttcctgatgactgctttattctcgtcaagctctccctggaacggattaggcttctgagactggaagtgaacgctgagacagtgagatattccatctgcacatccaagctccgtgtgaagcccggtgatgtggctgttcatggtgaggctgtggtgtgtgtcacccccagagagaacagcaagagctccatgtactacgtgctgcagttcctgaaagaggatctccccaaggtggtggtgcagggcattccagaggtgtccagagctgtcatccacattgacgagcagagtggaaaggagaagtacaagcttctggtggaaggtgataacctgcgggcagtcatggccacacacggtgtgaagggcacccgaaccacctccaataacacctatgaggtggagaaaactctgggcatcgaggccgcccggacaacgatcatcaatgaaatccagtacaccatggtgaaccacggcatgagcatcgacaggaggcacgtgatgctgctctccgacctcatgacctacaagggtgaagtcctgggcatcactaggtttggcctggccaagatgaaggagagtgtgctgatgctggcctcctttgagaagacggctgaccatctctttgacgctgcctacttcgggcagaaggactctgtgtgtggggtgtctgagtgcatcatcatgggaatcccaatgaacattggaaccgggctcttcaagctgcttcacaaggctgacagggacccgaaccctcccaagaggcccctgatcttcgacacaaatgaattccacatcccccttgtcacatagtccaaagaaagaggggaccatgcctgaccttgactccttgtcctgtctccagctgatgtataaagagttttgtgctccctgggacgggggtcctgaggtccccacctatgccagcaatcagagaagccctcttggcatccccaggagcagcttctcctctgatagggtgcagctcacaccagtgaccctgactgtgccacgctgctcgggagagctgagggttttattgtttgcttgcttgaaacctaatctatagacggccccacagctcgtgcacacactgcttccctggacttaaagcccagccaggtgtcatggtccatcccagctcactgcatacatccatcggctccccatggtgtcttcacacctgacgatgagccaggcctgagccccacacaggccagggcacattcttggattttccattccttggtcatgctggaatctctcaatgtgacatacttatgtaaatattgttactattatttatttgttccatttgagggatttggaatttttgttattttagttttatttttgaaaccaagcatctatagaaaccaagaaagtcagcatgtaagcgtcactggaaaaactggtttaagcaaatagagccgtctgggatttgtaactgaggtgcaactgtcatgaggcccaggcagctctgtaacatcttctatagatgcccctggctaccctgttgttttcatctacctcagacccctatcatggggctctaccctgtgacaagagccaaacccattctccatggcctatggaagcctcactggagtttggggcctgctgcaatggggatgagatggttttttgtagaattatacttacgttccttggatgatctctagttgattttttaagttctgagttgatgctgttaaggtacccggggtagccattggttcttggatctgtgttagaatgagtgctttcccttcctactgatgtgattgtggattaggaattcgtgaccgagtgatttttggccagtggttgggtttaaaattctattaaaatttgtagtttgggctgggtgctgtggctcatacctataatcccagcactttgggaggccgaggggggcagatcacttgagcccaggagttcgagagcagcctgggcaacatgacgaaaccccgtctctacagagaatacaaaaattagccaggcatggtggcccatgcctgtagtacctgctattggtaaggctgaggtggaaggttcacttgagcctgggaggtggaggttgtagtgagccaagatcgtgccactacactccagcctgggcaacaaagcaagaccttgtctcaaaaaaaaaaaaaaaaaaaaa

SEQ ID NO: 12639 - DNA, 2907 bp, Homo sapiens
cgggcgccgcaggagcgagtgagctgggagcgaggggcgaaggcgcggagaagcccggccgcccggtgggcggcagaaggctcagccgaggcggcggcgccgactccgttccactctcggcccggatccaggcctccgggttcccaggcgctcacctccctctgacgcactttaaagagtctccccccttccacctcagggcgagtaatagcgaccaatcatcaagccatttaccaggcttcggaggaagctgtttatgtgatccccgcactaattaggctcatgaactaacaaatcgtttgcacaacttgtgaagaagcgaacacttccatggattgtccttggacttagggcgccctgcccgccttttgcagaggagaaaaaacttttttttttttttgcctcccccgagaactttccccccttctcctccctgcctctaactccgatccccccacgccatctcgccaaaaaaaaaaaaaaaaaaaaaaaagaaaaaaaaagaaaaaaaaagaaaaaaaattaccccaatccacgcctgcaaattcttctggaaggattttcccccctctcttcaggttgggcgcgtttggtgcaagattctcgggatcctcggctttgcctctccctctccctcccccctcctttcctttttcctttcctttcctttctttcttcctttccttccccccacccccacccccaccccaaacaaacgagtccccaattctcgtccgtcctcgccgcgggcagcgggcggcggaggcagcgtgcggcggtcgccaggagctgggagcccagggcgcccgctcctcggcgcagcatgttccagccggcgcccaagcgctgcttcaccatcgagtcgctggtggccaaggacagtcccctgcccgcctcgcgctccgaggaccccatccgtcccgcggcactcagctacgctaactccagccccataaatccgttcctcaacggcttccactcggccgccgccgccgccgccggtaggggcgtctactccaacccggacttggtgttcgccgaggcggtctcgcacccgcccaaccccgccgtgccagtgcacccggtgccgccgccgcacgccctggccgcccaccccctaccctcctcgcactcgccacaccccctattcgcctcgcagcagcgggatccgtccaccttctacccctggctcatccaccgctaccgatatctgggtcatcgcttccaagggaacgacactagccccgagagtttccttttgcacaacgcgctggcccgaaagcccaagcggatccgaaccgccttctccccgtcccagcttctaaggctggaacacgcctttgagaagaatcactacgtggtgggcgccgaaaggaagcagctggcacacagcctcagcctcacggaaactcaggtaaaagtatggtttcagaaccgaagaacaaagttcaaaaggcagaagctggaggaagaaggctcagattcgcaacaaaagaaaaaagggacgcaccatattaaccggtggagaatcgccaccaagcaggcgagtccggaggaaatagacgtgacctcagatgattaaaaacataaacctaaccccacagaaacggacaacatggagcaaaagagacagggagaggtggagaaggaaaaaaccctacaaaacaaaaacaaaccgcatacacgttcaccgagaaagggagagggaatcggagggagcagcggaatgcggcgaagactctggacagcgagggcacagggtcccaaaccgaggccgcgccaagatggcagaggatggaggctccttcatcaacaagcgaccctcgtctaaagaggcagctgagtgagagacacagagagaaggagaaagagggagggagagagagaaagagagagaaagagagagagagagagagagagagaaagctgaacgtgcactctgacaaggggagctgtcaatcaaacaccaaaccggggagacaagatgattggcaggtattccgtttatcacagtccacttaaaaaatgatgatgatgataaaaaccacgacccaaccaggcacaggacttttttgttttttgcacttcgctgtgtttcccccccatctttaaaaataattagtaataaaaaacaaaaattccatatctagccccatcccacacctgtttcaaatccttgaaatgcatgtagcagttgttgggcgaatggtgtttaaagaccgaaaatgaattgtaattttcttttccttttaaagacaggttctgtgtgctttttattttgattttttttcccaagaaatgtgcagtctgtaaacactttttgataccttctgatgtcaaagtgattgtgcaagctaaatgaagtaggctcagcgatagtggtcctcttacagagaaacggggagcaggacgacgggggggctgggggtggcgggggagggtgcccacaaaaagaatcaggacttgtactgggaaaaaaacccctaaattaattatatttcttggacattccctttcctaacatcctgaggcttaaaaccctgatgcaaacttctcctttcagtggttggagaaattggccgagttcaaccattcactgcaatgcctattccaaactttaaatctatctattgcaaaacctgaaggactgtagttagcggggatgatgttaagtgtggccaagcgcacggcggcaagttttcaagcactgagtttctattccaagatcatagacttactaaagagagtgacaaatgcttccttaatgtcttctataccagaatgtaaatatttttgtgttttgtgttaatttgttagaattctaacacactatatacttccaagaagtatgtcaatgtcaatattttgtcaataaagatttatcaatatgccaaaaaaaaaaaaaaa

SEQ ID NO: 12640 - DNA, 3252 bp, Homo sapiens
gtaggcgcagggctggcaagcagtcgggacgggagcgcgggcgtccgcggtggctgcagtcccgtcggtctccctgctgtccggcgcgagctcttcgagtcttgcttgggatgtttcagcagcccctgagaaggaagaggaggaagctgagggcccgctgagggcgcaggacctgagggagtcctacatccagctcgtccagggtgtgcaggagtggcaggatggttgcatgtaccagggggagtttgggttgaacatgaagcttggatatggcaaattctcttggcccacaggcgagtcataccatgggcagttttaccgggaccactgccatggcctgggtacctacatgtggccagatggctccagtttcacgggcacattttacctcagccaccgagaaggctacggcaccatgtacatgaagacacggcttttccaggggctatacaaagcggaccagcggtttgggccaggtgtcgagacctaccccgatggcagccaggacgtggggctgtggttccgagagcagctcatcaagctgtgcacccagatccccagtggcttctccctcctcagataccctgagttctccagcttcatcacccacagccctgccaggatcagcctctcagaagaggagaaaacggagtggggactgcaggagggacaggatccctttttctatgactataagcggtttcttctgaatgacaacctaacgctgcctccagaaatgtatgtctactcgaccaacagtgaccacctgcccatgacaagctctttccgcaaagagctggacgcccgcatcttcctcaatgaaattcctccgttcgttgaggatggagaaccatggttcataatcaatgagacccctttgttggtcaaaatccagaagcaaacttacaagttcaggaacaagccagctcacaccagctggaacatgggcgccatcctggaggggaagcgcagtggctttgcaccctgtgggcccaaagagcaactttccatggagatgatcctaaaggctgaggaagggaaccacgaatggatttgtaggatcctgaaggacaactttgctagtgctgacgtggcggacgcaaagggctacactgtgcttgctgcggctgctactcactgccacaacgacattgtcaaccttctcctggactgtggggccgacgtgaacaagtgctcagatgagggtctcacggcactcagcatgtgtttcctcctccactaccccgcccagtccttcaagcccaatgttgctgaacggaccatacctgagccccaggaacctccaaaattcccagttgttccaatcctttcatcatcatttatggacacaaacctggagtctctgtactatgaggtgaacgtgccttcccagggtagctatgagctgaggccaccgccagcaccactgctcctgccacgcgtctcaggcagccacgagggcggccacttccaggacaccgggcagtgtggggggtccatagaccacaggagcagctctctgaagggggactccccgttggtgaagggcagccttggccatgtggaaagcgggcttgaggacgtgttgggaaacacagaccggggcagtctgtgcagtgctgagacgaaatttgagtccaacgtgtgtgtgtgcgacttctccatcgagctctcgcaggccatgctggagagaagcgcccagtcccacagcttgctgaagatggcctcgccctcaccgtgcaccagcagcttcgacaaagggaccatgcggaggatggcgctgtccatgatcgagcggaggaagcgctggcggaccatcaagctgctgctgcgccggggcgcggaccccaacctgtgctgcgtgcccatgcaggtcctgttccttgctgtgaaggccggggacgtggatggggtgaggctgctgctggagcacggggcgaggaccgacatctgctttccgccgcagctgagcaccctgacaccactccacatcgctgccgcccttcctggggaggagggggtacagattgtggagctgctgttgcatgccatcaccgatgtggacgccaaggcatccgacgaggacgacacttacaagcccggcaagctggacctgctgccctcaagtctgaagctcagcaatgagccaggccctccccaagcctactacagcacggacacagccctcccggaggaggggggcaggacggctctgcacatggcctgcgagcgggaggatgacaacaagtgtgccagggacatagtccggctccttctatcccacggagcaaatcctaacctgctgtggagtggccactccccgctctccctgtccattgccagtgggaatgagctggttgtgaaggagctcctgacccagggagctgaccccaacctgcccctgaccaaaggcttgggcagtgccctgtgtgttgcctgtgacctgacctacgagcaccagaggaacatggacagcaagctggccctgattgaccgactcatcagtcacggggccgacatcctgaagcctgtaatgctcaggcagggagaaaaggaggcagtgggcacagccgtggactatggctacttcagattcttccaggaccggaggattgcccgctgccccttccacacgctgatgccagcagagcgcgagacgttcctggcgcggaagcggctcctggagtacatgggcttgcagctacggcaggctgtctttgccaaggagagccagtgggaccccacgtggctgtacctgtgcaagagagcggagctgatccccagccacaggatgaagaagaagggccccagcctgcccaggggcctggatgtgaaggagcaggggcaaattcccttcttcaagttctgctaccagtgtggccgctccatcggggtccgcctcttgccctgccctcgctgctacgggatcctgacctgcagcaagtactgcaagaccaaggcctggaccgagttccacaagaaggactgcggggacctggtggccatcgtgacacaactggagcaagtttccaggaggagagaagaattccagtgaagcagcagctgcacgtccgaggcttggggaggacccaggactgtgtgggtttcttacctgcctgagccacctcagggaatcttccagcctaatgcaggcatttctgcacctttggggtcatgctttgtagcagtgtctcccttgcgacctcgcaataaattggccccacggggtgattttgacagtcaaaaaaaaaa

SEQ ID NO: 12641 - DNA, 1321 bp, Homo sapiens
tgactatccagctctgagagacgggagtttggagttgcccgctttactttggttgggttggggggggcggcgggctgttttgttccttttcttttttaagagttgggttttcttttttaattatccaaacagtgggcagcttcctcccccacacccaagtatttgcacaatatttgtgcggggtatgggggtgggtttttaaatctcgtttctcttggacaagcacagggatctcgttctcctcattttttgggggtgtgtggggacttctcaggtcgtgtccccagccttctctgcagtcccttctgccctgccgggcccgtcgggaggcgccatggctcggatgaaccgcccggccccggtggaggtgagctacaaacacatgcgcttcctcatcacccacaaccccaccaacgccacgctcagcaccttcattgaggacctgaagaagtacggggctaccactgtggtgcgtgtgtgtgaagtgacctatgacaaaacgccgctggagaaggatggcatcaccgttgtggactggccgtttgacgatggggcgcccccgcccggcaaggtagtggaagactggctgagcctggtgaaggccaagttctgtgaggcccccggcagctgcgtggctgtgcactgcgtggcgggcctgggccggaagcgccgcggagccatcaacagcaagcagctcacctacctggagaaataccggcccaaacagaggctgcggttcaaagacccacacacgcacaagacccggtgctgcgttatgtagctcaggaccttggctgggcctggtcgtcatgtaggtcaggaccttggctggacctggaggccctgcccagccctgctctgcccagcccagcaggggctccaggccttggctggccccacatcgccttttcctccccgacacctccgtgcacttgtgtccgaggagcgaggagcccctcgggccctgggtggcctctgggccctttctcctgtctccgccactccctctggcggcgctggccgtggctctgtctctctgaggtgggtcgggcgccctctgcccgccccctcccacaccagccaggctggtctcctctagcctgtttgttgtggggtgggggtatattttgtaaccactgggcccccagcccctcttttgcgaccccttgtcctgacctgttctcggcaccttaaattattagaccccggggcagtcaggtgctccggacacccgaaggcaataaaacaggagccgtgaaaaaaaaaaaaaaaaaaaaaaaaaaaaaaaaaaaaaaaaaaaaaaaaaaaaaaaaaaaaaaaa

SEQ ID NO: 12642 - DNA, 1396 bp, Homo sapiens
tgactatccagctctgagagacgggagtttggagttgcccgctttactttggttgggttggggggggcggcgggctgttttgttccttttcttttttaagagttgggttttcttttttaattatccaaacagtgggcagcttcctcccccacacccaagtatttgcacaatatttgtgcggggtatgggggtgggtttttaaatctcgtttctcttggacaagcacagggatctcgttctcctcattttttgggggtgtgtggggacttctcaggtcgtgtccccagccttctctgcagtcccttctgccctgccgggcccgtcgggaggcgccatggctcggatgaaccgcccggccccggtggaggtgagctacaaacacatgcgcttcctcatcacccacaaccccaccaacgccacgctcagcaccttcattgaggacctgaagaagtacggggctaccactgtggtgcgtgtgtgtgaagtgacctatgacaaaacgccgctggagaaggatggcatcaccgttgtggactggccgtttgacgatggggcgcccccgcccggcaaggtagtggaagactggctgagcctggtgaaggccaagttctgtgaggcccccggcagctgcgtggctgtgcactgcgtggcgggcctgggccgggctccagtccttgtggcgctggcgcttattgagagcgggatgaagtacgaggacgccatccagttcatccgccagaagcgccgcggagccatcaacagcaagcagctcacctacctggagaaataccggcccaaacagaggctgcggttcaaagacccacacacgcacaagacccggtgctgcgttatgtagctcaggaccttggctgggcctggtcgtcatgtaggtcaggaccttggctggacctggaggccctgcccagccctgctctgcccagcccagcaggggctccaggccttggctggccccacatcgccttttcctccccgacacctccgtgcacttgtgtccgaggagcgaggagcccctcgggccctgggtggcctctgggccctttctcctgtctccgccactccctctggcggcgctggccgtggctctgtctctctgaggtgggtcgggcgccctctgcccgccccctcccacaccagccaggctggtctcctctagcctgtttgttgtggggtgggggtatattttgtaaccactgggcccccagcccctcttttgcgaccccttgtcctgacctgttctcggcaccttaaattattagaccccggggcagtcaggtgctccggacacccgaaggcaataaaacaggagccgtgaaaaaaaaaaaaaaaaaaaaaaaaaaaaaaaaaaaaaaaaaaaaaaaaaaaaaaaaaaaaaaaa

SEQ ID NO: 12643 - DNA, 1584 bp, Homo sapiens
cgggatgcggcgcgccgcgcgttgaacctccttggcctgggcgaagctgtgtggaccaagcaagtcaggagtgtggccatgttttctgagcaggctgcccagagggcccacactctactgtccccaccatcagccaacaatgccacctttgcccgggtgccagtggcaacctacaccaactcctcacaacccttccggctaggagagcgcagctttagccggcagtatgcccacatttatgccacccgcctcatccaaatgagacccttcctggagaaccgggcccagcagcactggggcagtggagtgggagtgaagaagctgtgtgaactgcagcctgaggagaagtgctgtgtggtgggcactctgttcaaggccatgccgctgcagccctccatcctgcgggaggtcagcgaggagcacaacctgctcccccagcctcctcggagtaaatacatacacccagatgacgagctggtcttggaagatgaactgcagcgtatcaaactaaaaggcaccattgacgtgtcaaagctggttacggggactgtcctggctgtgtttggctccgtgagagacgacgggaagtttctggtggaggactattgctttgctgaccttgctccccagaagcccgcacccccacttgacacagataggtttgtgctactggtgtccggcctgggcctgggtggcggtggaggcgagagcctgctgggcacccagctgctggtggatgtggtgacggggcagcttggggacgaaggggagcagtgcagcgccgcccacgtctcccgggttatcctcgctggcaacctcctcagccacagcacccagagcagggattctatcaataaggccaaatacctcaccaagaaaacccaggcagccagcgtggaggctgttaagatgctggatgagatcctcctgcagctgagcgcctcagtgcccgtggacgtgatgccaggcgagtttgatcccaccaattacacgctcccccagcagcccctccacccctgcatgttcccgctggccactgcctactccacgctccagctggtcaccaacccctaccaggccaccattgatggagtcagatttttggggacatcaggacagaacgtgagtgacattttccgatacagcagcatggaggatcacttggagatcctggagtggaccctgcgggtccgtcacatcagccccacagccccggacactctaggttgttaccccttctacaaaactgacccgttcatcttcccagagtgcccgcatgtctacttttgtggcaacacccccagctttggctccaaaatcatccgaggtcctgaggaccagacagtgctgttggtgactgtccctgacttcagtgccacgcagaccgcctgccttgtgaacctgcgcagcctggcctgccagcccatcagcttctcgggcttcggggcagaggacgatgacctgggaggcctggggctgggcccctgactcaaaaaagtggttttgaccagagaggcccagatggaggctgttcattccctgcagtgtcggcattgtaaataaagcctggcacttgctgatgcg

SEQ ID NO: 12644 - DNA, 1544 bp, Homo sapiens
gtgcgcgtgcgcttgagagcgtcatcgcccccgactgtggagaagtgtccggggtagccccgttacaggaatgtgtttctgatcatctgaatcttaatcatgtccaactgcctgcaaaatttcctgaaaattacaagcactcgtcttctatgttcaagattatgccaacagttaagaagtaaaaggaagtttttcggaactgtgccaatatccagattgcataggcgagttgtcattacaggcattggcttagtgactcctcttggtgttggaactcacctggtttgggatcgtcttatcggaggagagagtggaattgtttcactggttggtgaagagtataagagtatcccttgcagtgttgctgcttatgtgccaagaggtagtgatgaaggtcagttcaatgaacaaaactttgtgtccaaatcagatatcaagtccatgtcttctcccaccatcatggccattggggctgcagaattagccatgaaggattctggctggcatcctcagtcagaagctgatcaagtggctactggtgttgcaattggcatgggaatgattcctcttgaagttgtttctgaaactgctttgaattttcagacaaaaggttacaataaagttagcccattttttgtccctaagattctggtcaatatggcagcaggccaggtcagcattcgatataaactcaagggcccaaatcatgcagtatccacagcctgtaccacaggagctcatgctgtgggagactcatttagatttatagcccatggtgatgctgatgtgatggtggctggaggtacagattcttgtattagccctttatctcttgctgggttttccagagcccgggctctgagcacaaactcagatcccaagttggcatgtcgaccatttcatccaaagagagatggttttgtaatgggagaaggtgcagctgtgctggtgctggaagaatatgaacatgctgttcaaagaagagcccggatctatgcagaagttttgggctatggactctcaggtgatgctggtcacataactgcccctgatcctgaaggagaaggtgccttaaggtgtatggctgctgctttaaaagatgcaggtgtgcagcctgaggagatatcctatatcaatgcacatgctacttccacaccattgggagatgctgctgaaaacaaagctatcaaacatctcttcaaagaccatgcatatgcccttgcagtttcctcaactaagggagcaacaggacatctgctgggagctgcaggggcagtcgaggcagcttttaccacattagcttgttattatcaaaaactaccacctactttaaacctggattgttcggaaccagaatttgatctcaactatgttccactaaaggcacaggaatggaaaactgagaaaagatttattggcctcaccaattcctttggttttggtggtactaatgcaacactttgtattgctggactgtagaacatataatttgtaattaaatactgatttttaaatgctaaaaaaaaaaaaaaaaaaaaaaaaaa

SEQ ID NO: 12645 - DNA, 1848 bp, Homo sapiens
aggaaaccaaggcaagctccccctgtcaaagcaccttggcccataagaagaaaagggggagccccagatgtgatgagcgcttccaggcttcaggctcagaaggcgcccccagctctcctgtaactcagaggccagtgtgatgggagttcctccactcagcacacttcccctgtaaacacgcctgtggtgggcaaaagggctttggaacggttgcttgtcttttctctcctgcgtaatttccactttcattcatgataatgtcgaacacgcacaaagctcggctggaacgccgggtcactggctcaaccaaccggtggcgtttgcccaaacagcctttctctggggacctgctctcactttcccagatgtgcaaggctctgagcatagactttgaggaagctttgaggaacccagacaggttatgcatttcacaaatccagaagtttttctttgagaatttcaagaacaaggacatccaaagtggggaagcagatgtgattctcgagtgcctgggcttcaaatgggagctccatcagccccagctttttcagtctgagaccttggccaagctctacctgaaagccctggcgcagggcaccacacaccccctgagggagctggaggagcttctgcgagctcaatcacctaagaagaccaaagaaaaatcccctgcaaagaggatcatcatttccttgaagatcaatgacccactggtcactaaagtcgccttcgccacggccctgaagaacctctacatgagtgaggtggagattaacttggaagacctactgggagtgctggcttccgcccacatcctccagttcagtggcctgtttcaaaggtgcgtggatgtgatgatagccagactcaagccaagcaccatcaagaaattctacgaggccggctgcaagtacaaggaagagcagctcaccaccggctgcgagaagtggctggaaatgaacttggttcctctaggggggacgcagatccacctccacaaaatcccacaggacctgctccacaaagtgctgaagtcccccaggttatttacctttagtgaattccatcttctgaaaacaatgcttttgtgggtcttcttgcaactgaactacaagattcaggcaattccgacttatgaaaccgtgatgacattttttaagagctttcctgagaactgttgctttctggaccgggacataggacggagcttgaggccgctcttcctctgcttgcgtctgcacggcatcaccaaaggcaaggatctggaggtgctgcggcaccttaacttcttcccagagtcatggctcgaccaggttacagtcaaccattaccacgcactggagaatgggggcgacatggtccacctgaaagatcttaacacccaggctgtgagatttgggctgctctttaaccaggagaatacaacttattcgaaaacgattgctctatatggattcttctttaagataaagggactcaaacatgatactacctcttatagtttttacatgcagagaataaagcacacagacctggaatctccctctgcggtctacgagcacaaccacgtcagcctgcgagcggcacgcctggtgaagtatgagatcagagcagaggccctggttgacggcaagtggcaggagttcaggacaaaccagatcaagcagaagtttgggttgaccacgtcatcctgcaaaagccataccttgaaaatccaaactgtgggcatcccaatctatgtaagttttgcattcatcttcccagcatcttgacagtttccagaagaatctatgggattttccccccactggtctgcataaaagaaaataaaatgacataaaagggagc

SEQ ID NO: 12646 - DNA, 1435 bp, Homo sapiens
acgcacgcaagcggctccagggtacgtccccgccacgcgcgctcgcaggatcggtgcgtggtgacgtttcgccggcgcgggcgccatcccggaagcgcgagcaaggccgccagatgtgcaggcagcggaggaggagaaagagatggacctcccggactcggcctcgagggtcttctgcggccgcatcctgagcatggtgaacacagatgatgtcaacgccatcatcctggcccagaagaacatgctggaccgctttgagaagaccaatgagatgctgctcaacttcaacaacctgtccagtgcccgcctgcagcagatgagcgaacgcttcctgcaccacacgaggaccctagtagagatgaaacgggacctggacagcatcttccgccgtatcaggacgctgaaagggaaactggccaggcagcacccagaggccttcagccatatcccagaggcatccttcctggaggaagaggatgaagaccccatcccacccagcaccacgaccaccattgccacctcagaacagagcacgggctcatgtgacaccagccccgacaccgtctcgccctccctgagccccggcttcgaggacctgtcccatgtccaggctggctccccagccatcaacggccgcagccagacagatgacgaggagatgacgggcgaatagccctgctgcccggtgccttgagggggtctcagggcagcagcatacaaggtggcagcgggtaaccctgccttgttctgtcatccagggctcctttgctgccccgttctgtcacccagggctcctagggggacaaggctctctcccgaggggtgtggaattcctgggggggtctttaattctggctccttccttcctcagaacatctctattctgcaagacccctctgccatgccagggcacgcccattccagctggagtcgtggggctgggcacaggggaatttttccagagctgagcctgacgtctgctctgaagaatgcttagaaggttcccagacaccagagccagatgtcccccaccaccggtcaggacctccttgaggtgcacaagcacggtctcctctgagttcaccccagcccacccccgcacccactaattctgcttttcctgccccttgctccgtaaaagtatcaaatactttctccttggtatctcaaggaggtttctgagataggtagaagtcttgagacggaggctggccatccattcagccctgagcgtgctgagttctgtgtttctctgaatagaggtgtggaacctgaggggccagcaggcctctctgaaggcctccatggagcaaacggagccacctcgggaaagagtttaatggaatatttttgtacccgatgtttacagatgctgttgggaagttatcaataaaaagacaccattactaaaaagggaaaaaaaaaaaaaaaaaaa

SEQ ID NO: 12647 - DNA, 2610 bp, Homo sapiens
caggggcggaggcggcggccagggaggaagcggaggaggcggaggcggccgcggcgttcgcccgcccgctcgctcgctcggtttccccgcccccgccgggcttaacgccgctgaaggtatccgggtgcgcgctgtcgcaacctgccctcatcctggcccgcgactgtaagaccggacccacatccagaccaatcttcctgtccgggctgctgcgacgcgggctccgcaggttgcaggcgggcggccggggcgcctgaaggttaccgagtgcatgagcgcctagcgcttcccgcgctgccccgcccgctggcccgccgacccgcccgccggctcgcccgccagcccctcggcgcccggcggcggcggcggcggtggcggcgacggtcgcaggaggtgccgtctgcctcccaggtgcgcgcttcgctcccggagccgcggaactcggcggccgccatggcgtccaacatggaccgggagatgatcctggcggattttcaggcatgtactggcattgaaaacattgacgaagctattacattgcttgaacaaaataattgggacttagtggcagctatcaatggtgtaataccacaggaaaatggcattctacaaagtgaatatggaggtgagaccataccaggacctgcatttaatccagcaagtcatccagcttcagctcctacttcctcttcttcttcagcgtttcgacctgtaatgccatccaggcagattgtagaaaggcaacctcggatgctggacttcagggttgaatacagagacagaaatgttgatgtggtacttgaagacacctgtactgttggagagattaaacagattctagaaaatgaacttcagatacctgtgtccaaaatgctgttaaaaggctggaagacgggagatgtggaagacagtacggtcctaaaatctctacacttgccaaaaaacaacagtctttatgtccttacaccagatttgccaccaccttcatcatctagtcatgctggtgccctgcaggagtcattaaatcaaaacttcatgctgatcatcacccaccgagaagtccagcgggagtacaacctgaacttctcaggaagcagtactattcaagaggtaaagagaaatgtgtatgaccttacaagtatccccgttcgccaccaattatgggagggctggccaacttctgctacagacgactcaatgtgtcttgctgaatcagggctctcttatccctgccatcgacttacagtgggaagaagatcttcacctgcacagacccgggaacagtcggaagaacaaatcaccgatgttcatatggttagtgatagcgatggagatgactttgaagatgctacagaatttggggtggatgatggagaagtatttggcatggcgtcatctgccttgagaaaatctccaatgatgccagaaaacgcagaaaatgaaggagatgccttattacaatttacagcagagttttcttcaagatatggtgattgccatcctgtattttttattggctcattagaagctgcttttcaagaggccttctatgtgaaagcccgagatagaaagcttcttgctatctacctccaccatgatgaaagtgtgttaaccaacgtgttctgctcacaaatgctttgtgctgaatccattgtttcttatctgagtcaaaattttataacctgggcttgggatctgacaaaggactccaacagagcaagatttctcactatgtgcaatagacactttggcagtgttgtggcacaaaccattcggactcaaaaaacggatcagtttccgcttttcctgattattatgggaaagcgatcatctaatgaagtgttgaatgtgatacaagggaacacaacagtagatgagttaatgatgagactcatggctgcaatggagatcttcacagcccaacaacaggaagatataaaggacgaggatgaacgtgaagccagagaaaatgtgaagagagagcaagatgaggcctatcgcctttcacttgaggctgacagagcaaagagggaagctcacgagagagagatggcagaacagtttcgtttggagcagattcgcaaagaacaagaagaggaacgtgaggccatccggctgtccttagagcaagccctgcctcctgagccaaaggaagaaaatgctgagcctgtgagcaaactgcggatccggacccccagtggcgagttcttggagcggcgtttcctggccagcaacaagctccagattgtctttgattttgtagcttccaaaggatttccatgggatgagtacaagttactgagcacctttcctaggagagacgtaactcaactggacccaaataaatcattattggaggtaaagttgttccctcaagaaacccttttccttgaagcaaaagagtaaacacggcccagcggtggaaccagccattccttgacaagccagcagcctgcgtcaggagaagggctcctcgccaacccacccacacgctcgtctcactcaattcaatgtcacacttctgcctcttgcaaaattgctggaaaaagtaataataaatatagctacttaagatttcccatcaaaaaaaaaaaaaaaaaaaaaaaaaaa

SEQ ID NO: 12648 - DNA, 4916 bp, Homo sapiens
cgctaggtccttgtccgcgcgggcggcacctcctctgcaggtaaatggaagagctggagaccagtttattccagacacggaaagcacatagaatagaacaaatggtggcaagatggcttcggcgctcccgggacagctcggcccgggctaaagttgctgcagctgatgggcccgccaggaacccaactcagaccctcatccctgtgcgacacacagtaaagatagacaaagacaccctcctccaggactatggatttcacatttctgagagccttccccttacagtggtggctgtcacagcaggaggctctgctcacggcaagcttttccctggtgatcagatcctccaaatgaacaatgagcctgctgaagacctttcctgggaacgagcagtcgatattctcagggaagcagaagattctctttcaatcacagttgttcgctgcacgtcgggagtccctaaatcgtccttcctgaccgaggagaagagagccagactgaagaccaaccccgtgaaggtgcactttgctgaagaagtgctcatcagtggacacagccagggtaattctctgctgtgtatgcccaacgtgctcaagctatacttggagaatggacagaccaaagctttcaagtttgaggcaaacacaaccgtgaaggacatcatcctcaccgtgaaggagaagctgtccatccgaagtatcgagtactttgcactggccctggaagagcagtacagcatctcccggctgcacctgctgcacgaagaggaactcatccagcaggtggtagaaagggaggagtcacatgactaccgctgcctcttcagggtctgttttgttcccaaggaccccctggacctcctgaaagaagaccccgtggcctttgaatacctctatctgcagagctgcagcgatgtgctccaggagcgctttgctgtagaaatgaaatgtagctctgcactccgactcgcggctctgcacatccaggaacggatctacgcctgtgcccagccacagaagatctctttaaagtatatagagaaagactggggaatagagaactttatatctccaactttactccgaaacatgaaaggcaaagacatcaagaaagccattagcttccacatgaagaggaaccagaatttgctggaaccccgacagaagcaacttatttctgctgcccagctacgtttaaattatctacagatcctcggagaactcaagacatatggtggaagaatctttaatgctactttaatgttacaggatagagaatcctacattgcccttctagttggagccaagtatgggattagccaggttatcaatagcaaactcaacatcatgtccacattggcagagtttgcaaacatcagccgtgtagagctaacggaagagtctgagaaagtgagcgtcgtcaaagtgtatcttcaggacgtcaaggttctgactttgctgctggaatccaacagtgcaaaagacctagcctgcctgattgctgggtactacaggctgttggttgacccagttacctccattttcctctggcctggaaacaaacaacaagcgcaccgggtatctgcagaagaaggctatgaatccagggcctgcagtgactcagaggagtcctctgaggtggactgcgtactcgaacctctctctgacaggcgcctggtgaaactggcaccctgcagatcactcataaaggaggagcagcctcctgggaacagccccacacctgaggtggctaggaggggccccagcacctgcggggccagcagcacgacagacagtgccgagtccgaggcgtccgactcagccaacactgagagccgcggctacaggaccagtggctcgagtgagtccatggacgctctggaagaggatgacttagacacctgctcctccagcaggtccaccttcttccactttggctcgccaggcctcgcagagagcattgactctgacagccaggaggagagaagcgggattgaaaccagtggcttcctctgtctcctggacctggcccagagagccaacccccagtgccagaagacagagttttccgagagtgctgctttggagacatttggctgggcaccagaactgagcacagtcaggctggaccccaggctgtatgaaggcagccacgccgactactacagcctgtgttccagtgtctccccggccagctacctgagtgacagttccgagagtacagcttcccggcaagggggagccccgccagcctggggtcagcagggctggactgaggcccagcccagttccatgctggaacccctggccctgcacccaccactggcctttgaggatggcagctcagatgaggaatactatgacgcggctgataagctcactcccccaggccccccgtcagggcccagagatgtttctactgcagaacccagtgccacaagcttgcagaataaggccagcacttctagccctgagaacagcctgccttgtgggccagatggaagacagccaagcaggaggggaggggtgaagaaatatgccaagaccctgaggaaaagaaggtctttcctacagaccgactacacctctcaggtctcatttcccctggtgccatcagcctccctggagagtgtagacgacgtgtgctactatgacagggagccctacctggcccttggtgcaccctccccaactgtgtcctctctgcaggacatgcagggtgagcctggccttctggagaccaaggccttggggctgctggctcctctgagggagaccaagagcacaaacccagcctccagggtcatggagatggagcccgagaccatggaaaccaaatcagtcatcgactctcgagtgtcttctatttctgccattcgcttccggattgaccccaacaataaagagaattctggtgttgtccctgctgccagctcctcagcaagcactcctcactgttctaacccaggttcatctggcccagatactgctcaggcaaggccttcccaaatcttacctctatctcaagacctggatgggattgcccccaaagaaccaaccatagagcatggagacagctccttctccctctccagtggtgaccctaacccagacagagcctgcctggccagcaacccaggactaaataatgtctctcaaggagacacactagagctccagttggagccccatgtccagttggaaatgggattggaatctttttgtacaaatcatatacaagaaactgcccccaaatacacagagcctttgttgtctcctagagatgagcctagaagtgatgaatgtggaataaatccaggagagaagatagcttctatccctacaaaggaagagccacaaggacaactatctctggaaagagacagagaagttacaaacaaaaatggcaccaacgtatttcaggaggagtctaggaaggattcaggtgactccccgggtgatgtgtcaaataatgtttcacagactcttgatattagctctccagctggtaaaatagtaacctccctttctttagatgctcctgtaacagggaccgagcagatcccaccacatccccctagagaccctcaaggacagagcagagaacccccagggcaaggctgccaggctcaagaacaaaaactattcgtagagttggatttagaccctgatttctttcttgggaagcagacagtttcaccagccgtccctccagaggggatcaaggcagaggcacctaaccatgtgacagggcaagatatagcccctagggacagccctgagtgggtctgttttaatcctgagccttccctgccagaaccactaccatgtccacaagaggatcctcacttagaaacttcaaaccattgcttactcttagaaggcaaaagtgacagctctagcatctgcctttctgctgagaagtcttttctgtgctttgccccagaaagccatcctgaagtctctgccagtctcagggtggccacatctttgggttttgcaggcatgaatgagatggtggctcccaggatagggatggaccagtgcagctgtcagttctcctatgccacatgcttccgtggcccgcagcctgagacagaggaagaagacagggacttggaagcacaccccatggcccccctcacctcaccgccctctgcgggaagcccggtggttctgccctggaggcctgcccgagcccacagctgcaccaccgcacccctgtcgaggaaaagccacatctggccagagtactgctccagggcactgagacagctgaaagccacccctgccagcacccctgagggcttcatccaactcatggagagcttgctggagctacaagacattttagaaacttcctggggggttggaaacaaacatcccccagagaagtgcacctggcactttaccgaaagccggagccgcctctgcatgggctcccagaagctcctgtcgagctgtcggcatgtgatcagaatggaccagtcccccgaagagatgcagggggccgtgcgtgacaccttccagcacctggtccagctggccggcctgtgctttcagttcacagactgtagccgctgctccgcccggcacagggaggcagcggggaacctgagggatgtggtgtacacctaccatcagtttatagaggctgctaaatcgacctgcgagagaggctaccacgacctgagtgtgaaactcctggcccgtcagtgcacggccctcacggccgccgtgttctgtttgacccagaagttccgggcatccacggccctgtaaacaggtcaacggcccaagggcctcctgccctgtcctgccttggacacttccctgagaagccccttccactctcccacccaccctcttcaaatgtttactatatagagtattcaaataaactgctgcttaatcttg

SEQ ID NO: 12649 - DNA, 3399 bp, Homo sapiens
atgcagcaggccggcaggtcaataaacttgcttgcctgactttgagtatactcgtcttttctcttggccaaccttacggtagctgtaccagtttgcatttccaccagcaatgaatgagagttcctgttgctctgcatcctcaccagcatttggtgtggtcagtattttggattttcaccattctaatagagattcacggatccatccgggtggtccgggcaccactggcgcccctctgcggctattccccagttccattttctgaagccacaggtcagaagccgctgtacaacactttgccgaactccagaatcttgaaggagacgtaaggagcagccacctgccgcgcaggcgcaagcctttctttcggcacaaagaccgtgggaggaggggtcggcgcaagcgctcggtgtctctctgaaaagaacttcatcatactgcctcctggctgacggagcgcagcgcaacgcatgcgccttgaagacttatggaacttatttcacgctcagggcggcggtgacgtgtgaacgagaaggaggtggtcaaggaacggaagccgggagggaacgagggcggaagcggaccagggccaggcttgtgttcgcagccttgccggggctggggttccgatgtggtccccggagcgggaggccgaggccccagccgggggagacccggcgggccttctgccccccgagtgggaggaggacgaggagcgcatgtccttcctgttctccgctttcaagaggagtcgcgaggtgaacagcaccgactgggacagcaagatgggcttctgggcgccgttggtgctgagccacagccgccgccagggggtggtgcgcctgcgtctgcgggacttgcaggaggcctttcagcgcaaggggagcgtcccgctggggctggccacggtgctgcaggacctgctgcgtcgaggggagctgcagcgggagtcagacttcatggccagtgtagacagcagctggatctcctggggggttggggtcttcctgctgaagcctctcaagtggactctttctaacatgctgggagataataaggttccagctgaggaggtccttgtcgctgtggagctgttgaaggaaaaggctgaggaggtgtatcgtctgtatcagaactcgcccctctcctcccaccccgtggtggccctgtcagagctcagcaccctctgtgctaactcctgcccagatgagaggaccttctacttggtgttgctgcagctgcagaaggagaagagggtcacagtcctcgagcagaacggggagaagattgtgaagtttgcccgagggccacgtgccaaggtctctccagtcaatgacgtagatgttggggtgtaccagctgatgcagagtgaacagcttctctcacgcaaagtggagtccttatcccaggaagcagagaggtgtaaagaagaagcccgccgggcatgccgagcaggaaagaagcagctggcactgaggtctctcaaggccaagcaacggacagagaagcgcatcgaggccttgcatgccaagctggacactgttcaaggcatcctggaccggatctatgcctcccagacagatcagatggtttttaacgcctaccaggctggggtaggagcactcaaactctccatgaaggatgtcacagtggagaaggcagagagcctcgtggatcagatccaagagctctgtgacacccaggatgaagtttctcagactctggctggtggggtaacaaatggcttagattttgacagtgaagaactggagaaggaattggacatcctccttcaggataccaccaaagaacctttggatctgcctgacaacccccgcaataggcattttaccaacagcgtgcctaaccctaggatctcagatgctgaacttgaagctgaacttgagaaactgtccttatcagagggaggtttggtcccaagcagtaaatctccaaaaaggcaattggaaccgactctaaagccattgtaggaccctcaagtgaaggaccctcatgtaaaagagagaccaggcttgctgggtgtgtacatagttatttaaacaagaaactctcagaatgtgtttggaagaggagaaaggagaaccactgattttatctggatgctactacttactacaggacagatagaatttctggaagcgatgctccaaaggcttgctcccagctgtatcatggacctgccttctcatctttatagtgccacgatttatacagtcctgtgtctgacctgtcatttcatagcctgcagttcttgccattggcacacttagatttgtcttcacccaccagcttcgttccagcccatgaaggggaaagatttgcagctttgccaaatctgaatcagttcccactcccccctgcggttttttagaggggtttatcctgtcgctaatgtcagttaaatagcttattcctgtcccacttgatttcactggtaagaatgagaatgaaatacttaaaggttttatttgaggggacttagctgccattttatggaaaaacatgtagtataaaaggtttttctccagggtcatttgacagaattctccaggtgttcagagaaagaggtcgccccaagtggcccagagtcgtgacagtccggaggggctggtgtggccggtgggcgctgcctcttcatctgatggagccaggaggtccgccggtgggggaaaggcttcttccgaggcttctgcactcgcctgggaagaggcccagtcactacaggaccctgagatgtccagaccccttatgcaaagaggcaaaattgttgccttggccccatcatggagtaacttaaaaatacatatctatcttccagaacaagccacacaacaacacacctcccctccttgagcctggcacacagcaccgggctctctgaatttggaaagtgtttcattttgtggcctactgctcggggcaggggggctgagccaggatgtgcaatagaagcaggggttgtcccctctgccagatctgtggggagctgcccaggccacccgtgcacctgtcctgcttcctgcagtccccactccctgcctcctttgagggactgggggactcggggtagggggacagacgggaaagggtctgaatgctctggcaatggcgagaagaagcgatcgccacactgccactctgctgcccagccaccaggatttctgcctggagccctttgccctgtccctgctgcctgaggtggcgtagagcagaggagaagaatttgctccaggccaggagcacaaatcgttgttcaatgaatttctctccaactcgaccttggtaaacggaaatgttgggggtgaagagaaacaatcactatttttttcttttttatctggtaaataattaaaagaaaaaccgaaaaaaaaaaaaaaa

SEQ ID NO: 12650 - DNA, 2665 bp, Homo sapiens
ggctctgggcatcaccagcggccccagggaaaaagaaagaaatgggaaacagcatgaaatccacccctgcgcctgccgagaggcccctgcccaacccggagggactggatagcgacttccttgccgtgctaagtgactacccgtctcctgacatcagccccccgatattccgccgaggggagaaactgcgtgtgatttctgatgaagggggctggtggaaagctatttctcttagcactggtcgagagagttacatccctggaatatgtgtggccagagtttaccatggctggctgtttgagggcctgggcagagacaaggccgaggagctgctgcagctgccagacacaaaggtcggctccttcatgatcagagagagtgagaccaagaaagggttttactcactgtcggtgagacacaggcaggtaaagcattaccgcattttccgtctgccgaacaactggtactacatttccccgaggctcaccttccagtgcctggaggacctggtgaaccactattctgaggtggctgatggcctgtgctgtgtgctcaccacgccctgcctgacacaaagcacggctgccccagcagtgagggcctccagctcacctgtcaccttgcgtcagaagactgtggactggaggagagtgtccagactgcaggaggaccccgagggaacagagaacccgcttggggtagacgagtcccttttcagctatggccttcgagagagcattgcctcttacctgtccctgaccagtgaggacaacacctcctttgatcgaaagaagaaaagcatctccctgatgtatggtggcagcaagagaaagagctcattcttctcatcaccaccttactttgaggactagccaagaacagacacaatggttcatgcccaaaaggaacagaagttccaactattgcctgggatcttgcgaaaagcgaggttccctgatccctgggagcctcacgtattttagaagccaagagaagccacatggagactcaaattcgcatcttctctatccacatcatgaccaaaggaacccctccctggtgtctgatcagggctgtggcatcacaaaacattggatcatgacatgtcgggcgatgcttggaaaagcccagcatgtatgtatgcacacattgtgtgtgtgggaaggacaaagccactctcacaagaaagggcaccaggactgctctccaaggaactggacctgtccagacagttacactccaaggtcattggagagaacttctgtatgggcaagcctgagagggagaggaaacaaaagctgtgtcctggcagaaggtctgggtttgcagatgggtgccctgaatggaactactttaactaatccatagggacttctggtatgctttcctctctttttaaaggaacttcgtgacactaaacattagcccaaaggacttcttagccttcaattgggagatacctttggtctgctcctgcaccaaagccatatgggtggaagtcagttggcctccctggttctgcagagggccagaagaatgagagagaggaagactgctggcagggaaatcgaggaggcgagactagaactgcaccagcttccctgatgtctgcagccatggctttgcagcgcaaacagaacttctctgggatgctgggattcttgcctgtatgaatgcatcaagtattcatttattgcccgaataggcattgcattaagtcctctgttaggtgtcaggcaagccaaaaaaaaaaaaaagatgctaagtcctaacccccaacagaagtgttcacagtgtagacgggaaaaaatgtataaacaaatgtgtaaaaagagaaatcagctcatggcttaggatggaattagagacaggtgagggacactcaggagctcattttccagctgctcttcagagtggaagggctggctggatcgggtaggtaagaatagctggattttttagaaaagaaatggatacagtctaaagaattaactcacccggtactttattctaagaagggtctggcatccatatgaggaaaaatgctcagctccaggaaagatggggagtccaagtggattaatgatgtcatgcataattttaagagacaagggagaaaacacaatgtatagccagagaaggagaagctcccatccaaatcctactaggaagagagtgggctgcagatgaatctgtgactcatgtttccctgtttcaaagggatcctggggaaggaggggaacatgcttgcagtatctctccctgtctgtctgctcacataagcattccgtccatctaagctcatcgtgctactggtatgtgtatgtgcagttacacagtttcctgtatcataaatcctagtgtgtttatacaaggagacatctgtggtttccccaaccgttccaaaaggctatttcaaaggaaccagcccacgtatgagaaatgaatgtaacactgtggacattgacttcccgcataaggcagggtgaccccctgaactccagatgtttgcacagtatcttatgtgttgttttccgttgtgacgaatgtgattggaacatttggggagcacccagagggatttttcagtgggaagcattacactttgctaaatcatgtatttattcctgattaaaacaaacctaataaatatttaacccttggc

SEQ ID NO: 12651 - DNA, 11201 bp, Homo sapiens
gcacttgataagataccagcagcactggccaaatgttgcacatggttatgagttgggcataccgaggttttatatttcagggcctctgaaatcaaggacttctgaatgagacaccagtctctttcacatatgacattaaaatgtcaaagcaatattattcctttaaaaaaggggtagggagtggactggaagataatacattcatgacattatgggactttctagagtcctggattattcaaaatgattgggtggcaattttctttataattttactaggaattatttttgagataatactcatgaaagcttgtgcatccttttggaagaagcccacacttcctgaaaagggtagttcagatgtccaggagacggaagacagttgccccaaaagcaggaaacttgctccagagaattggtcagttattaattcatcttcaggagaaagagttggcacctttttagaaaaaagaattacttcatcacttacatctgaagaaaaggaatgtaactttgaagatagaattttattctcacgtgaaatactatggtcaggtactagtgaaagtgaagatcaagtaagtccctctagtgaaagtcatgtgccatcttcaaatggaatcagctcatctttgccattgttttattcagaagtagaggaaacgtgtctaagccatacagagcatccagacagagaatatgaaacaatacaattttcctccaagaaattattttcaatgatgaaaaccaacaaaaacaaaaattcaggattttcttctgatcttagcttttcagcatctagattcactgtagaaaatgaagatctagatgtggcaccttgccctcttgcccacttatttctttctagagatcaagttagacttctggaagaaaatgtgaggaatcaaattccttcaaaacccaaaactaagttagggagcagaactacttatcaatgctcaagatctcaagagtccttgaatcagaatcaaccttctgttggaatggttatttctgtccaagcacaggattcttttccaggacaaaatgcttttcagaatcaaggtctttatgaagtccaatttactagtcaagcccaatatataaatcataaccaagaatcaattaagagccagcctgagagcaaagccagcaactttgcccagcctgaagatgtgatgaagaagccattttctagcagcacacaagactccttccagtcccaagatctggataggaaccaacattttgttgaagttccatcaattgttgaggcaaaatattcagtaaagggcctggagtctgatgaacacttaggtgaggaccaacattgtgtttggtttatagattcaaacaaggttaaatattcaattaaggggcaagacactatttttaagaatgctgaatttctcgttttaactctgaatccaaatttagtcactgaagatatgccacaactaaggagtgtaaaagcacaaggccagcaacaaattgtttcatcagaattgaaccaggattctgtatatagctcagtgcctcttttgtctaccattaaagggcagaaaaatagaagaaaaacaccagacagtaaaagcaaactcagtcttaatgttccatctctaaaagccaaaaaaacaccaacttcacaagtatttcaaatcacagtatgtcacactttaaaaaataggaatgagttaggatgcaagaataacactgagaagaaagaattacatgaaaggaaagatatatcagatatagctttgcatcttatttctgtttccaagcttattctgccttatgttaaaaattattccagaaaacaactagtgaaagtcatgccgggtttaataaaatgtggacattttctgcagaagcaaaataagtcaccagatacagagaaaatcaattatgcaggtcctcttgaggagacaggaatctcagatattactaaaaaggaaaaggagtatgacaaagaaaacaaaagactaaaaaacatttcaccaaaaatgttacctcagctagaacaatccttcatggtcaacactgttcaactaaaagcaccttgtttactagtagaaacaaatgggaagagtaaagaatctcttaaagactcaattacacaagcaaagggaattggtattacagaatttcatgttctaaatagtaaaaaaccatttgatctccatattccaaagcacaagacatctttagaagaagctatatcaaaacctatgcagaaacttgtttcctctcctgaaatggaatcgaacaatagaatgaaaatacaggaggacctacaaagttcagaaaattcccatcttcaactttcaaatggagaggagttaccaaccagtacaccaaaaacgcaaaggtgctttccaagggaaaatacacagaaacaaaaagattttttggaacttgttctggagttgtcaaatgtcggtttgctcatttccccaggaagcaaaatgcataaaagcagtgaagaattagaagccataaaaattcaagtgaatacagaaagtgtaaatctgaaggaaagtaaaccattgatacttaatgttacagaagacagtgacctacgtgaaagtgaggaactggaatgcaacactggaagtaacataacaaatatgcatcaagataaagaaacgtctgatgcatttcacagtgccacttacactaccatttctcaactacctgatacagaaacacatagcatatcaaaagccaaggcagacacattaagaataataaggctcagtcattcagcatcaaagcaagagaaattaccagatgagaaggaaacacagaacgcagaatacattgataagagctgtacatttaaaaagccacaacaatgtgatagaaaggaacaggagaaagaggcaaattcagagctgacacaaggcttcaggttcagcatacatctaaagcaaaagcccaagtatgtcaaattccaaatggaacagatcagttcaggaagtagtaaagccccaaataaagagcaagaagtccaaccacaaactctttctacacaaactattttggagaatagtccatgccccatgatggatccatttcaagttgagaaggtgaagcaaagcacagatagacctacagacagagagagtgccggagatccaaagaatccacttacaatgccagagaacttgccagttggtgaacttttaattgaaacaacagagtatagtgtcccatttggtggaaacctccaaaagacaacggatagtcatattgcagaagaaaaggaagatgtaaaaagatatttacctgcagttgccctggggtctttcaataaccacttgcttactttaccatattttaaaaggcaggaaattaaaaaaaaattatcagaaacaaaaagtgtactcagtgtcaaatatgtaattatgaaagtaaagaagccagcaatctcactgatgccttatattaatatatgtggtacttcaaaccacaggaaaaaaatgggaggcaattttgaaattataattaaacagatactgcaagataaaattgcagcaggtatgcttctgaatgttatttaccctcccatgtctattttgcctaatactagaatgtatagcagattaaatgcagagaatcacagtcatatcaagctagtccaagaggaatcccaaattgaaagggaagaaaagtatccatatttcattaatgagggaaatgaatcccaaaacacactagatgctaaattgcaagatgaagtaaaaggcgtcaaagaaactctaccaaaagcagtcctgcatgatagctgcaaccttggacttgatgcacatctagagaaggagattaaaacagagaaagaaatgcatcaaccaatcccattcacagaaactattattgagtctgttgtttctcccataatggaactatctcatgctgagaatgtgaagagtactcaaaaaacacaaacagactgcaaatgcactgcagattcagagacgccttctccaatatcaggaaaatcactgattggagaccctttaaaccaaacaagagaaagttatattccaagtaatggaagtgatacaagagaaatgggttactgttttgcagaagaaaagacagaaataccaaaagatttaccagcaacttcgccagagactttcaattattgcactcctgttttatcttgttctaaagtgatgaaaaagagagtaacatttgcactcacaacaagtacagcgaagcccaaatgtgtaaatacaaaggctgtgaagccatcaatctcagagacagtcagtgtcacaagccacagaaagaaatcagaattagactttaagactaagtttaaaaagataaaccaaactaaaggattggtacctgaatgtctaaataccctttgctctccaatgcatagcagattgcagagagagttctgtctccctgcgtctcaattaaagcaaggagaaacagcagataagacatacactgatgtctttgctaagaatagcatatcccatgacagagaggaaaaattgcaagatggaaaggaagaggaacataaagttttattagaagcagcgccacagctgagccagcacctggggtctgaggcgggtcaaatgaaggaaatccatcttgaatcagacccagtgctgaactgtttaacactggagctacatattaatggacaacgtttgcagcaccaaacaggttttgaacaaactactttagagactagtctccaaatgggtcctttagaagctgaagaactacaaaaagccaacgaaacagaaaatgacataaaagtccttggaggtcctaagattccacctcccaaagctttacaggctctggagaacagcgatggcttaatactcaatgcatatcagaaggataatgagcttgtcaaatcagatgaggaactgaaccaaccaggaagtacaaatattcaggtacaaccacaaacacattttacacaaactattttgaagtctacttcatgccctacactggatcaatttccatttgaaaaggtagagagtcatgttaggttttcacctctaaagtctggggaagcaaaggttgatgaaatcatattttatgcaagagaaggtggtatctcatctgattctagccatcaaaaggaacaggctggtggtactgaaaagaaagagacagcgatttttggttcctgcatgcctgctttatctacacctaaaacgacgagaaacttaaaacaattttcagacatgaaaactttagtgaatcccaaatgtggaattataaaggcaaagaagccatcaatttcatacatgctcaatatcagggctggtgctggtccgaaacgtagaaaagaactgagctgtaacttgacaaccaaaatgaaagaactgcatcaaggcaaaaagggggtagatgaaacatatgctttcctgactatgacacctgacattaacaagtatagcaaggtagaaacagaaaaagacacgctaagagaaaaaagactcagttctactcaagtaaagcaagatacatctccacatgaagatagtattacttcacgtgacattaaagaaacccttcttcaagatgaagagcaagaagaaaggaaacaggaggcattgttaaaagtaattccacagcacctgcaacatttcatgttccgttcaggtcaggggaaggatcttgactttcacaaattagaaaaccaaggaagtaggaaaattctgtttgttaccaaacaagatgtcccacagcaacttcagcctgcagagccaatacaaagagaggagacaaagaaatgcctccagacccaaaatggcacaatatgtacagtaaattcaaaacttcttcctctaaaatcagaggactcagtaaatggtgaagttttaactggtgcaataaaacgtggtgtaccaactgataggaaatgtatgggggaacagcacaattcaggtaaaggggaaaaggcagagtttaataaagatctacaagcaactgtcctggagttacagaaatcaccacatggtggggaggcacagaaggccaatttgactgacatggaaagtggatctagtaatgcaatgaacatgaatgtacaacatgaaagggaagataaaaatattcaaaaaatgttaacagaatcagttccatgctatagtcaacacctccgtttcagtacacatcaaatgaaagatcctgacccttgcaaatcaggatctgaaccgaagagtcccgaaggcagatcttggaatttgtctcacatagtgcaaaaaacaaagcaagaaacacactttagagaaactgttttagagcctatttctggatacatgatgaaacaaagtcctcatatgcaagaaggaataaaatgtatggaaggtctaaagacttcatttcccaaaacagggaaatcaaagattggttcaataccacgtgataccccttgggatgaaaatcctagaaggaaatgggatagttctatttctgagaaaactgcatggaatcaaaaaaacttacaaacagtcttaaaacctttagatttctccagcctcatgtcatctgaatatgaaagccggagctatacattagagtttataggcaagaaaagtatgagtcccaaatgtgtaactttgaaggcaaagcaactacgaattttgcagttgtttaatatcataagatattctacagaaaaccacagaaagaaaaagcaacaccgttttaagtacaagatgaaagggaagcaatggtacacaagtataggagaggcattactcagtgccactgaatatgctaagagtacaacatccaaatcaatgattgataaactcttatacaatacagcagcgaggtgcattctatctaacagaacacgccgacaaaatctggatggtcatattacagaggaaaaggaagaggtacaagaaaatgtagctgcaattttcttgggtcttttagatttcttcatgcctgttttatctgactctaaaaaccagaggaacacagcacagttatcagaaaaagaaattatattcaatgccaaatgtttaactatgaaggaaaagaagtcgtcaatttcacagatacataaaatcaatagagagtctaccagaaaacataggaagaaatgtaaatcctatttaaaaactgtatccaacagaaagtgccaagaaaatcatggtcatattacagaggaagaggaagaagtacaagaaaactcacctgcaactttcctgggtcctttagatttcttcatgcctgttttatctgactctaaaaaccagataaacacaatacagttatcagaaaggaaaattatattgaatcccaaatgtttaactatgaaggaaaagaaaccaccaatttcacagatacataaaatcagtgggcagtttactacaaaacataggaagaaacttgaatccaatttaaaaaccaaactgaaagcaatgtggcaaggtgaaaatgtggctgatacatttccaaatacaacttccttcactccagattcctctgacattaaaaggcaaagtggattccaaacagagatagacatgagaatatcagggttaagtcatacacaaccaacacaaatagagtcactagctgaagggatagcaaggtattctgatcccattgacaagagaagaacttccaacttggtaaagggagcaaaactacatgatagagaaagtggggaagagaagcaagaacatcttacagaaatggatccattctatgcagaaaacttcatggcaaacacatatcttagaaaggatcgtcatcttggtaaatcagaggatgtgcttttgggagaaacttttttctcaaaaagtcagatttacaaagggaattcagaaaaaaatgtaaaaatagaaaaaaacaaaaatggaaaagaaagtctcaaagttgggctcgcaaggatggagaaatcagataattgtgcagaactgagtgaggcaacagatgatgccatatcaaacaaatatgataaacagaacattggccattctgttttaaaagaaaatgctttctgtaatttggcagcaattgtcccagattctgttggcaggcattcacctgcttcagaagaaatgaaaagacagaatggcagacttaaaatggctgacaggtcaagtccccaaggtagacctttgcaggcaaagcaatcagcagtttcacaatcacctgatactgcaggttatgctgttgtaagcaataataaggagcagaaacagaactttaaagcccagaagacagaagcagaagttgatttaatagatcaagaagcaaagataaatgttgcagaagagtttaatccagaatctgtttttttctctaagatacatccacttcaaattgaaaacaagaaagaatttaaaactgcagactggaaaacaagggcagatcccaagacatttgccctgccaaagaaacagcaagagctgtgtgtctcaggaactatctggagttatcctaatccctacacatctatttctcctaaaatcataagacataaagataaggcaaagacagcagatgtggaaagtactatgcataccaaacagataaaattgaaggcaaaaagaataacagtttcccagctgcttgagtatggtactgcaagcaataaaaaagaactgagaggtaacatccagcagcagaagtcattccagctgagtaaaaatgcagtacatcgagttctaaaggctgtttatgactctggatactgtgtgtctagcattaaaaagcttacagaagtaaaaatggagaaagacaagccaaaagacaggacatgcattcttccacagccaaagctggagaaaccactaaaagaaatgcaaaggtcattgtcaggttgtactgatatgtccagcattcttagaaaacaggaacaagatattagagaaaaggaacaaaaacaccaaagcatttcagaagacatatcccaatactatattggaccgttaaggattagttcacaacaaatcaattacagtagtttcgatgccccacgaattagaacagatgaagaacttgaattcctcattgcacaaagagcaaaggaaaaagatgtgggcattgccaaacattcagtttcaattccgtgggagagagaaggatcgaagagactagatattccactaaactcaaaaggacagaatatattttttacagagttggatacttctcaacagaagacttgccaggagcaagaattgctgaaacaagaagatatttctatgacaaacctggggtctatggcctgccccattatggaacctcttcatttggaaaacacaggaaaggtaactgaggaagaagatgtgtacattaacagaaaaattagttcacatgtattgggaaaagaaggattaaaggaaactgatatatttgtaggttctaaaggacagaaatttctttgtacaaattcagaggtacagcacaaagtgcctgcagagcagaaagaacaggtgaatccagatcatgttcccgaaagtattctggattctgaatctttcctcagtaaggaccctcttcacttaaaacaggcagtgaatacagcaagaaaagaaaatgttaccatctctgaaagtttcaatgaaaatctttggggaaaagagcaatcaaagttggatattacattaaaatcaaatagacagaaaatggacttttcaaaaaaattgaggatgaagcatctaagtaattattatcagaataaagagaatattctggaatctgttctcccttgcatattgcatcaactttatattgaaaatcccaagaaagaaggctcagcagaagaaatcatgagttcaaaagttctaagcccaatggtagagaaagcatcacatgaagtaggtattccggtggatcaacctccatgttcagaaggaatacatttgaatattaaaggaagaaaagaacatccacaagaaagtacacacgaggcttttccagcatctgtttctcactctttaatggacgtacttcagattaagtcaccaaagaaaaagaaggaagatagagaaaatatagtagatgtgaaagatgtaatgggcctcaaatgtatcactttgaaaggaaagaaatcactttttagacatttactgcatggaaaagaaccacaacggagcaataaaaaactagagaaaatgacgcaggaagatgaaagtaatctaaatgtagttcagaataaactctgtgcttctattctttctccacctcacttggaatggaatcctagaataaaagaggtatacatgagaggaataacaagattctgtctttcatcatcaacacagcaggaattatcagatacaatggaaaaatgtgagcagccaattgatgatagtttaagcagtattgaaaaagcaaaacatatgccgcagaaagacaaagacagagtggaaaaggctttggaaaaaatcatgcattccaaaagaatagctttggaggtgaagcagccttcaatattccaagaattagagttgaacatcaaagaaaaaggaggaaagattcaggaagataaagaagttgagatttggagcaaaccttttgcttccatctcttttctaccttactctaaagtgggcacaatagaaggagaggaagccatgagaataaaaatgagatcctctttttcacaaccaaatctccaagagtcatcagatacagagaaaacagcatatgaaaagtgtatttctgataatatctcaaacagtgtaaaaaaggccctagaatctatattgcaaaaagaacagaggcaaaaaatggaaaaaattagggctttgaagaaaatgaaatcatcaatttcacagggaattcagttggacattaaagagcaagagaaaaggatagaacatattaaaggtgaaccaagtgtgcttctgacaaatgcctgcgcttccattccttctccttctcatttacaactggatacaaggagagaaaaagcagagtatgtcactgaaataacaagatactatcttccagaactatcacaccaaaaatcatcagaggcaggggaaaaagcagatggagtggccagtaagggtgatatcacaatcaaagtacaaaaagcaaaagattacatgcaacagaaagaagacgatgaagtaaaaatatcagctaagaaagacataatgcatccagaagacaaaggtctgaaagcaaagaagacaaacgaacagcaggcaaaaaagaggaacaaggagtaa

SEQ ID NO: 12652 - DNA, 6280 bp, Homo sapiens
gggactcccaggactcccggccggggtagctcttcactcctcagcgcgacgtcgtgtcgagttcccaaaaagctccgcaggggctgtagggaggcatacaagaattaaattctgaataagtctgcaggtaggatggacagttattttaaagcagctgtcagtgacttggacaaactccttgatgattttgaacagaacccagatgaacaagattatctccaagatgtacaaaatgcatatgattctaaccactgctcagtttcttcagagttggcttcctcacagcgaacttcattgctcccaaaagaccaagagtgcgttaatagttgtgcctcatcagaaacaagctatggaacaaatgagagttccctgaatgaaaaaacactcaagggacttacttctatacaaaatgaaaaaaatgtaacaggacttgatcttctttcttctgtggatggtggtacttcagatgaaatccagccgttatatatgggacgatgtagtaaacctatctgtgatctgataagtgacatgggtaacttagttcatgcaaccaatagtgaagaagatattaaaaaattattgccagatgattttaagtctaatgcagattccttgattggattggatttatcttcagtgtcagatactccctgtgtttcttcaacagaccatgatagtgatactgtcagagaacaacagaatgataccagttctgaattacaaaatagagaaatcggaggaatcaaagaattgggtataaaagtagatacaacactttcagattcctataattacagtggaacagaaaatttaaaagataaaaagatctttaatcagttagaatcaattgttgattttaacatgtcatctgctttgactcgacaaagttccaaaatgtttcatgccaaagacaagctacaacacaagagccagccatgtggattactaaaagatgttggcttagtaaaagaggaagtagatgtggcagtcataactgccgcagaatgtttaaaagaagagggcaagacaagtgctttgacctgcagccttccgaaaaatgaagatttatgcttaaatgattcaaattcaagagatgaaaatttcaaattacctgacttttcctttcaggaagataagactgttataaaacaatctgcacaagaagactcaaaaagtttagaccttaaggataatgatgtaatccaagattcctcttcagctttacatgtttccagtaaagatgtgccgtcctcattgtcctgtcttcctgcgtctgggtctatgagtggatcattaattgaaagtaaagcacggggtgattttttacctcagcatgaacataaagataatatacaagatgcagtgactatacatgaagaaatacagaacagtgttgttctaggtggggaaccattcaaagagaatgatcttttgaaacaggaaaaatgtaaaagcatactccttcagtcattaattgaagggatggaagacagaaagatagatcctgaccagacagtaatcagagctgagtctttggatggtggtgacaccagttctacagttgtagaatctcaagaggggctttctggcactcatgtcccagagtcttctgattgttgtgaaggttttattaatactttttcaagcaatgatatggatgggcaagacttagattactttaatattgatgaaggcgcaaaaagtggcccactaattagtgatgctgaacttgatgcctttctgacagaacagtatcttcagaccactaacataaagtcttttgaagaaaatgtaaatgactctaaatcgcaaatgaatcagatagatatgaaaggcttagatgatggaaacatcaataatatatatttcaatgcagaagcaggagctattggggaaagtcatggtattaatataatttgtgaaacagttgataaacaaaatacaatagaaaatggcctttctttaggagaaaaaagcactattccagttcaacaagggttacctaccagtaagtctgagattacaaatcaattatcagtctctgatattaacagtcaatctgttggaggggccagacctaagcaattgtttagccttccatcaagaacaaggagttcaaaggacctgaataagccagatgttccagatacaatagaaagtgaacccagcacagcagataccgttgttccaatcacttgtgctatagattctacagctgatccacaggttagcttcaactctaattacattgatatagaaagtaattctgaaggtggatctagtttcgtaactgcaaatgaagattctgtacctgaaaacacttgcaaagaaggcttggttttgggccagaaacagcctacttgggttcctgattcagaagctccaaactgtatgaactgccaagtcaaatttacttttaccaaacggcgacaccattgccgagcatgtgggaaagtattttgtggtgtctgttgtaataggaagtgtaaactgcaatatctagaaaaggaagcaagagtatgtgtagtctgctatgaaactattagtaaagctcaggcatttgaaaggatgatgagtccaactggttctaatcttaagtctaatcattctgatgaatgtactactgtccagcctcctcaggagaaccaaacatccagtataccttcaccagcaactttgccagtctcagcacttaaacaaccaggtgttgaaggactatgttccaaagaacagaagagagtatggtttgcagatggtatattgcccaatggtgaagttgcagatacaacaaaattatcatctggaagtaaaagatgttctgaagactttagtcctctctcacctgatgtgcctatgacagtaaacacagtggatcattcccattctactacagtggaaaagccaaacaatgagacaggagatattacaagaaatgagataattcagagtcctatttctcaggttccatcagtggaaaaattgtctatgaacacaggaaatgaggggttacctacttctggttcatttacactagatgatgatgtttttgcagaaactgaagaaccatctagtcctactggtgtcttagttaacagcaatttacctattgctagtatttcagattataggttactgtgtgatattaacaagtatgtctgcaataagattagtcttctacctaatgatgaggacagtttgcccccacttctggttgcatctggagaaaagggatcagtgcctgtagtagaagaacatccatctcatgagcagatcattttgcttcttgaaggtgaaggctttcatcctgttacatttgtcctaaatgctaatctactcgtgaatgtcaaattcatattttattcctcagacaaatattggtacttttcaaccaatggattgcatggcttgggacaggcagaaattattattctattgttatgtttgccaaatgaagatactattcctaaggacatcttcagactatttatcaccatatataaggatgctctaaaaggaaaatacatagaaaacttggacaatattacctttactgagagttttctcagtagcaaggatcacggaggattcctgtttattacacctacttttcagaaacttgatgatctctcattaccaagtaatccttttctttgtggaattcttatccagaagcttgagattccctgggcaaaggtttttcctatgcgtttaatgttgagattgggtgcagaatataaagcatatcctgctcctctaacaagcatcagaggccgaaaacctctttttggagaaataggacacactattatgaacttacttgttgaccttcgaaattaccagtataccttgcataatatagatcaactgttgattcatatggaaatgggaaaaagctgcataaaaataccacggaaaaagtacagtgatgtaatgaaagtactaaattcttccaatgagcatgtcattagcattggagcaagtttcagtacagaagcagattctcatctagtctgtatacagaatgatggaatttatgaaacacaggccaacagtaccactggccatcctagaaaagtgacaggtgcaagttttgtggtattcaatggagctctaaaaacatcttcaggatttcttgctaagtccagcatagttgaagatggcttaatggtacaaataactccagagaccatgaatggcttgcggctagctttacgagaacagaaagactttaaaattacatgtgggaaagttgatgcagtagacctgagagaatacgtggatatctgctgggtagatgctgaagaaaaaggaaacaaaggagttatcagttcagtggatggaatatcattacaaggatttccaagtgaaaaaataaaactggaagcagattttgaaaccgatgagaagattgtaaaatgtaccgaggtgttctactttctaaaggaccaggatttatctattttatcaacttcttatcagtttgcaaaagaaatagccatggcttgtagtgctgcgctgtgccctcacctgaaaactctaaaaagtaatgggatgaataaaattggactcagagtttccattgacactgatatggttgaatttcaggcaggatctgaaggccaacttctgcctcagcattatctaaatgatcttgatagtgctctgatacctgtgatccatggtgggacctccaactctagtttaccattagaaatagaattagtgtttttcattatagaacatcttttttagtgaaagaatgtgccatattacatattgcaacctaatttgttaaaactaactccagcactaaagctgaaatgccacaaacactaaaagtataaatatgtctgatttttgaaacacataagctttgctctttaggcaggaatgatcttttcaaatcattagcacaatatttaaatatctaaaaatttaagagatccatactttctgtagctttacaattaatttaagtactaaaaagacaaggatttcttttaagaaatttatagcatttactgtgttatttaaatgctaagccaaagtatctgcacttaggtatacctctttatgccaataatgattttaatgaaggctcttttcagatgtaaccttatgaaggaaatatctgctttgtgtatatgccagttagaatactggtttctaaagtctgtcaaattgtatttcagtggcacaaaaaccagttttgaggtcttagacttataattctttgaataaaactgataacttatttgtataattggagtggagacctacctccataattagataaactctttttggattataatcagaattttgccttttttcttctcaaattattacatatgtatgtattatatatccacatatatagttttccctgattaaatggatattaaaataattgcgggtgcttcaggactttttgcttctatatttaagtatattgtttttatagcaagaacatattctgaatgttttataaatctttaataatttatatgtaggtaatatttttgtatcacaatgcattatttttttcctcctttccttccaaactataccactgtatttaccacttctaagagtgactgacgacgggccagatgacccttgaagtagtcattatgtagcaataaatgaagcctgaaacaggtttttttacttccactttaatccttagaaatttcttggcaacttcgcatattttcattgacaccggtgtataagtataaatttaaatgaactaattacttttgcatattttaaattctttatatggtagttattttttataacaggatattaacataagttaaatcctatgtatttgaaattgttacagagctttcctctttacttcaaacagcaaaaaagtggggggcatattgtagtcctgtcatttaagttatgtaaaaaatttaatcattattttgatgctttaaacattctcatgtgtaatatatgtttttgtatcaaaaacactcatatatttcaagaaaaagaaattatgttaaatagccctgttttaagaaaaatatttatgaagcatctcaacttgaagatcaagtcaaagttataactcaggatctgaggtctcaagctaggagagactgagaattttaatcagtttgggcatatagtttggactgaatcacatctgtagtacttagccaaagacaatttggaggagaatatcagccttctggaagtagctacttcctgaacaatgtaaagtgtcgcagatattcaataaaatggcaacctgttaaaa

SEQ ID NO: 12653 - DNA, 6873 bp, Homo sapiens
cgccgccattttcccagagcgagaggcagtgacactgagcgggcgcagggggccgagtcggagaccgtgccggagttcgggagcggcaacagagtgggcatagacactccgagcagcctcgccgtcgtctctgcgttcctgttgactgcctggctgccccctcccctactcctcggttcctggtgaagaggctgcgcgctgctgtttggggagggggtgtgtggagccgggtcctgtgtccgcagtggctgctgtcggggggtcgcctgttcgcggaggtgcggagagactccttgggggtcgagcacataacggggttcgggtgtctcgtgtgtgaacatcacaggtctattctggataagcaggttttgtgaagacatttattctttcttggacctcagatttaccagacatctcatgggtttgtggatgcacttagatgtttgcaatgagcactgtggctggcatgccccagtgttttggataccaatgcataggactccatagtaatcgaatttaccagaggcgaacgtcatgagcatagtgatcccattgggggttgatacagcagagacgtcatacttggaaatggctgcaggttcagaaccagaatccgtagaagctagccctgtggtagttgagaaatccaacagttatccccaccagttatataccagcagctcacatcattcacacagttacattggtttgccctatgcggaccataattatggtgctcgtcctcctccgacacctccggcttcccctcctccatcagtccttattagcaaaaatgaagtaggcatatttaccactcctaattttgatgaaacttccagtgctactacaatcagcacatctgaggatggaagttatggtactgatgtaaccaggtgcatatgtggttttacacatgatgatggatacatgatctgttgtgacaaatgcagcgtttggcaacatattgactgcatggggattgataggcagcatattcctgatacatatctatgtgaacgttgtcagcctaggaatttggataaagagagggcagtgctactacaacgccggaaaagggaaaatatgtcagatggtgataccagtgcaactgagagtggtgatgaggttcctgtggaattatatactgcatttcagcatactccaacatcaattactttaactgcttcaagagtttccaaagttaatgataaaagaaggaaaaaaagcggggagaaagaacaacacatttcaaaatgtaaaaaggcatttcgtgaaggatctaggaagtcatcaagagttaagggttcagctccagagattgatccttcatctgatggttcaaattttggatgggagacaaagatcaaagcatggatggatcgatatgaagaagcaaataacaaccagtacagtgagggtgttcagagggaggcacaaagaatagctctgagattaggcaatggaaatgacaaaaaagagatgaataaatccgatttgaataccaacaatttgctcttcaaacctcctgtagagagccatatacaaaagaataagaaaattcttaaatctgcaaaagatttgcctcctgatgcacttatcattgaatacagagggaagtttatgctgagagaacagtttgaagcaaatgggtatttctttaaaagaccatacccttttgtgttattctactctaaatttcatgggctagaaatgtgtgttgatgcaaggacttttgggaatgaggctcgattcatcaggcggtcttgtacacccaatgcagaggtgaggcatgaaattcaagatggaaccatacatctttatatttattctatacacagtattccaaagggaactgaaattactattgcctttgattttgactatggaaattgtaagtacaaggtggactgtgcatgcctcaaagaaaacccagagtgccctgttctaaaacgtagttctgaatccatggaaaatatcaatagtggttatgagaccagacggaaaaaaggaaaaaaagacaaagatatttcaaaagaaaaagatacacaaaatcagaatattactttggattgtgaaggaacgaccaacaaaatgaagagcccagaaactaaacaaagaaagctttctccactgagactatcagtatcaaataatcaggaaccagattttattgatgatatagaagaaaaaactcctattagtaatgaagtagaaatggaatcagaggagcagattgcagaaaggaaaaggaagatgacaagagaagaaagaaaaatggaagcaattttgcaagcttttgccagacttgaaaagagagagaaaagaagagaacaagctttggaaaggatcagcacagccaaaactgaagttaaaactgaatgtaaagatacacagattgtcagtgatgctgaagttattcaggaacaagcaaaagaagaaaatgctagcaagccaacccctgccaaagtaaatagaactaaacagagaaaaagtttttctcggagtaggactcacattggacagcagcgtcggagacacagaactgtcagcatgtgttcagatatccagccatcttctcctgatatagaagttacttcacaacaaaatgatattgaaaatactgtacttacaatagaaccagaaactgaaactgcactagcagaaataattactgaaactgaagttccagcacttaataaatgtcctaccaagtaccccaaaacaaagaagcacttggttaatgaatggttaagtgagaagaatgagaagacaggaaaaccttcagatggcctttcagaaaggcctctacgcataactacagatcctgaagtgttagctacacaactcaattctttaccaggtctcacttacagcccccatgtatactccactcctaagcattatattagatttacttcaccattcctttcagaaaaaaggagaagaaaagaacctactgaaaacatttctggttcatgcaagaagcgatggttgaaacaagctctggaagaagaaaattcagcaattttacatagatttaattcaccctgtcaagaaagatccagaagtcctgcagtcaatggtgaaaataaaagtccactactattaaatgacagctgttcccttccagatttaactacaccactaaaaaaacgaagattttatcagttgctagattcggtttactcagaaacctccacacctactccttccccgtatgctacaccaactcacaccgatattactcctatggacccatcttttgccacgcctccacggataaaatcagatgatgaaacttgtagaaatggttataaacccatatattcaccagttaccccagtaactcctggtacaccaggaaataccatgcactttgagaatatttcttccccagaaagttctccagaaataaagagacgcacttatagtcaagagggatatgacagatcttcaaccatgttaacattggggccttttagaaattctaatttaactgaactgggtctgcaagaaataaagactattggttatacgagccctaggagtaggactgaagtcaacaggcagtgtcctggagaaaaggaacctgtgtcagaccttcagctaggactcgatgcagttgagccaactgccctacataaaaccctggaaacgcctgcacatgacagggctgagcccaacagccaactggactcgactcactctggacggggcacaatgtattcttcctgggtaaagagccctgacagaacaggagttaacttctcagtgaactccaacttgagggacctgacaccctcgcatcagttggaggttggaggaggcttccgaataagtgagtcaaagtgcctgatgcaggatgatactagaggcatgtttatggaaacaactgtgttttgtacttccgaagatgggcttgtatctggtttcggacggactgttaatgacaatttgatcgacgggaattgcacaccccagaatccaccacaaaagaaaaaggtttctctattagaataccgtaagagacaacgtgaagctaggaaaagtggctctaagacagagaactttccactcattagtgtatcaccccatgcaagtggaagcttgagcaacaatggtgatggctgtgccagcagtaatgacaatggggagcaggtggaccacactgctagcctacctttaccaacaccagctacagtttataatgccacttctgaagaaactagcaataactgccctgttaaggatgctactgctagtgagaagaatgaaccagaagttcaatggactgcctcaacttcagtggaacaagtcagagaaaggagttatcagagagctttacttctcagtgatcaccgaaaagataaagatagtgggggagaatcaccatgtgtctcatgttcaccgagtcatgttcagtcttcaccttcatctcattcaaatcacataccccagttgcaagctaagggcccagtcccttctttcagtgaacttatggaagaccctgatcctgaaaatccagaacccacaactacgaatgaatgtccatccccagatacttctcaaaatacttgtaaaagtcctccaaaaatgagcaagcctggttcacctggatctgtaattcctgctcaagcacacgggaaaatattcacaaaaccagatccccaatgggactccacagttagtgcatccgaagctgaaaatggtgttcacctaaaaacagagctccaacaaaaacagctatcaaataacaaccaagcactttcaaagaatcatcctcctcagacacacgttcgtaattcatctgagcaactttcacaaaagctgccttctgtgccaacaaagttgcactgtcctccatcacctcacctagaaaatcctccaaagtcatccacgcctcacacacctgtacagcatggttatctttcaccaaagcctccttcacagcagttaggatctccctacaggcctcatcattcacagtcacctcaagttggaacacctcagcgagagcctcaaagaaacttttatccagcagcacagaaccttccagccaatactcagcaggcaacttctggaacattatttacacagacaccctcaggacaatcttcagcaacatacagtcagtttaaccaacaaagtctgaacagcacggcaccaccccctccacctcctccacctccttcttcgtcttactatcaaaaccagcagccctctgcaaactttcagaattataatcagctcaaaggtagtctttctcaacaaactgtgtttacatcaggaccaaatcaagcacttcctggcaccacaagccagcaaacagttccaggacaccacgtgactccagggcattttttgccctctcagaaccctaccattcaccatcaaactgctgctgccgtagtcccccctcctcctccaccaccacctgctccaggaccgcaccttgtacaacagccgaattcccatcagcaacactctgtagcacatgtagtagggcctgttcatgcggtcacccctgggtcgcatattcattctcaaactgctggacaccacttacccccacccccaccccctcctggtcctgcccctcatcaccatccaccaccccatccatccacaggactccaaggtctacaagcacaacaccagcatgttgtaaattcagcacccccaccaccccctccgccgccaccttccagtgttttggcttctgggcatcataccacatcagctcaagccttacaccacccacctcatcaaggacctccactttttccttcgagtgctcatccaactgtaccaccgtatccctcacaagctacacatcataccactttgggaccgggaccccagcaccagccttctggaacagggccacattgtccattacctgtcacaggtcctcatctccagccccaaggaccaaacagtattccaacacctactgcttcagggttctgtcctcatcctggctctgtggccctgccacatggggttcaaggacctcagcaggcatctccagtgcctggacagattccaattcacagagcacaggtgccaccaacatttcaaaacaattaccatgggtcagggtggcattaaaatggactccaaaaacatttttttaaatgttctgtaagataaactgtatatttcatatgtacctgttaaggtactttttaaagcttgtacatgaacctttgtataaaaaacaccagtgctctttcgttgtatttttctcatttttgctttttaaaattcctttaaaaaatgtgctgttaagccagtattaggtatctttattttgtaagtgaacattccagctgtttttttctggcagatctgatgctgatttgatgctgtatgatcttttttttttttttagttaaattcatttagtgaatgttctattattttatacatacacattaagtactcagctaagtaatggcactatgaggattttttttttctttcctgtcagcagcagttctgtgaatgcatcttaggtataaaaatgcaatacagatttttatattttggtgtggacatggctcattttgttttaccagttatttgcaagcaaaatgtaatttaatgtatagatgatttctaatgtctcctgacaaactgtaaatactgcatttcttttgcgtatataattgcttacagcttttctcatttgatatatagcattgtacatatgacaagtcttttgcaaaactgtgtgatctttgtgaaagtagtacagtatatgacctttaatttcttttttattttaaatatactgtcacactgaagcactggttgggcattttaattcatgttaataaatcacaattatgtcagttttaaaaaaaaaaa

SEQ ID NO: 12654 - DNA, 6725 bp, Homo sapiens
cgccgccattttcccagagcgagaggcagtgacactgagcgggcgcagggggccgagtcggagaccgtgccggagttcgggagcggcaacagagtgggcatagacactccgagcagcctcgccgtcgtctctgcgttcctgttgactgcctggctgccccctcccctactcctcggttcctggtgaagaggctgcgcgctgctgtttggggagggggtgtgtggagccgggtcctgtgtccgcagtggctgctgtcggggggtcgcctgttcgcggaggtgcggagagactccttgggggtcgagcactgtggctggcatgccccagtgttttggataccaatgcataggactccatagtaatcgaatttaccagaggcgaacgtcatgagcatagtgatcccattgggggttgatacagcagagacgtcatacttggaaatggctgcaggttcagaaccagaatccgtagaagctagccctgtggtagttgagaaatccaacagttatccccaccagttatataccagcagctcacatcattcacacagttacattggtttgccctatgcggaccataattatggtgctcgtcctcctccgacacctccggcttcccctcctccatcagtccttattagcaaaaatgaagtaggcatatttaccactcctaattttgatgaaacttccagtgctactacaatcagcacatctgaggatggaagttatggtactgatgtaaccaggtgcatatgtggttttacacatgatgatggatacatgatctgttgtgacaaatgcagcgtttggcaacatattgactgcatggggattgataggcagcatattcctgatacatatctatgtgaacgttgtcagcctaggaatttggataaagagagggcagtgctactacaacgccggaaaagggaaaatatgtcagatggtgataccagtgcaactgagagtggtgatgaggttcctgtggaattatatactgcatttcagcatactccaacatcaattactttaactgcttcaagagtttccaaagttaatgataaaagaaggaaaaaaagcggggagaaagaacaacacatttcaaaatgtaaaaaggcatttcgtgaaggatctaggaagtcatcaagagttaagggttcagctccagagattgatccttcatctgatggttcaaattttggatgggagacaaagatcaaagcatggatggatcgatatgaagaagcaaataacaaccagtacagtgagggtgttcagagggaggcacaaagaatagctctgagattaggcaatggaaatgacaaaaaagagatgaataaatccgatttgaataccaacaatttgctcttcaaacctcctgtagagagccatatacaaaagaataagaaaattcttaaatctgcaaaagatttgcctcctgatgcacttatcattgaatacagagggaagtttatgctgagagaacagtttgaagcaaatgggtatttctttaaaagaccatacccttttgtgttattctactctaaatttcatgggctagaaatgtgtgttgatgcaaggacttttgggaatgaggctcgattcatcaggcggtcttgtacacccaatgcagaggtgaggcatgaaattcaagatggaaccatacatctttatatttattctatacacagtattccaaagggaactgaaattactattgcctttgattttgactatggaaattgtaagtacaaggtggactgtgcatgcctcaaagaaaacccagagtgccctgttctaaaacgtagttctgaatccatggaaaatatcaatagtggttatgagaccagacggaaaaaaggaaaaaaagacaaagatatttcaaaagaaaaagatacacaaaatcagaatattactttggattgtgaaggaacgaccaacaaaatgaagagcccagaaactaaacaaagaaagctttctccactgagactatcagtatcaaataatcaggaaccagattttattgatgatatagaagaaaaaactcctattagtaatgaagtagaaatggaatcagaggagcagattgcagaaaggaaaaggaagatgacaagagaagaaagaaaaatggaagcaattttgcaagcttttgccagacttgaaaagagagagaaaagaagagaacaagctttggaaaggatcagcacagccaaaactgaagttaaaactgaatgtaaagatacacagattgtcagtgatgctgaagttattcaggaacaagcaaaagaagaaaatgctagcaagccaacccctgccaaagtaaatagaactaaacagagaaaaagtttttctcggagtaggactcacattggacagcagcgtcggagacacagaactgtcagcatgtgttcagatatccagccatcttctcctgatatagaagttacttcacaacaaaatgatattgaaaatactgtacttacaatagaaccagaaactgaaactgcactagcagaaataattactgaaactgaagttccagcacttaataaatgtcctaccaagtaccccaaaacaaagaagcacttggttaatgaatggttaagtgagaagaatgagaagacaggaaaaccttcagatggcctttcagaaaggcctctacgcataactacagatcctgaagtgttagctacacaactcaattctttaccaggtctcacttacagcccccatgtatactccactcctaagcattatattagatttacttcaccattcctttcagaaaaaaggagaagaaaagaacctactgaaaacatttctggttcatgcaagaagcgatggttgaaacaagctctggaagaagaaaattcagcaattttacatagatttaattcaccctgtcaagaaagatccagaagtcctgcagtcaatggtgaaaataaaagtccactactattaaatgacagctgttcccttccagatttaactacaccactaaaaaaacgaagattttatcagttgctagattcggtttactcagaaacctccacacctactccttccccgtatgctacaccaactcacaccgatattactcctatggacccatcttttgccacgcctccacggataaaatcagatgatgaaacttgtagaaatggttataaacccatatattcaccagttaccccagtaactcctggtacaccaggaaataccatgcactttgagaatatttcttccccagaaagttctccagaaataaagagacgcacttatagtcaagagggatatgacagatcttcaaccatgttaacattggggccttttagaaattctaatttaactgaactgggtctgcaagaaataaagactattggttatacgagccctaggagtaggactgaagtcaacaggcagtgtcctggagaaaaggaacctgtgtcagaccttcagctaggactcgatgcagttgagccaactgccctacataaaaccctggaaacgcctgcacatgacagggctgagcccaacagccaactggactcgactcactctggacggggcacaatgtattcttcctgggtaaagagccctgacagaacaggagttaacttctcagtgaactccaacttgagggacctgacaccctcgcatcagttggaggttggaggaggcttccgaataagtgagtcaaagtgcctgatgcaggatgatactagaggcatgtttatggaaacaactgtgttttgtacttccgaagatgggcttgtatctggtttcggacggactgttaatgacaatttgatcgacgggaattgcacaccccagaatccaccacaaaagaaaaaggtttctctattagaataccgtaagagacaacgtgaagctaggaaaagtggctctaagacagagaactttccactcattagtgtatcaccccatgcaagtggaagcttgagcaacaatggtgatggctgtgccagcagtaatgacaatggggagcaggtggaccacactgctagcctacctttaccaacaccagctacagtttataatgccacttctgaagaaactagcaataactgccctgttaaggatgctactgctagtgagaagaatgaaccagaagttcaatggactgcctcaacttcagtggaacaagtcagagaaaggagttatcagagagctttacttctcagtgatcaccgaaaagataaagatagtgggggagaatcaccatgtgtctcatgttcaccgagtcatgttcagtcttcaccttcatctcattcaaatcacataccccagttgcaagctaagggcccagtcccttctttcagtgaacttatggaagaccctgatcctgaaaatccagaacccacaactacgaatgaatgtccatccccagatacttctcaaaatacttgtaaaagtcctccaaaaatgagcaagcctggttcacctggatctgtaattcctgctcaagcacacgggaaaatattcacaaaaccagatccccaatgggactccacagttagtgcatccgaagctgaaaatggtgttcacctaaaaacagagctccaacaaaaacagctatcaaataacaaccaagcactttcaaagaatcatcctcctcagacacacgttcgtaattcatctgagcaactttcacaaaagctgccttctgtgccaacaaagttgcactgtcctccatcacctcacctagaaaatcctccaaagtcatccacgcctcacacacctgtacagcatggttatctttcaccaaagcctccttcacagcagttaggatctccctacaggcctcatcattcacagtcacctcaagttggaacacctcagcgagagcctcaaagaaacttttatccagcagcacagaaccttccagccaatactcagcaggcaacttctggaacattatttacacagacaccctcaggacaatcttcagcaacatacagtcagtttaaccaacaaagtctgaacagcacggcaccaccccctccacctcctccacctccttcttcgtcttactatcaaaaccagcagccctctgcaaactttcagaattataatcagctcaaaggtagtctttctcaacaaactgtgtttacatcaggaccaaatcaagcacttcctggcaccacaagccagcaaacagttccaggacaccacgtgactccagggcattttttgccctctcagaaccctaccattcaccatcaaactgctgctgccgtagtcccccctcctcctccaccaccacctgctccaggaccgcaccttgtacaacagccgaattcccatcagcaacactctgtagcacatgtagtagggcctgttcatgcggtcacccctgggtcgcatattcattctcaaactgctggacaccacttacccccacccccaccccctcctggtcctgcccctcatcaccatccaccaccccatccatccacaggactccaaggtctacaagcacaacaccagcatgttgtaaattcagcacccccaccaccccctccgccgccaccttccagtgttttggcttctgggcatcataccacatcagctcaagccttacaccacccacctcatcaaggacctccactttttccttcgagtgctcatccaactgtaccaccgtatccctcacaagctacacatcataccactttgggaccgggaccccagcaccagccttctggaacagggccacattgtccattacctgtcacaggtcctcatctccagccccaaggaccaaacagtattccaacacctactgcttcagggttctgtcctcatcctggctctgtggccctgccacatggggttcaaggacctcagcaggcatctccagtgcctggacagattccaattcacagagcacaggtgccaccaacatttcaaaacaattaccatgggtcagggtggcattaaaatggactccaaaaacatttttttaaatgttctgtaagataaactgtatatttcatatgtacctgttaaggtactttttaaagcttgtacatgaacctttgtataaaaaacaccagtgctctttcgttgtatttttctcatttttgctttttaaaattcctttaaaaaatgtgctgttaagccagtattaggtatctttattttgtaagtgaacattccagctgtttttttctggcagatctgatgctgatttgatgctgtatgatcttttttttttttttagttaaattcatttagtgaatgttctattattttatacatacacattaagtactcagctaagtaatggcactatgaggattttttttttctttcctgtcagcagcagttctgtgaatgcatcttaggtataaaaatgcaatacagatttttatattttggtgtggacatggctcattttgttttaccagttatttgcaagcaaaatgtaatttaatgtatagatgatttctaatgtctcctgacaaactgtaaatactgcatttcttttgcgtatataattgcttacagcttttctcatttgatatatagcattgtacatatgacaagtcttttgcaaaactgtgtgatctttgtgaaagtagtacagtatatgacctttaatttcttttttattttaaatatactgtcacactgaagcactggttgggcattttaattcatgttaataaatcacaattatgtcagttttaaaaaaaaaaa

SEQ ID NO: 12655 - DNA, 3097 bp, Homo sapiens
gccagacaaagcccgagatggcgaagcggagcgacggctaatggcgagccccacgcgccgcgctccgcccgccccgctccggtgaggtggctttgaccccgggttgcccggccagcacgaccgaggaggtggctggacagctggaggatgaacggagaagccgactgccccacagacctggaaatggccgcccccaaaggccaagaccgttggtcccaggaagacatgctgactttgctggaatgcatgaagaacaaccttccatccaatgacagctccaagttcaaaaccaccgaatcacacatggactgggaaaaagtagcatttaaagacttttctggagacatgtgcaagctcaaatgggtggagatttctaatgaggtgaggaagttccgtacattgacagaattgatcctcgatgctcaggaacatgttaaaaatccttacaaaggcaaaaaactcaagaaacacccagacttcccaaagaagcccctgaccccttatttccgcttcttcatggagaagcgggccaagtatgcgaaactccaccctgagatgagcaacctggacctaaccaagattctgtccaagaaatacaaggagcttccggagaagaagaagatgaaatatattcaggacttccagagagagaaacaggagttcgagcgaaacctggcccgattcagggaggatcaccccgacctaatccagaatgccaagaaatcggacatcccagagaagcccaaaaccccccagcagctgtggtacacccacgagaagaaggtgtatctcaaagtgcggccagatgccactacgaaggaggtgaaggactccctggggaagcagtggtctcagctctcggacaaaaagaggctgaaatggattcataaggccctggagcagcggaaggagtacgaggagatcatgagagactatatccagaagcacccagagctgaacatcagtgaggagggtatcaccaagtccaccctcaccaaggccgaacgccagctcaaggacaagtttgacgggcgacccaccaagccacctccgaacagctactcgctgtactgcgcagagctcatggccaacatgaaggacgtgcccagcacagagcgcatggtgctgtgcagccagcagtggaagctgctgtcccagaaggagaaggacgcctatcacaagaagtgtgatcagaaaaagaaagattacgaggtggagctgctccgtttcctcgagagcctgcctgaggaggagcagcagcgggtcttgggggaagagaagatgctgaacatcaacaagaagcaggccaccagccccgcctccaagaagccagcccaggaagggggcaagggcggctccgagaagcccaagcggcccgtgtcggccatgttcatcttctcggaggagaaacggcggcagctgcaggaggagcggcctgagctctccgagagcgagctgacccgcctgctggcccgaatgtggaacgacctgtctgagaagaagaaggccaagtacaaggcccgagaggcggcgctcaaggctcagtcggagaggaagcccggcggggagcgcgaggaacggggcaagctgcccgagtcccccaaaagagctgaggagatctggcaacagagcgttatcggcgactacctggcccgcttcaagaatgaccgggtgaaggccttgaaagccatggaaatgacctggaataacatggaaaagaaggagaaactgatgtggattaagaaggcagccgaagaccaaaagcgatatgagagagagctgagtgagatgcgggcacctccagctgctacaaattcttccaagaagatgaaattccagggagaacccaagaagcctcccatgaacggttaccagaagttctcccaggagctgctgtccaatggggagctgaaccacctgccgctgaaggagcgcatggtggagatcggcagtcgctggcagcgcatctcccagagccagaaggagcactacaaaaagctggccgaggagcagcaaaagcagtacaaggtgcacctggacctctgggttaagagcctgtctccccaggaccgtgcagcatataaagagtacatctccaataaacgtaagagcatgaccaagctgcgaggcccaaaccccaaatccagccggactactctgcagtccaagtcggagtccgaggaggatgatgaagaggatgaggatgacgaggacgaggatgaagaagaggaagatgatgagaatggggactcctctgaagatggcggcgactcctctgagtccagcagcgaggacgagagcgaggatggggatgagaatgaagaggatgacgaggacgaagacgacgacgaggatgacgatgaggatgaagataatgagtccgagggcagcagctccagctcctcctcctcaggggactcctcagactctgactccaactgaggctcagccccaccccagggcagccagggagagcccaggagctcccctccccaactgaccacctttgtttctcccccatgttctgtcccttgcccccctggcctcccccactttctttctttctttaaaaaaaaaaaaaaaaatacggtgggggtagggggctggaggagcccaggccaggactctgcagcctcagagacatcagcccttgggggtcctcctccagggacagcaactatcagactaagccagcaccggaccagcctggcccaccccacccacttctgcacttgcggttccggcatggacaatggaccggagagtgggggtggggggtcccaaagagtttgatgaggccctccacacctgcggcccaatccaaggtggggtggaagcttggggaagacccattccttcccagaggggcctgccacctggacccctgcattggaactggaggcagggaacatggggaggaggagggtcggtgccttcaagaaaacaggcactgccctggtggccctctcccctgccccctgcaggaaggagctgcctggacccgttcatgggggagggggcagaagtgttttttatatatgtgtatatatttttttttaagctctgagctgtcaacgagacgtttcctaccgaaaaa

SEQ ID NO: 12656 - DNA, 5963 bp, Homo sapiens
ttttttttttttttttgcttaaaaaaaagccatgacggctctcccacaattcatcttccctgcgccatctttgtattatttctaatttattttggatgtcaaaaggcactgatgaagatattttctctggagtctccttctttctaacccggctctcccgatgtgaaccgagccgtcgtccgcccgccgccgccgccgccgccgccgccgcccgccccgcagcccaccatgtctcgccgcaagcaaggcaaaccccagcacttaagcaaacgggaattctcgcccgagcctcttgaagccattcttacagatgatgaaccagaccacggcccgttgggagctccagaaggggatcatgacctcctcacctgtgggcagtgccagatgaacttcccattgggggacattcttatttttatcgagcacaaacggaaacaatgcaatggcagcctctgcttagaaaaagctgtggataagccaccttccccttcaccaatcgagatgaaaaaagcatccaatcccgtggaggttggcatccaggtcacgccagaggatgacgattgtttatcaacgtcatctagaggaatttgccccaaacaggaacacatagcagataaacttctgcactggaggggcctctcctcccctcgttctgcacatggagctctaatccccacgcctgggatgagtgcagaatatgccccgcagggtatttgtaaagatgagcccagcagctacacatgtacaacttgcaaacagccattcaccagtgcatggtttctcttgcaacacgcacagaacactcatggattaagaatctacttagaaagcgaacacggaagtcccctgaccccgcgggttggtatcccttcaggactaggtgcagaatgtccttcccagccacctctccatgggattcatattgcagacaataacccctttaacctgctaagaataccaggatcagtatcgagagaggcttccggcctggcagaagggcgctttccacccactccccccctgtttagtccaccaccgagacatcacttggacccccaccgcatagagcgcctgggggcggaagagatggccctggccacccatcacccgagtgcctttgacagggtgctgcggttgaatccaatggctatggagcctcccgccatggatttctctaggagacttagagagctggcagggaacacgtctagcccaccgctgtccccaggccggcccagccctatgcaaaggttactgcaaccattccagccaggtagcaagccgcccttcctggcgacgccccccctccctcctctgcaatccgcccctcctccctcccagcccccggtcaagtccaagtcatgcgagttctgcggcaagacgttcaaatttcagagcaacctggtggtgcaccggcgcagccacacgggcgagaagccctacaagtgcaacctgtgcgaccacgcgtgcacccaggccagcaagctgaagcgccacatgaagacgcacatgcacaaatcgtcccccatgacggtcaagtccgacgacggtctctccaccgccagctccccggaacccggcaccagcgacttggtgggcagcgccagcagcgcgctcaagtccgtggtggccaagttcaagagcgagaacgaccccaacctgatcccggagaacggggacgaggaggaagaggaggacgacgaggaagaggaagaagaggaggaagaggaggaggaggagctgacggagagcgagagggtggactacggcttcgggctgagcctggaggcggcgcgccaccacgagaacagctcgcggggcgcggtcgtgggcgtgggcgacgagagccgcgccctgcccgacgtcatgcagggcatggtgctcagctccatgcagcacttcagcgaggccttccaccaggtcctgggcgagaagcataagcgcggccacctggccgaggccgagggccacagggacacttgcgacgaagactcggtggccggcgagtcggaccgcatagacgatggcactgttaatggccgcggctgctccccgggcgagtcggcctcggggggcctgtccaaaaagctgctgctgggcagccccagctcgctgagccccttctctaagcgcatcaagctcgagaaggagttcgacctgcccccggccgcgatgcccaacacggagaacgtgtactcgcagtggctcgccggctacgcggcctccaggcagctcaaagatcccttccttagcttcggagactccagacaatcgccttttgcctcctcgtcggagcactcctcggagaacgggagcttgcgcttctccacaccgcccggggagctggacggagggatctcggggcgcagcggcacgggaagtggagggagcacgccccatattagtggtccgggcccgggcaggcccagctcaaaagagggcagacgcagcgacacttgtgagtactgtgggaaagtcttcaagaactgtagcaatctcactgtccacaggagaagccacacgggcgaaaggccttataaatgcgagctgtgcaactatgcctgtgcccagagtagcaagctcaccaggcacatgaaaacgcatggccaggtggggaaggacgtttacaaatgtgaaatttgtaagatgccttttagcgtgtacagtaccctggagaaacacatgaaaaaatggcacagtgatcgagtgttgaataatgatataaaaactgaatagaggtatattaatacccctccctcactcccacctgacaccccctttttcaccactccccttccccatcgccctccagccccactccctgtaggatttttttctagtcccatgtgatttaaacaaacaaacaaacaaacagaagtaacgaagctaagaatatgagagtgcttgtcaccagcacacctgttttttttctttttctttttcttttttctttttccttttttttttttttcctttatgttctcaccgtttgaatgcatgatctgtatggggcaatactattgcattttacgcaaactttgagcctttctcttgtgcaataatttacatgttgtgtatgtttttttttaaacttagacagcatgtatggtatgttatggctattttaaattgtccctaattcgttgctgagcaaacatgttgctgtttccagttccgttctgagagaaaaagagagagagagagaaaaagaccatgctgcatacattctgtaatacatatcatgtacagttttattttataacgtgaggaggaaaaacagtctttggattaaccctctatagacagaatagatagcactgaaaaaaaatctctatgagctaaatgtctgtctctaaagggttaaatgtatcaattggaaaggaagaaaaaaggccttgaattgacaaattaacagaaaaacagaacaagtttattctatcatttggttttaaaatatgagtgccttggatctattaaaaccacatcgatggttctttctacttgttataaacttgtagcttaattcagcattgggtgaggtaataaaccttaggaactagcatataattctatattgtatttctcacaacaatggctacctaaaaagatgacccattatgtcctagttaatcatcatttttcctttagtttaattttataaacaaaactgattataccagtataaaagctactttgctcctggtgagagcttaaaagaaatgggctgttttgcccaaagttttattttttttaaacaatgattaaattgaatgtgtaatgtgcaaaagccctggaacgcaattaaatacactagtaaggagttcattttatgaagatatttgctttaataatgtctttttaaaaatactggcaccaaaagaaatagatccagatctacttggttgtcaagtggacaatcaaatgataaactttaagaccttgtataccatattgaaaggaagaggctgacaataaggtttgacagaggggaacagaagaaaataatatgatttattagcacaacgtggtactatttgccatttaaaactagaacaggtatataagctaatattgatacaatgatgattaactatgaattcttaagacttgcatttaaatgtgacattcttaaaaaaagaagagaaagaattttaagagtagcagtatatatgtctgtgctccctaaaagttgtacttcatttcttttccatacactgtgtgctatttgtgttaacatggaagaggattcattgtttttatttttatttttttaattttttcttttttattaagctagcatctgccccagttggtgttcaaatagcacttgactctgcctgtgatatctgtatcttttctctaatcagagatacagaggttgagtataaaataaacctgctcagataggacaattaagtgcactgtacaattttcccagtttacaggtctatacttaagggaaaagttgcaagaatgctgaaaaaaaattgaacacaatctcattgaggagcattttttaaaaactaaaaaaaaaaaaactttgccagccatttacttgactattgagcttacttacttggacgcaacattgcaagcgctgtgaatggaaacagaatacacttaacatagaaatgaatgattgctttcgcttctacagtgcaaggatttttttgtacaaaacttttttaaatataaatgttaagaaaaattttttttaaaaaacacttcattatgtttaggggggaactgcattttagggttccattgtcttggtggtgttacaagacttgttatccatttaaaaatggtagtggaaattctatgccttggatacacaccgctcttcaggttgtaaaaaaaaaaaacatacattggggaaaggtttaagattatatagtacttaaatataggaaaatgcacactcatgttgattcctatgctaaaatacatttatggtcttttttctgtatttctagaatggtatttgaattaaatgttcatctagtgttaggcactatagtatttatattgaagcttgtatttttaactgttgcttgttctcttaaaaggtatcaatgtaccttttttggtagtggaaaaaaaaaagacaggctgccacagtatatttttttaatttggcaggataatatagtgcaaattatttgtatgcttcaaaaaaaaaaaaaagagagaaacaaaaaagtgtgacattacagatgagaagccatataatggcggtttgggggagcctgctagaatgtcacatggatggctgtcataggggttgtacatatccttttttgttcctttttcctgctgccatactgtatgcagtactgcaagctaataacgttggtttgttatgtagtgtgctttttgtccctttccttctatcaccctacattccagcatcttaccttcatatgcagtaaaagaaagaaagaaaaaaaaaggaaaaaaaaaaaaaaaccaatgttttgcagtttttttcattgccaaaaactaaatggtgctttatatttagattggaaagaatttcatatgcaaagcatattaaagagaaagcccgctttagtcaatacttttttgtaaatggcaatgcagaatattttgttattggccttttctattcctgtaatgaaagctgtttgtcgtaacttgaaattttatcttttactatgggagtcactatttattattgcttatgtgccctgttcaaaacagaggcacttaatttgatcttttatttttctttgtttttatttttttttttatttagatgaccaaaggtcattacaacctggctttttattgtatttgtttctggtctttgttaagttctattggaaaaaccactgtctgtgtttttttggcagttgtctgcattaacctgttcatacacccattttgtccctttattgaaaaaataaaaaaaattaaaagtacaaaaaaaaaaaaaaaaa

SEQ ID NO: 12657 - DNA, 3958 bp, Homo sapiens
ttttttttttttttttgcttaaaaaaaagccatgacggctctcccacaattcatcttccctgcgccatctttgtattatttctaatttattttggatgtcaaaaggcactgatgaagatattttctctggagtctccttctttctaacccggctctcccgatgtgaaccgagccgtcgtccgcccgccgccgccgccgccgccgccgccgcccgccccgcagcccaccatgtctcgccgcaagcaaggcaaaccccagcacttaagcaaacgggaattctcgcccgagcctcttgaagccattcttacagatgatgaaccagaccacggcccgttgggagctccagaaggggatcatgacctcctcacctgtgggcagtgccagatgaacttcccattgggggacattcttatttttatcgagcacaaacggaaacaatgcaatggcagcctctgcttagaaaaagctgtggataagccaccttccccttcaccaatcgagatgaaaaaagcatccaatcccgtggaggttggcatccaggtcacgccagaggatgacgattgtttatcaacgtcatctagaggaatttgccccaaacaggaacacatagcagataaacttctgcactggaggggcctctcctcccctcgttctgcacatggagctctaatccccacgcctgggatgagtgcagaatatgccccgcagggtatttgtaaagatgagcccagcagctacacatgtacaacttgcaaacagccattcaccagtgcatggtttctcttgcaacacgcacagaacactcatggattaagaatctacttagaaagcgaacacggaagtcccctgaccccgcgggttggtatcccttcaggactaggtgcagaatgtccttcccagccacctctccatgggattcatattgcagacaataacccctttaacctgctaagaataccaggatcagtatcgagagaggcttccggcctggcagaagggcgctttccacccactccccccctgtttagtccaccaccgagacatcacttggacccccaccgcatagagcgcctgggggcggaagagatggccctggccacccatcacccgagtgcctttgacagggtgctgcggttgaatccaatggctatggagcctcccgccatggatttctctaggagacttagagagctggcagggaacacgtctagcccaccgctgtccccaggccggcccagccctatgcaaaggttactgcaaccattccagccaggtagcaagccgcccttcctggcgacgccccccctccctcctctgcaatccgcccctcctccctcccagcccccggtcaagtccaagtcatgcgagttctgcggcaagacgttcaaatttcagagcaacctggtggtgcaccggcgcagccacacgggcgagaagccctacaagtgcaacctgtgcgaccacgcgtgcacccaggccagcaagctgaagcgccacatgaagacgcacatgcacaaatcgtcccccatgacggtcaagtccgacgacggtctctccaccgccagctccccggaacccggcaccagcgacttggtgggcagcgccagcagcgcgctcaagtccgtggtggccaagttcaagagcgagaacgaccccaacctgatcccggagaacggggacgaggaggaagaggaggacgacgaggaagaggaagaagaggaggaagaggaggaggaggagctgacggagagcgagagggtggactacggcttcgggctgagcctggaggcggcgcgccaccacgagaacagctcgcggggcgcggtcgtgggcgtgggcgacgagagccgcgccctgcccgacgtcatgcagggcatggtgctcagctccatgcagcacttcagcgaggccttccaccaggtcctgggcgagaagcataagcgcggccacctggccgaggccgagggccacagggacacttgcgacgaagactcggtggccggcgagtcggaccgcatagacgatggcactgttaatggccgcggctgctccccgggcgagtcggcctcggggggcctgtccaaaaagctgctgctgggcagccccagctcgctgagccccttctctaagcgcatcaagctcgagaaggagttcgacctgcccccggccgcgatgcccaacacggagaacgtgtactcgcagtggctcgccggctacgcggcctccaggcagctcaaagatcccttccttagcttcggagactccagacaatcgccttttgcctcctcgtcggagcactcctcggagaacgggagcttgcgcttctccacaccgcccggggagctggacggagggatctcggggcgcagcggcacgggaagtggagggagcacgccccatattagtggtccgggcccgggcaggcccagctcaaaagagggcagacgcagcgacacttgttcttcacacacccccattcggcgtagtacccagagagctcaagatgtgtggcagttttcggatggaagctcgagagcccttaagttctgagaaaatttgaagcccccaggggtggggtggacgcgtgccgcccagtcgacgtcagcgtggtctgtcatcctgctagtttgtgatgttttctgacagtagcctccaagaagccgttgtgcgaagacagagtcctgcagagtccttccagcctaggcctgcagcgccattttatttatattttttaataaaaagtaaaaacaaaaaaacagacccacattggaacagtgaatcagtcccatagagagggcccgtggaccatcgctgtcatgagtgatgccctggcccttctgaaaccagccaacctaattacctgtattgtggaaatgcgcatgagtccccaaccccttgtttctatacattctatgttgtcttttaaaaagtgtgcttaacattgacacaataaatgttggagctttaggtggtgtttgcttgttctttaatttttaatgcttataagacaatgaggctgcttatgattttgtacttctgtacctgtttcctacagacacccatcgggtgggtaggaggaacagatttgagaaatgggcaggagatgtaggaggggaactaggttaccgcttatcagatggcataaattttcaaggagaatcaaaatgcaaaacttgggaataaatcatagcaatatcataattaatgtagtagtaatattgctgtttattaatgctgaagtgtggttttcctaactgtctgacttataatttgcataccattaaataatgcataatatggcacgccgaatcctgtttttcaaatatatgcttttggtggctaccatgcaggatttgaatttgtcttttaatttagcttaggaaagaacatcactgggcgagcggtaaatcctaaagaaggtgataaatgtcagtagtttcttattaaatattctaattttaggttcccaaaccttcaggaaatatatcttaatgcagacaaacaaacataaaacttctttagtacttacatcaggaaatttggggcagattttagaggggggaaattataggaggaaagaagttcacatcagaacagacaatcacagcaatgctctattccttagaaattagtgccacaaataagttacatctacaaacaggtggtaaaaattctttctggcccagttaatttgcacagaacttttctcagtttggtattttttactgcttggagatccagaagagaattagaaacaacatagcaaattaaaataggtttgtcaataatagagctcagacacctgtgtgctgtagattcacatacaggccgtgaacctaagtggggaaaatcctacctatccaccttctggctagattacctagcttagtgaaaagatagccaaataattggcatgtgaattatttcctgcttattcataataaataatgactgtcta

SEQ ID NO: 12658 - DNA, 3976 bp, Homo sapiens
ttttttttttttttttgcttaaaaaaaagccatgacggctctcccacaattcatcttccctgcgccatctttgtattatttctaatttattttggatgtcaaaaggcactgatgaagatattttctctggagtctccttctttctaacccggctctcccgatgtgaaccgagccgtcgtccgcccgccgccgccgccgccgccgccgccgcccgccccgcagcccaccatgtctcgccgcaagcaaggcaaaccccagcacttaagcaaacgggaattctcgcccgagcctcttgaagccattcttacagatgatgaaccagaccacggcccgttgggagctccagaaggggatcatgacctcctcacctgtgggcagtgccagatgaacttcccattgggggacattcttatttttatcgagcacaaacggaaacaatgcaatggcagcctctgcttagaaaaagctgtggataagccaccttccccttcaccaatcgagatgaaaaaagcatccaatcccgtggaggttggcatccaggtcacgccagaggatgacgattgtttatcaacgtcatctagaggaatttgccccaaacaggaacacatagcagataaacttctgcactggaggggcctctcctcccctcgttctgcacatggagctctaatccccacgcctgggatgagtgcagaatatgccccgcagggtatttgtaaagatgagcccagcagctacacatgtacaacttgcaaacagccattcaccagtgcatggtttctcttgcaacacgcacagaacactcatggattaagaatctacttagaaagcgaacacggaagtcccctgaccccgcgggttggtatcccttcaggactaggtgcagaatgtccttcccagccacctctccatgggattcatattgcagacaataacccctttaacctgctaagaataccaggatcagtatcgagagaggcttccggcctggcagaagggcgctttccacccactccccccctgtttagtccaccaccgagacatcacttggacccccaccgcatagagcgcctgggggcggaagagatggccctggccacccatcacccgagtgcctttgacagggtgctgcggttgaatccaatggctatggagcctcccgccatggatttctctaggagacttagagagctggcagggaacacgtctagcccaccgctgtccccaggccggcccagccctatgcaaaggttactgcaaccattccagccaggtagcaagccgcccttcctggcgacgccccccctccctcctctgcaatccgcccctcctccctcccagcccccggtcaagtccaagtcatgcgagttctgcggcaagacgttcaaatttcagagcaacctggtggtgcaccggcgcagccacacgggcgagaagccctacaagtgcaacctgtgcgaccacgcgtgcacccaggccagcaagctgaagcgccacatgaagacgcacatgcacaaatcgtcccccatgacggtcaagtccgacgacggtctctccaccgccagctccccggaacccggcaccagcgacttggtgggcagcgccagcagcgcgctcaagtccgtggtggccaagttcaagagcgagaacgaccccaacctgatcccggagaacggggacgaggaggaagaggaggacgacgaggaagaggaagaagaggaggaagaggaggaggaggagctgacggagagcgagagggtggactacggcttcgggctgagcctggaggcggcgcgccaccacgagaacagctcgcggggcgcggtcgtgggcgtgggcgacgagagccgcgccctgcccgacgtcatgcagggcatggtgctcagctccatgcagcacttcagcgaggccttccaccaggtcctgggcgagaagcataagcgcggccacctggccgaggccgagggccacagggacacttgcgacgaagactcggtggccggcgagtcggaccgcatagacgatggcactgttaatggccgcggctgctccccgggcgagtcggcctcggggggcctgtccaaaaagctgctgctgggcagccccagctcgctgagccccttctctaagcgcatcaagctcgagaaggagttcgacctgcccccggccgcgatgcccaacacggagaacgtgtactcgcagtggctcgccggctacgcggcctccaggcagctcaaagatcccttccttagcttcggagactccagacaatcgccttttgcctcctcgtcggagcactcctcggagaacgggagcttgcgcttctccacaccgcccggggagctggacggagggatctcggggcgcagcggcacgggaagtggagggagcacgccccatattagtggtccgggcccgggcaggcccagctcaaaagagggcagacgcagcgacactttctccaacctctttctaggttcttcacacacccccattcggcgtagtacccagagagctcaagatgtgtggcagttttcggatggaagctcgagagcccttaagttctgagaaaatttgaagcccccaggggtggggtggacgcgtgccgcccagtcgacgtcagcgtggtctgtcatcctgctagtttgtgatgttttctgacagtagcctccaagaagccgttgtgcgaagacagagtcctgcagagtccttccagcctaggcctgcagcgccattttatttatattttttaataaaaagtaaaaacaaaaaaacagacccacattggaacagtgaatcagtcccatagagagggcccgtggaccatcgctgtcatgagtgatgccctggcccttctgaaaccagccaacctaattacctgtattgtggaaatgcgcatgagtccccaaccccttgtttctatacattctatgttgtcttttaaaaagtgtgcttaacattgacacaataaatgttggagctttaggtggtgtttgcttgttctttaatttttaatgcttataagacaatgaggctgcttatgattttgtacttctgtacctgtttcctacagacacccatcgggtgggtaggaggaacagatttgagaaatgggcaggagatgtaggaggggaactaggttaccgcttatcagatggcataaattttcaaggagaatcaaaatgcaaaacttgggaataaatcatagcaatatcataattaatgtagtagtaatattgctgtttattaatgctgaagtgtggttttcctaactgtctgacttataatttgcataccattaaataatgcataatatggcacgccgaatcctgtttttcaaatatatgcttttggtggctaccatgcaggatttgaatttgtcttttaatttagcttaggaaagaacatcactgggcgagcggtaaatcctaaagaaggtgataaatgtcagtagtttcttattaaatattctaattttaggttcccaaaccttcaggaaatatatcttaatgcagacaaacaaacataaaacttctttagtacttacatcaggaaatttggggcagattttagaggggggaaattataggaggaaagaagttcacatcagaacagacaatcacagcaatgctctattccttagaaattagtgccacaaataagttacatctacaaacaggtggtaaaaattctttctggcccagttaatttgcacagaacttttctcagtttggtattttttactgcttggagatccagaagagaattagaaacaacatagcaaattaaaataggtttgtcaataatagagctcagacacctgtgtgctgtagattcacatacaggccgtgaacctaagtggggaaaatcctacctatccaccttctggctagattacctagcttagtgaaaagatagccaaataattggcatgtgaattatttcctgcttattcataataaataatgactgtcta

SEQ ID NO: 12659 - DNA, 2248 bp, Homo sapiens
ggcagccgcagaagcggcagcggcggcggcgcggcgcaggcaccggcccggggagaggcaccatgagcggatcacagaacaatgacaaaagacaatttctgctggagcgactgctggatgcagtgaaacagtgccagatccgctttggagggagaaaggagattgcctcggattccgacagcagggtcacctgtctgtgtgcccagtttgaagccgtcctgcagcatggcttgaagaggagtcgaggattggcactcacagcggcagcgatcaagcaggcagcgggctttgccagcaaaaccgaaacagagcccgtgttctggtactacgtgaaggaggtcctcaacaagcacgagctgcagcgcttctactccctgcgccacatcgcctcagacgtgggccggggtcgcgcctggctgcgctgtgccctcaacgaacactccctggagcgctacctgcacatgctcctggccgaccgctgcaggctgagcactttttatgaagactggtcttttgtgatggatgaagaaaggtccagtatgcttcctaccatggcagcaggtctgaactccatactctttgcgattaacatcgacaacaaggatttggacgggcagagtaagtttgctcccaccgtttcagacctcttaaaggagtcaacgcagaacgtgacctccttgctgaaggagtccacgcaaggagtgagcagcctgttcagggagatcacagcctcctctgccgtctccatcctcatcaaacctgaacaggagaccgaccccttgcctgtcgtgtccaggaatgtcagtgctgatgccaaatgcaaaaaggagcggaagaagaagaagaaagtgaccaacataatctcatttgatgatgaggaagatgagcagaactctggggacgtgtttaaaaagacacctggggcaggggagagctcagaggacaactccgaccgctcctctgtcaatatcatgtccgcctttgaaagccccttcgggcctaactccaatggaagtcagagcagcaactcatggaaaattgattccctgtctttgaacggggagtttgggtaccagaagcttgatgtgaaaggcatcgatgatgaagatgtggatgaaaacgaagatgacgtgtatggaaactcatcaggaaggaagcacaggggccactcggagtcgcccgagaagtaagtttgtgtgtaaggtggagtctcaccgtcccccaggctggagtgccgtggcgtgatctcagctcactgcaacctccacctcccgggttcaggctattctcctgcctcagcctcccgagtagctgggattacaggcacctgtcaccacacccagctaatttttgtatttttagtggggatggggtttcaccatgttggccaggctggtctcaaactcctgacctcaggtgatctgcctgccttggcctcccagattgctgggtttacaggcatgagccaccacgcccagccttcccttgcacttttaatgagggggttaagttcactgttttctctttctatggtattgggtaaaataggtctgcaagctttatatttgcccagggtatcattcattcttcagttgttgatttaggagtgttatttggaaggagtattatttgctcttcccctgagaactgaaagaggggaagggagtacatttgagggcacttaatacaaagttaatgtcagaatgtgtgccttgaaattcttgctttatacatacatctgtcattttcatttcacagggttcacagggtttcacagtctgatgagactgtgcctgttattgttttttatttttactctggattttccttgcatctgacttgccactagcacaggaagctcaggacgaaggcagcgttaggagaatagttgtggtatggtgacttctgtgtttatctgcaggagtgtgaatagccgtaacttgcctgcacctgctgccttaacagtggagttggccaggcgcagtggctcacacctgtaatcccagcactttgggacaccagggtgggtggatcacctgaggtcaggagttctagaccagcctgaccaacatggtgaaaccccttctctacgtataaaaaaatacaaaattagccaggcatggtggtgcatgcctgtaactccagatacttgggatgctgaggcaggagaatcgcttgaatatgagaggcggagccaagatgatgccattgcactccagcctgggcaacaagagagaaggtccttctc

SEQ ID NO: 12660 - DNA, 5886 bp, Homo sapiens
gtgaggagggccggcggcggggcggacccctggcggtcctcctggctggggtccgcgcgctcgcggcagctccccgtggaggtcactgtccgtgccagtccctcccgctgtcccgccctctcccgctgccgccgccgccgccgccgcgcccgcctcagcgcccccactccgcgcttgggagcgaggagccgccagcgcccccgccccgccgccgccgcagcgccctcaggccgccattcgccaccgaaactttccagcgcccgcgctctctccgggactcggcggcggcggggcgggggcggcccgggggcggcgcgcggctgctccggggcgccgggccctcttcggccgccgcacggccgggactcggaggctgccggctggagggaggttcggagcgcggccgggcgcgcggcgccgccacaagttgcgctgctcgcgacgagatttccgtgagggtggaagaaaatcataccatatcagatgcctcgcagagcaccaggcccaccgtgaaaggctggtccctgcagacggcttcccatttttatgaccggatgctgggaagcctgctggtccacaggtccatacatgaagtcaccataaggagccctggcctccttgcagaaacatcgaggtgacatgtagcatgaccgagctcgctggcgcctcttcatcgtgctgccaccgccctgcaggaagaggggccatgcagtcagtcttgcaccactttcaacgtttgcgagggagagagggtggttcccacttcatcaacacctcatcgccgcgaggtgaggctaagatgagcataaccagtgacgaggtgaactttctggtgtatcggtatctccaggagtcaggtttttcccactcggctttcacgtttgggattgagagccacatcagccagtccaacatcaatgggacgctagtgccaccggccgccctcatctccattctccagaagggcctgcagtatgtagaggccgagatcagtatcaacgaggatggcacagtgttcgacggccgccccatagagtccctgtcactgatagacgccgtgatgcccgacgtggtgcagacgcggcagcaggcattccgagagaagctcgctcagcagcaagccagtgcggcggcggcggcggctgcggccacggcagcagcgacagcagccaccacgacctcagccggcgtttcccaccaaaatccatcgaagaacagagaggccacggtgaatggggaagagaacagagcacattcagtcaataatcacgcgaagccaatggaaatagatggagaggttgagattccatccagcaaagccacagtccttcggggccatgagtctgaggtgttcatttgtgcctggaatcctgtcagtgatttgctagcctccggatctggagactcaactgcaaggatatggaacctgaatgagaatagcaacgggggctccacccagctcgtgttgaggcactgtatacgagaggggggccatgacgtcccgagtaacaaagacgtcacctcactggactggaataccaatggaacactcttggctacgggttcatatgacggttttgcaagaatatggacggaagatggtaacctggccagcaccttaggccaacataaaggccccatctttgccttgaaatggaaccgaaaggggaattacattttgagtgctggtgtagacaaaacaacaataatttgggatgcccacacaggagaagccaaacagcagtttccttttcattcagcccctgcccttgatgtggactggcagaacaacacgacctttgcctcctgtagcacagacatgtgtatccatgtgtgcaggctcggctgtgaccgcccagtcaaaaccttccagggacacacaaacgaggtcaacgccatcaaatgggatccgtctggaatgttgctggcatcctgctcggatgacatgacattgaagatctggagcatgaaacaggaggtgtgcatccatgatcttcaggctcacaataaagagatctacaccatcaagtggagccccactgggcccgccaccagcaacccaaactccaacatcatgttggcaagtgcttcgtttgattctacggtgcgactgtgggacatagaacgaggcgtctgcacccacacgctcacgaagcatcaggagcctgtctatagcgtagctttcagccctgatgggaagtacttggccagtggatccttcgacaagtgcgtccatatctggaatactcagagtggaaatcttgtccacagctaccgaggcactggcggcatcttcgaggtgtgctggaacgcccgaggagacaaagtgggtgccagcgcgtccgacggctctgtgtgtgttttggatctgcggaagtaaccacaaaatattatcgaaaaaagaaaagaattctaatgaccagccgtgaatgtgtagggttgcagctctattctccaaaactgtaggaacttgacttgcgttagagtgtactctgaaaccaactcgtctctggccgcaggagtctatatgttttcgtaatcttcatcaagaagtttttaaaaggcaagcaaaaacagaagcaaatcatatcaaacggggatagaatggtttccactgaggacattcagcctgggaaggaggaagtcaccagctcgaggcgtgtggattggtttccacccggaacaggctctgtgatggctgaatggaaagaaacgtaaaaagctgtgccaaaaaaaaagcaaaatgctgtgataaaccaaacagggaagggggaaaaaccctcctccttgggatttttttttttttgttttccctaacaatttggacactacaattgctctcacaaaggaggttcaaagaccagtttgtaccgatgaaacgcgcaactttgtaatcccaacactttctattttctagaatcttctttgttcattgggtggtttttcagtcggctggaattctatcttctgggggccttccgtctgagatggaagctgtcttgggcttgttgtctcttccttctgttgctccctgcccctccccctgtctttccactctgtctggtgagctctgctttttcagtgcaccatcaagagatgcagccccgtggacatgaagacacaatctcccacggacagctttcccccttccgccctctcccaccctctcctccccttgcgctcgcgctcgcgctcgctttctcactggcgtgctctctttctctctctctctccctctgtacctttctcatagttgcttcagatcttaggtctcaagggcactttggcgcgtagtaagtgctttatgtaagaaggcagggcaggggggcctttttacaggagaaaaaaaaatgacttataagagaaagagcctggagtatttttggaaaaaaaaataatatttttatgttaaaacaattttaaaatcttaaaatggccatcagacatagagagctttgtgtgattcatgttttaaaaagaaccgaagaagccacaggcagggcctgagggagcccctggctttcccctcagcctcaggaaaggtggtcaggaaaactctggctggacaagggtcagtcttcggggtcagcagcgagattgctctgcagccagtgagggaggtccccgccatgccggctggaagaagaacctcgcatcttttggtgtgtatgcaccttggcagccagcaggaaagcagcgaagagccgcgcgccctctggcctcaagggagcattggcagaaccataaggtactgcagaagccgtcgaaaccgactgctcggctggattaggcgtgttggctacatctttcccacaaccgtataacgaccgatggtcatttctccaagagcaggcttggcgagtccttgcagagctgacatagaggcgcccgcatgtcacttagtctaacgctgacagaaatgaatgcagaaggaagattttcagtcctgaacgtgaattatagaggtagaacgtcgctaataatttctgccatcttcataatttctttgtctcacagaagactaggagaaagatcttttttaaataatctttttgctgtttttaaaaaattaaacaaggctttgtgttcctagaagagcttcatttcagtgaatctggtgacctccatctgcttgctgtcataacccgacacggacttatttttgtcattagcaagggggaaaaggccaaaggacaagggcctcttctcccattggttttcctgtgggcagaagggctgaggaagatggcccagcccgtgggggctgctgggtcaccagcagcgggtagggtgcaatctggtgtgtgttccagcagtgagacggtgttattgtgaaggtggcattcatctgcggagccaaaacccagccatcggggaagggtcagggcttctgtggaacttggaacgtgccaggaccacctgcaaaagccagggtgcgttgatcattctcagatcattgattggcctccacttgggtatgtgaattattcatgtcccagaagaccaaaaagtgctctggttctgagatgagtattttattcgtgttctgtttccgaaacacttagcaaagaaggtcacagtgatgtggagtcgccgcacccatctttgaagatagccagtgtccctggatgaggtgatgatttcccgtcccaaggactctgtgaagtttagagtacagtttgttggggtccaaaagacaccatctctaccccacccaaataaaaatgcactcatctctgtagaacatctgctgtcaaaggccagcctgtcgttagggcatggcttatgcttgacaaaccagtaacaactgtgggatggcgatggtgggatgtgtcgcaagcaattcactagacaatcttcacatgaatgtcggtagccagggtctctcccgagggatggctttagtcttgatgaatgtgaaccatgtcggaattgttaggtagaaacctgggctgggaggcctcggaccccaggctccatccctggcttccccagcctgcggccgcaagcaaaaccaagcgcgagatgcagctagcacccttcatatccatccccgttctcagcgggacaacaccatggacagccgttttcagagcctccagcatttgcacaccactactcaccctctctgctgctggcatgttggtagagtcatccctgtaatcaagaaatggcctgtggaatgttattgttcaacgttgtttacagctcttaaaacatggtgaggaatgcctaagtcttagtgaccaaacgtgaccttgaaagcagacatagcatgacagaccttcctagagtgtttggtcgggttcacagtgaccgagagtcaggtccagcacacacctgggaaagggatgctgccccaagggggaccaaaagggccggacgttacagggtgaaaccctctgacccctcgcgacaccgtaggacttgacttttgtttagtctttctaagaaatagatcatggagccaagtgaagtgcactttgtcaaatgtaagggtctgctttgttcttgttgcttttctgttttttaaccttttgttccgccatttaaaaaaagaaaaaaaaaaagcttatgtttcttgtcaaatgcagaaatgttccttccgccactcactgaagttttgcattctggcttgtgcagtttttattgtctgtgtcagacgtacagccagacatgttctctattggcatttttccgattctgttcagatgacagcgaccgccttttcattccccccgccacctgtactcaccctcacgctctttgaagaaaaaaaaaaaaaatcaccttgtgtgttgtagctcatttgtttcaagagagaatcaacagatcatattcagtgtcttgaataaattgctctattttgatattaaaaaaaaaaaa

SEQ ID NO: 12661 - DNA, 3471 bp, Homo sapiens
gtttccaaggaggtctgtacaaaaagccagacttctgctggcagttactgagagagataggctttccatccatggcagccatttacttttgctctgggagacgtttgtaatagaaaaggcacaactggggtatttattcattccccccgttcctctagtgtttggtggcgttgccgttgcaagtgcgcagggctaaaatgaactggttatcttaggatcatggaaaacctggaatcaaggctcaagaatgccccctattttcgttgtgagaagggaaccgattccatccctctatgccggaagtgtgagacgtgtgtcttagcctggaagatcttctctaccaaagagtggttctgcaggatcaatgacatatcacagaggaggtttctagttggcattctgaagcagttaaatagcttatatttgttacactatttccaaaatatccttcagaccacacagggaaaggatttcatctataacaggtcccggatcaacctcagcaagaaagaggggaaagttgtgaagtcctccttgaaccaaatgttggataaaacagtagaacagaagatgaaagagatcttgtactggtttgcgaacagcacccagtggaccaaggcgaattatactctcttactgctgcagatgtgcaaccccaaattactgctcactgctgccaatgtgatcagagtcctgtttctgagagaggagaacaatatctcagggctcaatcaagacatcacagatgtgtgtttttcccctgagaaagaccacagctccaagtctgcgacctcacaagtctattggacagccaaaactcagcacacatcccttcctttgtccaaagccccagaaaatgaacacttgcttggggcagcatctaaccctgaggaaccatggaggaattcactccggtgtatatccgaaatgaataggctgttttctggaaaaggagacataaccaagccagggtacgatccctgcaatctattggttgacctggatgacatcagagacctgtcttctgggttcagcaaatacctagacttcatccgttacctgcccatccacctctccaagtacattctaagtatgctggggtgtatgaggggatttcccagacacctcccatcttggcccagttctggggtttctgggtccatctttttttttccaggaatgctggatagacacaccctgaacaagtgcgcctctgtgagccagcactgggccgccatggctcaacaggtcaagatggacttgtcagcgcacggcttcattcagaaccagattaccttcttgcaggggtcctacacaagaggaattgatcctaattatgccaataaggtttctatcccagttcctaaaatggtagatgacgggaagagcatgcgtgtgaaacatccgaagtggaagctgagaacgaagaatgagtacaacctgtggactgcataccagaacgaggaaacgcagcaggtcctgatagaggagagaaatgttttctgtgggacctacaatgttcgcattctctctgacacgtgggatcaaaaccgagtcatccactattccgggggagatctgatagctgtgtcatctaatcgaaagatccatcttctggacatcatacaagtgaaagcgatacccgttgaattccgaggccatgctgggagtgtccgggccctcttcctgtgtgaggaggaaaactttctcctaagcgggagctatgacctaagtatcagatactgggatctgaaaagtggggtttgcacacgaatcttcggtggtcaccaggggactatcacttgcatggacttgtgtaagaacaggctcgtatctggaggaagagattgccaggtaaaagtatgggatgtagacacagggaagtgcctgaagacgtttagacacaaagaccccatcttggccaccaggatcaatgatacctacattgtgagcagctgtgagcgagggctggtgaaagtgtggcacattgccatggcccagttggtaaagactctcagtggccatgagggagccgtgaaatgcctgttctttgaccagtggcatctcctctcaggaagtactgatggcctggtcatggcctggagcatggtggggaagtacgagcgctgcctgatggccttcaagcatcccaaggaggtgctcgacgtgtccctcctcttcctccgggtcatcagcgcctgtgcagatggcaagatccgaatttacaatttcctcaacgggaactgtatgaaggtgttaaaagccaatggcagaggtgatcctgtgctgtccttctttattcagggcaacaggatggtggtcaacacagagagcaatgttctcatgttccagtttgagcacataaagtggcagtatgccgtggaaaaaacgaaacaaaagaagaataaggagaaagaggaggaaaaagaagaaaatagtctcatggaaattctctctaagtgtaatattcaggttcacagcccaagagagtctgtatccagtaaacaaactgtgatccaagagctcctaccaggcaaacctcccaagtcccgagtactcctgaagccggccaagttctcttcagatgatgtggagaaagcacaaaaacaaggacaattggaaactcctggaaaactgcccagtcacccaaagaaaaagtcttggaaaatccctatgtcacctgaccaattcctcctgactgttagcgccctgcagcacgcccataattccggggaatttgcctatccctgtaggccccaaacagaaattactgatgtctggggaccttcaatttcatacccaaggaaggtcttgaatttcaaaggaaaatcaatccaacgtgcagttgatcggttgagattgagcaatcctcctatagatgtgaaacgaaccagtattccccttgaaatccagaaactgcagcccaacttgaagatctctttgcacagtcctagagtccagtccaccataccccagcccatgattatccgctccaggttctctggcagcttaaagggtggagaccaagtgaccagttcaattgaaagggctgtgtgcagtacgggtcccctgaccagtatgcaggtcattaaaccaaaccgcatgctagctccacaagtgggcacagccaccctgtctcttaagaaagaacggcctcgcatctatacagcccttgatccttttagagtgaacactgagttcgtgctgttgaccgtgaaggaggagaaggagcaccaggaagccaagatgaaggaatatcaggccagggagtccactggagtggttgatccaggaaaagtcagcaaagctgcatggatcaggaagatcaaaggcctgcctattgataatttcacgaagcaagggaaaacagcggcccctgaacttggacaaaatgtatttatctaaaccagccttgggaaattacaatgttttacaataaacagaaagccaagcggaaaaaaaaaaaaaaaa

SEQ ID NO: 12662 - DNA, 1896 bp, Homo sapiens
atttcagcagctctcagggccttgggctcatcccgagtcccgggctcagtatgtggcgccttcctcgcgcgctgtgtgtgcacgctgcaaagaccagcaagctctctggaccttggagcaggcctgccgccttcatgtccactctcctcatcaatcagccccagtatgcgtggctgaaagagctggggctccgcgaggaaaacgagggcgtgtataatggaagctggggaggccggggagaggttattacgacctattgccctgctaacaacgagccaatagcaagagtccgacaggccagtgtggcagactatgaagaaactgtaaagaaagcaagagaagcatggaaaatctgggcagatattcctgctccaaaacgaggagaaatagtaagacagattggcgatgccttgcgggagaagatccaagtactaggaagcttggtgtctttggagatggggaaaatcttagtggaaggtgtgggtgaagttcaggagtatgtggatatctgtgactatgctgttggtttatcaaggatgattggaggacctatcttgccttctgaaagatctggccatgcactgattgagcagtggaatcccgtaggcctggttggaatcatcacggcattcaatttccctgtggcagtgtatggttggaacaacgccatcgccatgatctgtggaaatgtctgcctctggaaaggagctccaaccacttccctcattagtgtggctgtcacaaagataatagccaaggttctggaggacaacaagctgcctggtgcaatttgttccttgacttgtggtggagcagatattggcacagcaatggccaaagatgaacgagtgaacctgctgtccttcactgggagcactcaggtgggaaaacaggtgggcctgatggtgcaggagaggtttgggagaagtctgttggaacttggaggaaacaatgccattattgcctttgaagatgcagacctcagcttagttgttccatcagctctcttcgctgctgtgggaacagctggccagaggtgtaccactgcgaggcgactgtttatacatgaaagcatccatgatgaggttgtaaacagacttaaaaaggcctatgcacagatccgagttgggaacccatgggaccctaatgttctctatgggccactccacaccaagcaggcagtgagcatgtttcttggagcagtggaagaagcaaagaaagaaggtggcacagtggtctatgggggcaaggttatggatcgccctggaaattatgtagaaccgacaattgtgacaggtcttggccacgatgcgtccattgcacacacagagacttttgctccgattctctatgtctttaaattcaagaatgaagaagaggtctttgcatggaataatgaagtaaaacagggactttcaagtagcatctttaccaaagatctgggcagaatctttcgctggcttggacctaaaggatcagactgtggcattgtaaatgtcaacattccaacaagtggggctgagattggaggtgcctttggaggagaaaagcacactggtggtggcagggagtctggcagtgatgcctggaaacagtacatgagaaggtctacttgtactatcaactacagtaaagaccttcctctggcccaaggaatcaagtttcagtaaaggtgttttagatgaacatcccttaatttgaggtgttccagcagctgtttttggagaagacaaagaaaattaaagttttccctgaataaatgcattattatgactgtgacagtgactaatccccctatgaccccaaagccctgattaaatcaagagattccttttttaaaaatcaaaataaaattgttacaacatagccatagttactaaaaaaaaaaaaaaaaaa

SEQ ID NO: 12663 - DNA, 4318 bp, Homo sapiens
agcagcgctcatggcgaagaggcttaaggccacaaaaccgtgggacagcaggaggaagagaagccaggtatctccactccagctgccctgcctcagactcctcagtttcgcacgtgaggatcgtcttgcaggcactgactggagatggaatcctaaagcataggtgaagcggaaatcctccttcagggagagcccactgaggaagccagcggctagcacgaggcaggacaggatacctccctcttcgcccacggcggcctctctgtcatagtagccaccgttctgccactcatgcagctttctaagacacctctcggttccccagcgctttcagtggggcggccggccattcccgagggttgcaagaggaggcccggggtgctgagccagcctcgctgcccccgcgtagaaagccggcccgccggcgagagccagcctaaggcgcggacaaccaacgaggtgtcaggctcggcaggggattgcttctgtctggggcccggccgaggttgcgttcgtgcctcgcgcgcacacgctccgcgttcactcagccaatccggtgctactcgcgcgcccaggagcgatccgcggtcctactcaggctgggccggctccttcccgctcccaatactcagcacccgagctctcactcctcccctcactctccacgagttccacgcctaggggtgtagctccgcccttgtccccgagtccgcccccgcaacctccagagcgtgtgctatcctttcctctcagtcctgccatctagctgccttgggtctcgcgctccgcagagcgttccgacactctccggcctcgttctgccgcctccgcgcgctctccccgtgcggccaccgcgccccccaagcttgcctccttcttgccggacttggggccgcgcgccctgactccttcccctcccgcggacccgcgcactcccggcgcggcctctcccccacgcaggccaccgtgcactctgtggcctccccctccttccccgctctcctcgcgcttctctggctccctagctgtcgcgctctcctcggcgagcgcgctcccggcccgcgcgctccgggctccggtttctcccggctcctgtcagtgcggtgactgcgctgggaaacatggcgaccgagggaatgatccttactaaccacgaccatcaaatccgtgtcggagtccttacagtgagtgatagttgcttcaggaatcttgcagaagaccgcagtgggataaatctcaaagatctcgtacaagatccttctttgttgggtgggactatatcagcatacaagatagtaccagatgaaatagaagaaatcaaggaaaccctgatagattggtgtgatgaaaaggaacttaatttgatattaacaactggaggaacaggatttgcaccacgagatgtcactccagaggccacaaaagaagtaatagaacgggaagcaccagggatggccctggcaatgctgatgggatcacttaatgttacacctctgggcatgctctctaggcctgtatgtggaatcagagggaaaacgctcataattaacctgccaggtagcaagaaaggatctcaggaatgctttcaattcatactgccagctctacctcatgccattgaccttttacgtgatgccattgtaaaagtaaaggaggtgcatgatgaacttgaagatttgccttccccacctccccctctttcccctcctcctactaccagcccccataaacagacagaagacaaaggagttcaatgtgaggaagaggaagaagagaagaaagacagtggtgttgcttcaacagaagatagttcctcatcacatataactgcagcagccattgctgccaagaagcatccattctacaccagtcctgctgttgtcatggcacacggtgaacagcccatccctggtctcatcaattattcccatcattcaacagatgaacggattccagactccatcatttctcgtggtgttcaggtgctcccacgagacacagcctccctcagcactactccttcagaatcgcctcgtgctcaggctacatctcgcctctctacagcttcctgcccaacaccaaaagtccagtccaggtgcagcagcaaggagaacattctcagagccagtcacagtgctgtcgatatcaccaaggtggctagaagacatcgcatgtctccttttcctctgacatctatggacaaagcctttatcacagtcctggagatgactccggtgcttgggacagaaatcatcaattaccgagatggaatggggcgagtccttgctcaagatgtatatgcaaaagacaatttaccccccttcccagcatcagtaaaagatggctatgctgtccgagctgctgatggcccaggagatcgtttcatcattggggaatcccaagctggtgaacagccaactcagacagtaatgccaggacaagtcatgcgggttacaacaggtgctccaataccctgcggtgctgatgcagtagtacaagtggaagataccgaacttatcagggaatcagatgatggcactgaagaacttgaagtgcgaattctggtgcaagctcggccaggccaagatatcagacccatcggccatgacattaaaagaggggaatgtgttttggccaaaggaacccacatgggcccctcagagattggtcttctggcaactgtaggtgtcacagaggttgaagttaataagtttccagtggttgcagtcatgtcaacagggaatgagctgctaaatcctgaagatgacctcttaccagggaagattcgagacagcaatcgttcaactcttctagcaacaattcaggaacatggttaccccacgatcaacttgggtattgtaggagacaacccagatgacttactcaatgccttgaatgagggtatcagtcgtgctgatgtcatcatcacatcagggggtgtatccatgggggaaaaggactatctcaagcaggtgctggacattgatcttcatgctcagatccattttggcagggtttttatgaaaccaggcttgccaacaacatttgcaactttggatattgatggtgtaagaaaaataatctttgcactacctgggaatcctgtatcggctgtggtcacctgcaatctctttgttgtgcctgcactgaggaaaatgcagggcatcttggatcctcggccaaccatcatcaaagcaaggttatcatgtgatgtaaaacttgatcctcgtccagaataccatcggtgtatactaacttggcatcaccaagaaccactaccttgggcacagagtacaggtaatcaaatgagcagccgtctgatgagcatgcgcagtgccaatggattgttgatgctacctccaaagacagaacagtacgtggagctccacaaaggcgaggtggtggatgtcatggtcattggacggctatgatggtcaccagcaggagaaagctttgatgcatgtccacatatcattgactgtatcctgtaatatgcaacggcacagctagttttcccgatttggataaaagttgatctgtatagtcaacatcttgaactatatttcaaatgaatttaaatatcttttaaagaaaaaaacacctaaaaataaatcttaacagaaaattctgttctgattatatcaaggcaaatttttcctttcttgcaaattgctttgtgtgttcaatgctaggtctgatagcgatagcttttagtagacagcggtaggtgcctgcagaacttgtgtttttctcatctttaaaatacaactacttatgctcttaaatcaaggctgtctgcttatttatactagcgtaggcaacacttggatttcccttcttagtatgcttcataactgctttacagagagcttttgcttgttctttctcatgtatctcgtgtttatgtgcacagtgccaaaagaagactgactgggtggaggctctgccttgcctcaagaaccatcccctgcagagcatccagggaggtttctcgccccaatagcctcacggcacagtactcttgggcagtaactggacaccttttatttgaagaaacaaactgaagaaaaaatgcttccttaagtgctgacagcctttttaaccaatacatttaaaattgtacagaacaaaaaaataaaatcaaagactgatcttgtacagatattagtgttaccagcattcatgtggaaatcaagagcaaagacaaaataatgttaaacaattctgtaccataacattttctgtaatgatactgaaacttaatgaataaaaaaattccttgatcattatttaaaaatgtaaaaaaaaaaaaaaaaaa

SEQ ID NO: 12664 - DNA, 2474 bp, Homo sapiens
ctcagtccggctcagctggggctgggcgccgtgggtctggcggttccgtagcggtcccagcgtctgtcccgccggccgggcggtcgcggcacagccgcgggaaggtgtcggatggcggttccgccgcgcggcgggcgcgccgcccacatggcggccatcagggcgctgcaacagtggtgccggcagcagtgcgagggctaccgcgacgtgaatatctgcaacatgaccagccacctccccgcagccgcctctgcaagccccaagttgacgggtctggtcccccgacagccaggggccatgggtgtggattccaggacctcctgttccccacagaaggcccaggaggcaaacaaggccagaccgttggcctgggagcctgctgcgggcaactcgcctgccagggcttccgttccagctgcacccaaccctgcagccaccagcgccacgtccgtccacgtgaggagcccagccaggccctctgagagccgcctggcccccactcccacggaggggaaagtccgccctcgtgtgaccaatagctccccgatgggctggtcgtcagctgccccgtgcacagcagcggctgcctcccatcccgccgtgcccccgagtgccccagaccctcgcccggccacaccccagggcgggggagccccccgagtggcagctcctcaaaccacactcagttcaagctccacatctgcagccacggtggaccccccagcctggaccccgtccgcctccaggacccagcaggcccggaataagtttttccaaacatcagcagtgccccccggcaccagcctttctggcagaggtcccaccccgtcacttgttctatccaaggacagcagcaaggagcaggcgcggaacttcctcaagcaggccctctcagcgctggaagaggctggcgctccggcgcctggcaggccctccccagccactgccgctgttcccagttctcagcccaaaactgaagcaccacaagcaagtcccttagccaagccgttacagtcctcgtctccccgggtgcttggcctcccttcgaggatggaaccgccagccccgctgagcacgagcagtacctctcaggcatccgcgttgcccccggcaggcaggaggaacttggctgaatcctcaggggtcggcagggtgggtgctggctccaggccgaagccagaggccccgatggcaaagggtaaaagcaccaccttaacgcaggacatgagcaccagcctccaggaaggccaggaggacgggccggcaggatggagagcgaatctgaagcccgtggacaggaggagcccagctgagaggactctgaagcccaaggaaccacgggccctggcagagccgagggcgggggaggcccccaggaaggtctcaggcagctttgctgggagtgtccacatcaccctgacccccgtgaggcctgacaggaccccacgcccagccagcccaggacccagcctcccagccaggtccccctccccaccccgccgcaggagactggccgtccctgccagcctcgacgtttgtgacaactggcttcggccggagccccctggccaggaagcccgagtgcagagctggaaggaggaggagaagaaacctcaccttcagggcagaccagggagacccttgtccccggccaatgtccctgctctgcctggcgagacggtgacctccccagtcaggctgcaccccgactacctctccccggaggagatacagaggcagctgcaggacatcgagaggcggctggacgccctggagctccgcggcgtggagctggagaagcgactgcgggcggccgagggagatgacgctgaggatagcctcatggtggactggttctggctcattcacgagaagcagcttctgctgagacaggagtcagagctgatgtacaagtccaaggcccagcgtctggaggagcagcagctggacatcgagggcgagctgcgccggctcatggccaagcccgaggctctgaagtcactgcaggagcggcggcgggagcaggagctgctggagcagtacgtgagcaccgtgaacgaccgcagtgacatcgtggactcgctggacgaggaccggctccgggaacaagaggaggatcagatgctgcgggacatgattgagaagctgggcctccagaggaagaagtccaagttccgcttgtccaagatctggtcaccaaaaagcaaaagcagcccctcccagtagtagccagtagggccgtgggctcggcccggacctggcatccggatttggactcggggccatgggcttggcccggacccggaacccggacttgtactcggggccgtgggctcggcccggacccggcattcggacttggactcgggaagggcctcctgtccctacaaggggcatgtggacagcagggacctgcgctaccgtctgtggtctcaataaagaaaccgaccacatggaaaaaaaaaaaaaaaaaa

SEQ ID NO: 12665 - DNA, 2300 bp, Homo sapiens
attgtgttctgactgcgatgtggcgcttgcgatctctcgccgccggcagaggctcctcgaagagcgacacggggctgaccaggcacggtggtcaaagccgcagagggagagcgggagcggtcgtgaggtcgtctggggagaagggcggaggcaaagccgaggagcaggtgtgtggacccttctagcctgaggagtcctgcaggtgtgaagctccacacctgcctccatagcactttgcctgtccctaagagggctcatcggagaagaaagaatggctgtcagccacctgccaaccatggtccaggaatcggtgaccttcaaggatgtggctatactgttcacccaggaggagtgggggcagctgagccccgcccagagggccctgtacagggacgtgatgctggagaactacagcaacctggtctcactgggactcttaggacccaaaccagatacgttttcccagctagaaaaaagggaagtgtggatgccagaggacacccctggaggcttctgtcttgactggatgactatgcctgccagtaagaaatctactgtcaaggcagagattcctgaagaagaattggatcaatggacaataaaggaaagattcagtagcagtagtcactggaagtgtgctagcctgctggagtggcaatgtggaggccaggagatcagtttgcagcgagtggtactcactcaccccaacaccccatcacaggaatatgatgaatccgggagcactatgagctcatctcttcacagtgatcaaagtcagggatttcaacctagcaaaaatgcctttgagtgtagtgagtgtggaaaagtcttctctaagagttcaactcttaataaacatcagaaaattcataatgaaaaaaatgcaaatcagaaaattcatattaaggagaaaagatatgaatgtagagaatgtgggaaagcctttcaccagagtacgcaccttatccatcaccaaagaattcacactggcgagaaaccctatgaatgtaaggaatgtggcaaggccttctcagtgagctcctcacttacgtaccatcagaaaattcatactggagagaagccttttgaatgcaacttatgtggaaaagcttttatccgaaatatacaccttgcccatcatcatagaatacatactggagagaaaccttttaaatgtaacatttgtgaaaaagcctttgtgtgcagggcacaccttaccaaacaccagaatatccacagtggagagaaaccctataaatgcaatgaatgtggaaaagcctttaatcagagtacaagtttccttcagcatcagagaattcacactggagagaaaccctttgaatgtaatgaatgtgggaaggccttcagggtgaactcttcccttactgaacatcagagaattcatactggagagaaaccttataaatgtaatgaatgtgggaaagctttcagggataattcatcctttgcacgacatcggaaaattcacactggagagaaaccttacagatgtggcttgtgtgagaaagcctttcgggaccaatcagcactagcccaacatcagagaattcatactggggaaaaaccttatacatgtaacatatgtgaaaaagccttcagtgaccattcagcccttacccaacataagagaattcatactagggaaaaaccttacaaatgtaaaatctgtgagaaagcctttatccgaagcactcacctgactcaacatcagaggattcacacaggagagaaaccctataaatgtaataaatgtgggaaagcttttaaccagactgcaaacctcattcagcatcagagacatcatattggagagaagtgatatgaatgcagtttgtatggaagacctttgagactgagtagatgaattattgaatgtgagataatccgttctagagaataactatgaaagcttgcatcaagatagtcactttatttactgagggtcaggtttcacagtgtcatggggtttgggcatttaagaatggcaaacactcggctgggcacggtggctcacgtctgtaatctttgggagcactttgggaggccgaggtgggcggatcgcgaggtcaggggatcgggaccatcctggctaacagggtgaagccccatcgctactagaaatgtagaaaattacccgggcatggtggtgggcgcctgtggtcccggctgctcgggaggctgaggcaggagaatggcatgaacccgggaggcggaggttgcagtgagccgagatcgtgccactgcgctccagcctgggcgacagagcaagactcagtctc

SEQ ID NO: 12666 - DNA, 2308 bp, Homo sapiens
gttttcaggctcttggcggtgaaggtcagagtgcagacctgagaccactgctcaccgacttcagactccagtttatctgtgccccagcttcctcacttagtctcagaagacttaggctgaggcctcagaaggagatctccatcctttgtccagagcagaacaggatggccatgtcccaggaatcattgaccttcaaggacgtgtttgtggacttcaccctggaggagtggcagcaactggactctgcccagaagaacctctacagggatgtcatgcttgagaactacagccacctggtgtccgtggggtatctagttgcgaagcctgatgtgatcttcaggttgggaccaggtggagagtcctggatggcagatggggggaccccggtacggacctgtgcagaagtctggcaagttgatgagcagatagatcactacaaggaaagccaagacaaacttccttggcaagctgcattcataggcaaggaaacactgaaggatgaaagcggtcaagaatccagaacatgtagaaaaagcatttatctgagcacagaatttgattctgtaaggcaaagactccctaaatattattcgtgggaaaaggcattcaaaacatcatttaaactttcttggtcaaaatggaagctatgtaagaaagaaagatgatggatgtaaagcatattggaaagtatgcttccattataatcttcataaagctcaacctgcagagagattttttgaccctaatcaacgagggaaagccctccaccaaaagcaagcccttagaaaaagtcagagaagtcaaactggggagaaactctacaaatgtactgaatgtggaaaagtgtttatccagaaagcaaacttagttgtacatcaaagaactcacaccggagagaaaccttatgaatgctgcgaatgtgcaaaagccttcagccagaagtcaaccctcatagcacaccagagaactcacacaggggagaagccctatgaatgcagtgaatgtggaaaaacctttatccagaagtcaactctgattaaacataagaaaattcatatggagagagaccctataaatgcagtgtctgtgagaaagccttcagtaggaagtcaactctcattaaacatcagataattcatatgggagaaaccttatgaatgtaataaatgtgggaaatcttttagtgttaaatcaactctcattgtatgtcacagaacataaatgcataagttgcatgctattgtgaatagtgtgatgaaattttgcactgtcctgctctttcctgctcaggatgcaaatcagtgaatctttttttttttttttttttgagacagagtcttgctctgtcatccaaactggagtgcagtggcacaatcttggctcactgcaacctccgcctcttgggttcaaccgattctcctgcctcaacctcccaaatagttgggattacaggcacatgccaccatacgcagctaatttgtatttttagtagagacagggtttcaccatgttggccagcctggtcttgaactcctgacctcaagtgatccgcctgcctcagcctcccaaagtgctgggattacaggcatgagccactgcacccggcttgaatcatccttttgtccagtattatatccatgctgtatatgctacccgcccactagtcccttagctgtctcagttgtcagattgactgtcatgggattgcagtgcttgcattaaagctacccttattgtataatgaccccaaagtgcaagagtagtgatgttggcaatttgcatacaccaaaaataagttataaagtgcttccttaaagtgaaatggttaaagttcttgacttaataaagaaaaaaaatgtatgctgaggttgttaagatttacagtaagaatgaatcttctatccagaaattgtgaaggaggaaaaagaaacttgtgctagttttgctgtcacatctgaaactgcaaaagttgtggccacagtgcatcataagtgctaagacgaaaaagacattaaatttgcggatggaaggcgtgaatagaaatgggttctgacagcaatcaggttcggtactattcacagtttcaggcatccgctagggatcttggaacatatcccccatggataagggaggggtactgtaccttgtcatattgtgcattaaagaattcattgagtgtaatcatgtaagtctaacacacatttaaaaagctctcagatatcatttcgccttcggttgatgtaagaaaattcaaagctactcaaatcattcaataaatgataaaattatttaaaaaaaaaaaaaaaaa

SEQ ID NO: 12667 - DNA, 1702 bp, Homo sapiens
ctggctctccgctgcgctgcgctgcgctccggccgctcccgcggcccgtggatgggggtgtccggctgagccccgggatccgcctccctccgccaggacccgcacagataaactcatcctgaaagtcgctgttgttctcctgctgagcaagaatggaggccccactggtgagtctggatgaagagtttgaggaccttcgaccctcctgctcggaggacccggaggagaagccccagtgtttctatggttcatctccccaccatctcgaggacccctccctctccgagcttgagaatttttcttccgaaataatcagcttcaagtccatggaggacctcgtaaatgaatttgatgagaagctcaatgtctgctttcggaactacaacgccaagaccgagaacctagctcccgtgaagaaccagttacagatccaagaggaggaggagacccttcaggacgaggaggtttgggatgctctgacagacaattacatcccttcactctcagaagactggagggatccaaacatcgaggctctgaatggcaactgctctgacactgagatccatgagaaagaagaggaagagttcaatgagaagagtgaaaatgattccggtatcaacgaggagcctctgctcacagcagatcaggtaattgaggagattgaggaaatgatgcagaactccccagaccctgaggaagaagaggaggttctggaagaagaggatggaggagaaacttcctcccaggcagactcggtcctcctgcaggagatgcaggcattgacacagaccttcaacaacaactggtcctatgaagggctgaggcacatgtctgggtctgagctgaccgagctgctggaccaggtggagggtgccatccgtgacttctcggaggagctggtgcagcagctggcccgccgggacgagctggagtttgagaaggaagtgaagaactcctttatcacggtgcttattgaggttcagaacaagcagaaggagcagcgagaactgatgaaaaagaggcggaaagagaaagggctgagcctgcagagcagccggatagagaagggaaaccagatgcctctcaagcgcttcagcatggaaggcatctccaacattctgcagagtggcatccgccagacctttggctcctcaggaactgacaaacagtatctgaacacagtcattccttacgagaagaaagcctctcctccctcagtggaagacctgcagatgctgacaaacattctctttgccatgaaggaggataatgagaaggtgcctactttgctaacggactacattttaaaagtgctctgccctacctaaccttgccctttggagcagcctcgctgcaggaggtcactgagcaagagtcattccatcacagggactgcatgagaccatgtaacctccgacatgtatttaaacgtgtatagcttaacctggattaaacacgagcaagcgcgcggggtcctttgccgttggcttctagtgctagtaatcattggatgcatgatggggcagggccggtgatggtgcctcccccttgctggtgtcaggagaggggaaggcagccgctttcaccgctcattatgtagtctggctacagccctcaaaaacagcttatactcttaagactaattttgaaataaaaccttcatttaattaaaaaaaaaaaaaaaaaaaaaaaaaaaaaa

SEQ ID NO: 12668 - DNA, 5297 bp, Homo sapiens
caacaaactaagcagttgctcaatcgttgattgatcctcaggcacgtctagattttcccacttacataggtcttgttaagaaaccagtcctgccttcttgccactcgtgtctttcgatggctcccttcccgaagtcccgctgcctctaagcggagtgttaagcggggctctcggaagccggtggaccgagatttccccgggtggggcgggcgcggtgtagcggcccgcgggctgacttgctcccggctgtcccccggccccagcgaccatgccccgtaaaggcacccagccctccactgcccggcgcagagaggaagggccgccgccgccgtcccctgacggcgccagcagcgacgcggagcctgagccgccgtccggccgcacggagagcccagccaccgccgcagagactgcaagtgaggaacttgataatagaagtttagaagagattttgaacagcattcctcctcccccgcctccagcaatgaccaatgaagctggagctcctcggcttatgataactcatattgtaaaccagaacttcaaatcctatgctggggagaaaattctgggacctttccataagcgcttttcctgtattatcgggccaaatggcagtggcaaatccaatgttattgattctatgctttttgtgtttggctatcgagcacaaaaaataagatctaaaaaactctcagtattaatacataattctgatgaacacaaggacattcagagttgtacagtagaagttcattttcaaaagataattgataaggaaggggatgattatgaagtcattcctaacagtaatttctatgtatccagaacggcctgcagagataatacttctgtctatcacataagtggaaagaaaaagacatttaaggatgttggaaatcttcttcgaagccatggaattgacttggaccataatagatttttaattttacagggtgaagttgaacaaattgctatgatgaaaccaaaaggccagactgaacacgatgagggtatgcttgaatatttagaagatataattggttgtggacggctaaatgaacctattaaagtcttgtgtcggagagttgaaatattaaatgaacacagaggagagaagttaaacagggtaaagatggtggaaaaggaaaaggatgccttagaaggagagaaaaacatagctatcgaatttcttaccttggaaaatgaaatatttagaaaaaagaatcatgtttgtcaatattatatttatgagttgcagaaacgaattgctgaaatggaaactcaaaaggaaaaaattcatgaagataccaaagaaattaatgagaagagcaatatactatcaaatgaaatgaaagctaagaataaagatgtaaaagatacagaaaagaaactgaataaaattacaaaatttattgaggagaataaagaaaaatttacacagctagatttggaagatgttcaagttagagaaaagttaaaacatgccacgagtaaagccaaaaaactggagaaacaacttcaaaaagataaagaaaaggttgaagaatttaaaagtatacctgccaagagtaacaatatcattaatgaaacaacaaccagaaacaatgccctcgagaaggaaaaagagaaagaagaaaaaaaattaaaggaagttatggatagccttaaacaggaaacacaagggcttcagaaagaaaaagaaagtcgagagaaagaacttatgggtttcagcaaatcggtaaatgaagcacgttcaaagatggatgtagcccagtcagaacttgatatctatctcagtcgtcataatactgcagtgtctcaattaactaaggctaaggaagctctaattgcagcttctgagactctcaaagaaaggaaagctgcaatcagagatatagaaggaaaactccctcaaactgaacaagaattaaaggagaaagaaaaagaacttcaaaaacttacacaagaagaaacaaactttaaaagtttggttcatgatctctttcaaaaagttgaagaagcaaagagctcattagcaatgaatcgaagtagggggaaagtccttgatgcaataattcaagaaaaaaaatctggcaggattccaggaatatatggaagattgggggacttaggagccattgatgaaaaatacgacgtggctatatcatcctgttgtcatgcactggactacattgttgttgattctattgatatagcccaagaatgtgtaaacttccttaaaagacaaaatattggagttgcaacctttataggtttagataagatggctgtatgggcgaaaaagatgaccgaaattcaaactcctgaaaatactcctcgtttatttgatttagtaaaagtaaaagatgagaaaattcgccaagctttttattttgctttacgagataccttagtagctgacaacttggatcaagccacaagagtagcatatcaaaaagatagaagatggagagtggtaactttacagggacaaatcatagaacagtcaggtacaatgactggtggtggaagcaaagtaatgaaaggaagaatgggttcctcacttgttattgaaatctctgaagaagaggtaaacaaaatggaatcacagttgcaaaacgactctaaaaaagcaatgcaaatccaagaacagaaagtacaacttgaagaaagagtagttaagttacggcatagtgaacgagaaatgaggaacacactagaaaaatttactgcaagcatccagcgtttaatagagcaagaagaatatttgaatgtccaagttaaggaacttgaagctaatgtacttgctacagcccctgacaaaaaaaagcagaaattgctagaagaaaacgttagtgctttcaaaacagaatatgatgctgtggctgagaaagctggtaaagtagaagctgaggttaaacgcttacacaataccatcgtagaaatcaataatcataaactcaaggcccaacaagacaaacttgataaaataaataagcaattagatgaatgtgcttctgctattactaaagcccaagtagcaatcaagactgctgacagaaaccttcaaaaggcacaagactctgtcttgcgtacagagaaagaaataaaagatactgagaaagaggtggatgacctaacagcagagctgaaaagtcttgaggacaaagcagcagaggtcgtaaagaatacaaatgctgcagaggaatccttaccagagatccagaaagaacatcgcaatctgcttcaagaattaaaagttattcaagaaaatgaacatgctcttcaaaaagatgcacttagtattaagttgaaacttgaacaaatagatggtcacattgctgaacataattctaaaataaaatattggcacaaagagatttcaaaaatatcactgcatcctatagaagataatcctattgaagagatttcggttctaagcccagaggatcttgaagcgatcaagaatccagattctataacaaatcaaattgcacttttggaagcccggtgtcatgaaatgaaaccaaacctcggtgccatcgcagagtataaaaagaaggaagaattgtatttgcaacgggtagcagaattggacaaaattacttatgaaagagacagttttagacaggcatatgaagatcttcggaaacaaaggcttaatgaatttatggcaggtttttatataataacaaataaattaaaggaaaattaccaaatgcttactttgggaggggacgccgaactcgagcttgtagacagcttggatcctttctctgaaggaatcatgttcagtgttcgaccacctaagaaaagttggaaaaagatcttcaacctttcgggaggagagaaaacacttagttcattggctttagtatttgctcttcaccactacaagcccactcccctttacttcatggatgagattgatgcagcccttgattttaaaaatgtgtccattgttgcattttatatatatgaacaaacaaaaaatgcacagttcataataatttctcttcgaaataatatgtttgagatttcggatagacttattggaatttacaagacatacaacataacaaaaagtgttgctgtaaatccaaaagaaattgcatctaagggactttgttgaactttatgctgaagattcttcaagttgattcagtgtattactgatttttttctatttgtaaaggattatgagttgtataaaatacatactccctaaactagatcatgaaactggtttctgttttatgcagttgtcatttgtaaagtctaataaaatattctctataattgcttctagattacaaaaatatgacaatcttgtaagtagcagactatggagaaaaatgagttacctggagggtcaggtaacttgccaaactaaaaagtatgttagttgaggcaaagtcctaagcaaggttgtgctatcaaggctcagcataccttcgtgggcctttgatttaccaacactggaaatgcctgccaactaatcttggatagattctttaaggcattccacttagcttgccagttgagacaatcaccacagttattacccaaatactatgaacatatttttgtaaaccagtcattctgaattatagtgatgagaatttaaatatatgcttttctagaatttgatgtttgaccatttatgacttaattaccagagagccagtaaattaggacagtgtttcaacaagcctaggctatctcgtaagttgaaaaatatcccactatagttgcttcatgagtatgaagtaagatggcctctgatttacactggttcaatttacaaattttcaactttatgataggtttatccgggtactaaatgcatttcaacttgatagtttcaacttatgataggtttaccaggatgtagtcccactgttgaggagcatctatttaggggttaattactttagtaataagtggaaagtaagataccttgagtaatgtttgcctataaaattgtcagcgtatttttacactattggctcaagaatgttataatgctaagggacataagttggcaaccacttggtttttggaaggactttcggtattgtattagaagtctgccctagctgttaaatttctgggtatttatcctaaggaattaattaaagagttaattgttcctttcttcagtgggccattgttttagatatttaaaaaatccaacagtttctatcataatgtaactgtaaaaatgtaaacacattattagcatggacttttaaataaagatttaaagaaagcaaaaaaaaaaaaaaaaaaaa

SEQ ID NO: 12669 - DNA, 6787 bp, Homo sapiens
tctcgctcaggcggaggaggagaaggaggaggaggaggacgacgttcggcctgcgcagtgagatgtttgtccgtcgccgccgccgccgccatcgcggaggagcgcgataaagggagccgagccggacgtgagggggaccccgcggagccgccgcgccagcgcagccccccagccgcatcggagtcgccagagtccgagccgccgccgccgccgccgccgcccccgccgccgccgcggctgcccaggggccggccagctccccagccctgcccgggggtcgcgccgccgccgcccccagcgtcgcccctagcctgcctgcccgccttaaatgtgacaccggcgtcgcggagcgcgacctgaagccgccgccggggaggggacgagcaccatgtcgaatctgagcaaaggcacgggcagccggaaggacaccaagatgcggatccgggcctttccgatgaccatggatgaaaaatatgtaaacagcatttgggaccttctgaaaaatgcaattcaagaaatccagcgtaagaataacagtggtcttagttttgaggagctctatagaaatgcatatacaatggttttgcataaacatggagaaaagctctacactggactaagagaagttgttaccgaacatctcataaataaggtgcgagaagatgtactaaattcattgaataacaactttcttcaaacgctaaatcaagcttggaatgatcatcaaacagctatggtgatgattagagacatactaatgtacatggaccgtgtgtatgtacaacaaaataatgtggagaacgtctacaatttgggattaattatttttcgagatcaagttgtacgttatgggtgtattagggatcatctacggcaaactctattggatatgattgcaagagagcggaaaggagaagtcgtagacagaggcgcaataagaaatgcttgccagatgttaatgattttaggtctcgaaggaagatcagtctatgaagaagattttgaggctccttttttggaaatgtctgcagaattttttcagatggaaagccagaaatttttagcagaaaatagtgcttcagtatatataaagaaagtagaagctagaattaatgaagaaatagaacgagtgatgcactgccttgacaaatcaacggaagaaccaattgtaaaggtggttgaaagggaactcatttccaagcacatgaagactatagtagaaatggagaattctgggctagtacatatgttgaaaaatggaaagacagaagaccttggttgcatgtacaagttatttagtcgtgtgccaaatggtttgaaaacaatgtgtgagtgtatgagttcctatttgagggagcaaggtaaagctcttgtttctgaagaaggagaaggaaagaatcctgttgactatatccagggcttattggatctgaagagtaggttcgatcgcttcctcctggaatcattcaacaatgaccgtctctttaaacaaactattgcgggtgactttgagtattttctcaacctcaactccaggtctcctgaatacctctcattatttattgatgataagctgaaaaagggagtcaaagggctaacagaacaagaagtagaaacaatattggataaagcaatggtcctttttaggtttatgcaagaaaaagatgtatttgaacgttattataaacaacacttggcaaggagacttctcacaaataaaagtgtttctgatgactctgaaaaaaacatgatatctaagttaaagactgaatgtggatgtcagttcacgtcaaaactggaaggaatgtttagggatatgagcatctcaaacacaacgatggatgaattcaggcaacatctacaggcaactggtgtatctttaggtggtgttgatcttacagtccgggtgctcacgacaggatattggcccactcagtcagccacaccaaagtgcaacatcccaccagcaccaagacatgcttttgagatattcagaaggttctacttagccaaacacagtggtcgacagctcacactccagcatcatatgggttctgcagatctcaatgccacattttatggaccagttaaaaaggaagatggatctgaagttggtgttggaggtgcacaagtaactggctctaatacacggaagcacatattgcaagtttccactttccagatgaccatattaatgctctttaataatagagaaaaatacacatttgaggaaattcagcaagagacagatatccctgaaagagagcttgttagagccctacagtccctcgcctgtggtaaaccaacacagcgggttcttacaaaagaacccaaatcaaaggaaatagaaaatggtcatatatttacagttaatgatcaattcacatccaaactacacagagtcaagattcaaacagttgctgccaaacaaggtgaatccgacccagagaggaaagaaacaaggcagaaagtagacgacgacagaaaacatgagatagaagctgctatagtgcggataatgaaatctagaaagaagatgcagcacaatgttctagtagcggaggtaactcagcagttgaaggcgcgattcttaccaagtccagttgttattaagaaacgtattgaaggacttattgagagagaatatttggcacgaacacctgaggatcgcaaagtatacacatatgtagcataaaatgcgttcagaaatttgatttattcttggactgtactcttcgcatggactgggaagttcttttaaatcattaaatattaagacgaccatctcttctattaaattacagtacatgttctagaccattgagatcaagcctttactccctttgagagtttccaacatcagttgattgagcttcaggctttacaacgtttatccctgtagagatcatctttacagttcctcgggaaaatgtgaatgtgctgcgttttgttttctttactgtatgaaaacaggaaaataaaagagaaatttagaaaatacagctcattacaataaaattgttggatttcatttccccaggtcttcagtgttgatgtaaatgtgttttgtagtgttgcttagcactttgcgcattgtgtaagttgggtaacaaaaatggcaaaagaaatgcagatttcccagttatcttgctctgaagacatttctttagctagtcttatttaattttaaaggtttgataaatatacaaagacccaagcatacaatttgagcatgctgtattctaccacttgcacttactcatcttctagccttatgaccaggaacctttgttttgggctcaagtacacatcctgatttggtttctccctgttgtaatttgagatttcccaaattaagtcttataatgattaggttttgttctgagttatttctagagaaagaaagtattttagtatgtgtaaattgtacaataatttttttgctgttgtactcactgctaatagtggattgtatagggtggtgtttttatttcatttattgtagacaaaaataatgaatttagtatacacatacccactaattcaagtatgtcagagcacaaagttggcagctggttatatttaattcagcccctctgaaaagcacatacagtctatactttgtttataaataccctaggtcctccctgcccctaaatatatattttggtgaagctgtggtgcactattaattttctgtttcaaaatgcaatctaaagatgcaataaatatgatgaccttgatagttttaatgaaatcttcaattcttgcagctgtgttttggaaagtgattaagcaatatttctcaaacctgatgattcttggatatttagctattgtcctccaaagagtcatcgtttcacgttttcaaacatgtgctttgtgctgaagattcttgtcagatatcctgtgcttccagagtatttttatcttcaattttatttaattttgtttcattttgttttcataagacaatgtttcagatatgtaatggggcaaaccactatagatttctgttggatagaaaaatgaaatgttactaataagtttaaattgacccttcgttgactatcagtactgttgatacatttattagaatgtatgtctcagaagatggtttctgtttaaatttatggtcaagttacaacaactgaattctaatatggattaaaaactccacataaatatttttccccatgcgtcttgggttataattttccttttagacttgcaaatatgcttttattgcaattttgtctccatctgtactgtagaattacaagccttgtgctctttatctctacattttccacttctacatgatgcaattaagatgccaatgaaaagtattgtgaacattattctcaggacacttttaccatacttgagtagtactaagtcaggtgtaacatggaaagctaagggtttcaccttctgattttgacataattggaaattttctataatggtaagatgtttataggaaagtaatggtagttcatgtttgagaatttttttattgctttcatttcccagttaaatgatatttaacacctgggaaaacaggacagctcagattgtcgagttagtaaacatgagcgatgtaaaaactttatttgaaatctcctaagtgagacattaaacattttagtgctagtttaagccattaaaagtaaagtttaagtttacgtcattgtctcaagtgtggctgtaaaaatcagatctagagtttagagacatacttgttaactttggagcacaggtttgatatttatgcttctaaatacattaaaacatttctgaattgcagttgaatggttggagattgctggcgatgtgatgctgcactgaaaaaactggtcacacaaaatgtttatatgtttgactgcataagtattattttaggtcataaaggttataacaaaatacatttaacattgctttctttttagcaagaggtcacagatgctattttttctcagtttttaatgctttaatttgaaagaaaaatgcatcctaaccattccatcctgttggtgcagagaaattttggtgatttattagaagacttttaaggagggtggatacatagtttttcaactgcaaaaatcatgtcatctcttcagtaactgttaaagtgtaattctctgccttcattatcaagtccaggacagtgtttattttgaatcgttaacattatttaaagactgaaaattcattgcaattagggaacgcacagcctcacaaaagtggttgtgattgcaaggattctttatgtcagtgaacttaaaaagggaatgggggaagagatgcatgcctttctaaaggtatgctagagtcacctgtgtagcattgtaattatgtactatcaaacccccaagatgctgatgataggccttctctgtaagaatccttctcatagtgaagcactgttgatgttttgttcaccggatatgttgggtagcagaaaaggcctagaaccagttttaagattatgcctacatctctagaagactagtacactggcatcatcttaggtttctaaatattatttaattccttaatttggaaagcagttttaatgtttacagtttaagatactcattttcagtaactagtgttaaagatttttatctttgcctgtctactgtaacttaagactttcatagaataattttttatagagtatatggtatattgtgtcaatcttggaaggaaagctgttgcatatcaattgtaggtcatgtattttactatatgttgcatagtattttgcattctgtaaatacgaatgttaaaacatttcaggtcagcaaaattagaagtcatttctagtcctcaaagcagaaataattagaaatgttaacatttaagtgcttatcatatgccagatactattctgaatattttatgtatattcattcatttagttgtcatattggctttatgtgacataactgtcattataccagtgttgtccaaggttgctagcaggaaatggcagagccaggagttggacctaggtttaatcctatccatattccatgttacaaattgacatgattttccatattaaaaaattttcatttattttgtacctcattcacatgaatagtaatgtgacaaactaaagttaatacatgaagcattgcaatatggaattttgcacatttttgttagctttacattatttgctgataccaacttttggtaggaaggaaaacagggaaggtgattgctgctattctggaatgtgtccattgaaaagaaaataggcgctttgtctcctacaatcttagagaaagttttacatacttaagtgggtaccacagataggcatgtaccttaaattcaaatctacagttttacaaaatgttttcctttgtgtgcctttcctatgtcaaattagccagaaggaagaagagacgttaagaatggcagataaatttaacaggtaatgatacagagattggccattacgctagctctcaggagaaaaacaactaggatgtcttgaaacccgtgcatttaattttagaaatggcaaatttgtaagcgtgtcatttaagtaatttgatgctcagttttagggtctaagttgacctcgagtgagccatgcaaaaatagctttaaaattatacatgagcagctcaaagtaaacgtgtattttttagtaacaatgaaattgtcaaatttcaagattttaataacaggacagttcaactaataaactttattgcatacaagatttattgcaatgtgggaaaattaaaattctcagtctcag

SEQ ID NO: 12670 - DNA, 5261 bp, Homo sapiens
ggcgcccgaccccagccaccgccctgcggccagcgcgtcccccgactcgccgcccggagaccccgaggctccaacgagttcagaaatgtccagaaatgacaaagaaccgttttttgtgaagtttttaaagtcttcagacaattccaaatgtttttttaaagctctcgagtccataaaagaattccaatcagaagaatatcttcagattattacagaagaagaggcattgaagataaaggagaatgatagatcactttatatctgtgacccttttagtggcgttgtctttgatcacctcaaaaagcttggctgcagaattgttggtcctcaagtagtcatattttgtatgcaccaccagcgatgtgtcccaagagccgaacatccagtttataatatggttatgtctgatgtaaccatatcttgtacaagtctggaaaaagaaaaaagggaagaagttcataaatatgtacaaatgatgggcggacgagtatacagagaccttaatgtatcagtaactcaccttattgcaggagaagttggtagcaaaaaatatttagttgctgcaaacctgaagaaacctattttgcttccctcttggataaaaacactttgggagaagtcacaagagaaaaaaataactagatatactgatataaacatggaagatttcaagtgtcctatttttcttggttgcataatctgtgtgactggcttatgtggcttagacaggaaagaagttcagcaactcacagttaagcatggaggtcaatacatgggacaattgaaaatgaatgaatgtacacacctcattgtgcaagaaccaaaaggtcagaagtatgagtgtgccaagagatggaatgtacactgtgtgaccacacagtggttttttgacagtattgagaaaggtttttgtcaggatgaatccatatacaagacagaacctagaccagaagcaaagactatgcccaattcttcaactcctaccagccagatcaacacaattgatagtcgtactctttcagatgtcagcaatatttccaacataaatgcaagttgcgtaagtgaatcaatatgtaattcacttaacagcaaactggagcctacacttgaaaatctagaaaatctggatgtcagtgcatttcaagcacctgaagatttattagatggttgtcggatatatctttgcggttttagtggcagaaagctagataaactgagaagacttattaacagtggaggtggagttcgttttaaccagctaaatgaagatgtaactcatgttattgtgggagattatgatgatgaattgaagcagttttggaataaatcagcccacaggcctcatgtagtgggagcaaagtggttgctagagtgtttcagtaaaggttatatgctttctgaagaaccatatatccatgctaattaccagccagtggaaattccagtttcacatcagcctgaaagtaaagcagctcttttaaaaaagaagaacagcagcttctctaagaaagactttgctcctagtgaaaagcatgagcaagctgatgaagatctgctctctcaatatgaaaatggtagctccacagtagttgaggctaagacgtctgaagccaggccctttaatgattctactcatgctgagcccttgaatgattctactcacatttctttgcaagaagaaaaccagtcttctgtcagtcattgtgtccctgatgtttctacaattactgaagaaggcttatttagccaaaagagtttccttgttttgggttttagtaatgaaaatgaatctaacatcgcaaacatcataaaagaaaatgctgggaaaatcatgtcccttctgagcagaactgttgcggattatgctgtggttcctctgctggggtgtgaagtggaagccactgtgggagaagttgttacaaatacatggctggttacttgcatagactatcagactttgtttgatccaaagtcgaatcctctcttcacaccagttccagtaatgacaggaatgactcctttagaggattgtgttatttcatttagccagtgtgctggagcagaaaaagagtctttaacattcctagcaaacctccttggagcaagtgttcaagaatactttgttcgcaaatccaatgcaaagaaaggcatgtttgccagtactcatcttatactgaaagaacgtggtggctctaaatatgaagctgcaaagaagtggaatttacctgccgttactatagcttggctgttggagactgctagaacgggaaagagagcagacgaaagccattttctgattgaaaattcaactaaagaagaacgaagtttggaaacagaaataacaaatggaatcaatctaaattcagatactgcagagcatcctggcacacgcctgcaaactcacagaaaaaccgtcgttacacctttagatatgaaccgctttcagagtaaagctttccgtgctgtggtctcacaacatgccagacaggtcgcagcctccccagcagtaggacaaccacttcagaaggagccctcgttacacctggatacaccatcaaaattcctgtccaaggacaaactcttcaagccttcctttgatgtgaaggatgcacttgcagccttggaaactccaggacgtcccagccaacagaaaaggaaaccgagtacgccactctcagaagttattgtcaaaaacttgcaacttgctttggcaaatagctctcgaaatgctgtcgctctttctgccagccctcaactgaaagaggcccagtcagagaaggaagaagccccaaagccacttcacaaagtagtggtatgtgttagtaaaaaactcagtaagaagcagagtgaactaaatgggatcgcagcctctctaggagcagattacaggtggagttttgatgaaacagtgactcatttcatctatcaagggcggccaaatgacactaatcgggagtataaatctgtaaaagaaagaggagtacacattgtttccgagcactggcttttagattgtgcccaagagtgtaaacatcttcctgaatctctttatccacatacttataatcccaaaatgagcttggatatcagcgcagtgcaagatggccggctctgtaatagtcgactactctcagctgtgtcttcaacaaaggatgatgagccagatcctttgattttagaagaaaatgatgtagacaatatggccaccaataataaagagtcagcaccatcaaatggaagtggaaagaatgactctaaaggagttctgacacagaccttagagatgagagagaactttcagaagcagttacaggagataatgtctgcaacatcaatagtgaaaccccaagggcagaggacttccctttcaagaagtggttgtaacagcgcatcttcaacccctgacagcactcgctctgctcgcagtggacgaagtagagtcctagaggcactgaggcagtctcgtcagacagtacctgatgtcaacacagagccttcccaaaatgaacagatcatttgggatgaccctacagcaagggaggagagagcaaggcttgccagcaatttgcagtggcctagttgtcccacacaatactctgagcttcaggttgacattcaaaacttggaggattctccttttcaaaagcctttacatgattcagaaattgctaaacaggctgtctgtgatcctggaaacatacgtgtgactgaagctcccaaacacccaatctctgaagaactggaaactcccataaaagacagccacctgatccctacgcctcaagcccccagtattgcctttccactcgccaacccccctgtggctccgcaccctagagaaaagattataacgatagaggagactcatgaagaattaaaaaaacagtacatatttcagttatcatctctgaatcctcaagaacgtattgactattgtcatctgattgagaaactaggtggattggtgatagaaaagcagtgctttgatcccacctgtacacacattgttgtgggacatccacttcgaaacgagaagtatttagcctcagtggcagctgggaagtgggtgcttcatcgctcctaccttgaagcctgcaggactgctggacacttcgtgcaggaagaagactatgaatggggaagtagttccatacttgatgttttgactggaatcaatgtacagcaacgaagactagcacttgcagcaatgagatggagaaaaaaaatccagcaaagacaagaatctggcattgttgagggagcatttagtgggtggaaggttattttacatgtggatcagtctcgagaagcaggcttcaaacgccttcttcagtcaggaggagcaaaggtgctacctggtcattctgtacctttatttaaagaggccacacatcttttttctgacttgaataaactgaaaccagatgactcaggagttaatatagcagaagctgctgcccagaacgtgtactgcttgagaacagaatacattgctgattatctcatgcaggaatcacctcctcatgtagaaaattactgtctaccagaagctatttcatttattcagaataataaggaacttgggactggattatcacaaaagaggaaagctcctacagaaaaaaataaaatcaaacgacctagagtacactaatcgcatctaccctttagttaccaaacattaaatgtttttaaaaattgaaagcctgaatgtgactgtgatagatttgggtagtaatttaaagatgagtacctgaagaattctgcttcagagtataatgatgacccttcttgagttttgaacacctgaaattgtaatcactgaaatattaactgtttcttaataaaaagttacctgaaataacaacaaaatacaactcctcagctagcttgctgttaaaccacattgaagtctgttaaaagatatttatttttcttgtaaatatctgaagctgtagcttagtggaaattttagcaaggtaatggattttgctttaaaatgtctgccttacaaattcataacaacaagatttgtcagtcagcatttattcatgttttccctgatttttatcttctcaccattttacctcttttaacaggagcctgagcacaaggtttaatgaggaagctggggctataaatatgtgtgtatatatgtatatgtatgtttgtacaaatctccatgatgtttgccaagtttgaatgcgcaaaacttggaaaatgtgacaataaagaataaaagtagtaactcaaattagtat

SEQ ID NO: 12671 - DNA, 2644 bp, Homo sapiens
acgtgaccacctggctggcgcgcgcgcctgggggtctggtccctagccgcgttctcggtcgcttccctcttctctcgccgcctcctggcctccgcaccgacgcggcccgggctggagccgagccggggccgagctgcaggccggaccggagccggatctgtacccgctgagacgtggaaacatggaggcctgagccggtgtgcgccacctgggctgcggcggcgacagcgacttctcctgacccctctgccaccctcccatccgtccgcgggtccgtggagctggagcagatcccccagccggctgagacaggttgtcttttggaaatgcaggtttaaggacaaattatctgcttaagctagaagatgggatcgaatagcagcagaatcggcgatcttcctaaaaatgagtacttgaaaaagttatcaggcacggaatctatctctgagaatgacccgttctggaatcagcttctctcattttctttccctgcaccaactagcagtagtgagttgaaactcttggaggaagcaaccatttcagtctgcaggtcattagttaaaaacaatcctcgaacaggaaatcttggtgcactaattaaggtcttcctttctagaaccaaagaactaaaactttcagcagaatgtcagaaccacatcttcatttggcagacacacaatgctttgtttattatttgctgtttgctgaaagtgttcatctgtcagatgtcagaggaggaattacaacttcattttacttatgaagaaaaatctcctggcaattacagttctgactcagaagatcttttggaagaattgctgtgctgtttgatgcagttgatcactgatattccactcttagatattacatatgaaatatcagtagaagctatatcaacaatggttgttttcctttcctgccaactcttccacaaagaagttttgcgacagagcatcagccacaagtatttgatgcgaggtccatgtcttccatacaccagcaaacttgtgaagaccttattatataactttatcagacaagaaaagccacctcctccaggggcccatgttttccctcagcagtcggatgggggaggactgctttatggacttgcatcaggagtagcaacaggactctggactgtcttcacactaggtggtgtgggcagcaaagcggctgcctctccagagctttcttcccctctggccaaccagagtctcctgcttctgctggtgttggccaatctgacagatgcctcagatgcgccaaacccctacagacaagccattatgtccttcaagaacacacaagatagcagtcctttcccctcatcaattccacatgccttccagatcaactttaatagtttgtacacagctctttgtgaacagcagacatctgatcaagcaactctcctcttgtataccttgctccatcaaaatagtaatattagaacatacatgttggctcgcacagatatggaaaatcttgttttaccaattcttgagattctgtatcatgttgaagaaaggaattcacaccatgtgtatatggcccttataatattgttgatccttacggaagatgatggcttcaacagatccattcatgaagtgatactaaaaaatattacttggtattcagaacgagttttaactgaaatctccttggggagtctcctgatcctggtggtaataagaaccattcaatacaacatgactaggacacgagacaagtaccttcacacaaattgtttggcagctttagcaaatatgtcggcacagtttcgttctctccatcagtatgctgcccagaggatcatcagtttattttctttgctgtctaaaaaacacaacaaagttctggaacaagccacacagtccttgagaggttcgctgagttctaatgatgttcctctaccagattatgcacaagacctaaatgtcattgaagaagtgattcgaatgatgttagagatcatcaactcctgcctgacaaattcccttcaccacaacccaaacttggtatacgccctgctttacaaacgcgatctctttgaacaatttcgaactcatccttcatttcaggatataatgcaaaatattgatctggtgatctccttctttagctcaaggttgctgcaagctggagctgagctgtcagtggaacgggtcctggaaatcattaagcaaggcgtcgttgcgctgcccaaagacagactgaagaaatttccagaattgaaattcaaatatgtggaagaggagcagcccgaggagttttttatcccctatgtctggtctcttgtctacaactcagcagtcggcctgtactggaatccacaggacatccagctgttcaccatggattccgactgagggcaggatgctctcccacccggacccctccagccaagcagcccttcaagttcttttatttctgggtaacagaagtagacagacaggttacttggtgtatcttctgttaaagaggattgcacgagtgtgttttcctcacacactttgatttggagaattggtgctagttggcaatagataactcagcgtagatagtattgcaaaaaggggaggaaatacacaacaataataaatgtaaaaacctgctattcaaaaaaaaaaaaaaaaaa

SEQ ID NO: 12672 - DNA, 1302 bp, Homo sapiens
gagacagcccgccggccgcccggatctccacctgccaccccagagctgggacagcagccgggctgcggcactgggagggagaccccacagtggcctcttctgccacccacgcccccacccctggcatggccgaccagctgactgaggagcaggtcacagaattcaaggaggccttctccctgtttgacaaggatggggacggctgcatcaccacccgcgagctgggcacggtcatgcggtccctgggccagaaccccacggaggccgagctgcgggacatgatgagtgagatcgaccgggacggcaacggcaccgtggacttccccgagttcctgggcatgatggccaggaagatgaaggacacggacaacgaggaggagatccgcgaggccttccgcgtgttcgacaaggacggcaacggcttcgtcagcgccgccgagctgcgacacgtcatgacccggctgggggagaagctgagtgacgaggaggtggacgagatgatccgggccgcggacacggacggagacggacaggtgaactacgaggagtttgtccgtgtgctggtgtccaagtgaggccggcgcccaccatgctcctgggcgcccacgcggcccacagggcaagaacccggggcctcccgcctcctcccccatccccctgcctcccctgggcactgtggcttcctcctgcgcctggttgattcagcccacctctctgcatcccgcttcccgcgtctcttctctgcactcctgccgaccttcccacctgctcatctgaatgacacggaacgctcccactgcaggcaaaccgtgacgccctccccactcgggagaagcagagctgaccttaggaccgagcaccagggcaggttgcgctgactctgcggccctccaggacggacaccgggtgaccccttagggcacccaggcaagatccctaagaggcacccaatgcccaggccaggggggctgcagccctcagcccccgccaggattcccgcaggctcctggactggaagctccctccgcggtcggattctggagggtgggaggcatcttggcctgcagtaagcggtgctgacggggactctggccacagaggtcaggcctcctgaaaacagcactgccttccgcgctgccccagcttgccccattccttgtccgccaacccaccgtgattcatcttctgaagctgggagtgaaactgggtcagctgtaacctgttcctattcatctggaaggagggaggcttggatgagcaggggatgagagctgcagggaaataaatgagatattcgtcctt

SEQ ID NO: 12673 - DNA, 5072 bp, Homo sapiens
ggagctccatgccactccccgcctgggccactgctttgttttcttctaatgtttttcctctacctgggttggctgtttcttcattcatatttgagaagaatcacctcctaattaaatgtagcacttcgctctctccctacatgaaggctgtcttggttacccgactaggcaacgcgcattggtatcaaattaccgaaagtctacaccggagcagtcctcatatttacatacaaataactcaggggcttgcatttatgtcaccattctgtcctgctagaggcttgccagaggagtttttaatccaatcagaaggagctttaaaaggatgtctgcgaagtggtcaaaaggatcttaacctcaattaagtggggttttttaaaaagattttttggggggcctgaaattttgaaaatcttcgaactctgagtggggaaagatgtataattcctcaattgcctacgaggatatcaagatgctgagaggaattcagcggtggtgaagagagtggatacaaaccagggattggtttccttgagctgttttggaggttgattctaaatcactgcttaaggaattcctggaaacatcaggaaaacatttgatcatccaagcctagtggaaatggctttaccgcagagtgaagatgcaatgaccggggacacagacaaatatcttgggccacaggaccttaaggaattgggtgatgattccctgcctgcagagggttacatgggctttagtctcggagcgcgttctgccagcctccgctccttcagttcggataggtcttacaccttgaacagaagctcctatgcacgggacagcatgatgattgaagaactccttgtgccatccaaagagcagcatctaacattcacaagggaatttgattcagattctcttagacattacagctgggctgcagacaccttagacaatgtcaatcttgtttcaagccccattcattctgggtttctggttagctttatggtggacgcgagagggggctccatgagaggaagccgtcatcacgggatgagaatcatcattcctccacgcaagtgtacggcccccactcgaatcacctgccgtttggtaaagagacataaactggccaacccaccccccatggtggaaggagagggattagccagtaggctggtagaaatgggtcctgcaggggcacaatttttaggccctgtcatagtggaaatccctcactttgggtccatgagaggaaaagagagagaactcattgttcttcgaagtgaaaatggtgaaacttggaaggagcatcagtttgacagcaaaaatgaagatttaaccgagttacttaatggcatggatgaagaacttgatagcccagaagagttagggaaaaagcgtatctgcaggattatcacgaaagatttcccccagtattttgcagtggtttcccggattaagcaggaaagcaaccagattggtcctgaaggtggaattctgagcagcaccacagtgccccttgttcaagcatctttcccagagggtgccctaactaaaagaattcgagtgggcctccaggcccagcctgttccagatgaaattgtgaaaaagatccttggaaacaaagcaacttttagcccaattgtcactgtggaaccaagaagacggaaattccataaaccaatcacaatgaccattccggtgcccccgccctcaggagaaggtgtatccaatggatacaaaggggacactacacccaatctgcgtcttctctgtagcattacagggggcacttcgcctgctcagtgggaagacatcacaggaacaactcctttgacgtttataaaagattgtgtctcctttacaaccaatgtttcagccagattttggcttgcagactgccatcaagttttagaaactgtggggttagccacgcaactgtacagagaattgatatgtgttccatatatggccaagtttgttgtttttgccaaaatgaatgatcccgtagaatcttccttgcgatgtttctgcatgacagatgacaaagtggacaaaactttagagcaacaagagaattttgaggaagtcgcaagaagcaaagatattgaggttctggaaggaaaacctatttatgttgattgttatggaaatttggccccacttaccaaaggaggacagcaacttgtttttaacttttattctttcaaagaaaatagactgccattttccatcaagattagagacaccagccaagagccctgtggtcgtctgtcttttctgaaagaaccaaagacaacaaaaggactgcctcaaacagcggtttgcaacttaaatatcactctgccagcacataaaaagattgagaaaacagatagacgacagagcttcgcatccttagctttacgtaagcgctacagctacttgactgagcctggaatgagtccacagagtccatgtgaacggacagatatcaggatggcaatagtagccgatcacctgggacttagttggacagaactggcaagggaactgaatttttcagtggatgaaatcaatcaaatacgtgtggaaaatccaaattctttaatttctcagagcttcatgttattaaaaaaatgggttaccagagacggaaaaaatgccacaactgatgccttaacttcggtcttgacaaaaattaatcgaatagatatagtgacactgctagaaggaccaatatttgattatggaaatatttcaggcaccagaagttttgcagatgagaacaatgttttccatgaccctgttgatggttatccttcccttcaagtggaactggaaacccccacagggttgcactacacaccacctacccctttccagcaagatgattattttagtgatatctctagcatagaatctccccttagaacccctagtagactgagtgatgggctagtgccttcccaggggaacatagagcattccgcagatggacctccagtcgtaactgcagaagacgcttccttagaagacagcaaactggaagactcagtgcctttaacagaaatgcctgaagcagtggatgtagatgagagccagttggagaatgtatgtctgagttggcagaatgagacatcaagtggaaacctagagtcctgcgctcaagctcgaagagtaactggtgggttactagatcgactggatgacagccctgaccagtgtagagattccattacctcatatctcaaaggagaagctggcaaatttgaagcaaatggaagccatacagaaatcactccagaagcaaagacaaaatcttactttccagaatcccaaaatgatgtaggaaaacagagtaccaaggaaactctgaaaccaaaaatacatggatctggtcatgttgaagaaccagcatcaccactagcagcatatcagaaatctctagaagaaaccagcaagcttataatagaagagactaaaccctgtgtgcctgtcagtatgaaaaagatgagtaggacttctccagcagatggcaagccaaggcttagcctccatgaagaagaggggtccagtgggtctgagcaaaagcagggagaaggttttaaggtgaaaacgaagaaagaaatccggcatgtggaaaagaagagccactcgtaacagcgaacggtcagtcaaggatcataagtttttactgccagtattgagaaattcgtggaagaaatgtcagcaggaagtaaaaattcaccgagaagtgtgtgtgtgttcgctgcttccacacattaatggcatgattttttttatgcaaaaagaaaagaaaagaaaaccacccacattttaatttagcatgagccaatttacagagcatggaaatcactttcatttccggattggcgcgtgtgcaattagcaatgcagtgtatatacaagaagccatgctgttaacagtttatctcaagtaatttggtgtcatttacaaaaggaagaaattcctgccatcagaagggacagaaggagatggaatgatcaaatcacagagaaacactaaaattactaaatctacaacagctcgccttatttttcttggacccaaactgtcagggtataaacactatttgtttcttttttaaaacatcgatagttttgctgtaaataataacactgtataaattctaacagaaaaatagaataaaatgttgataaggcactgcctcttagaacacaaacagaatattgcaaatgcatttaacaaataggggtctcaagtgacttcaccctagaagaggagggagggattctgggtgggggtgactcttcactgattcttgtatattagcaattataatgtttgtatatgcaaaactgctagcttgattttaaaaaaaaacaaatctttaaaatctgctgcaaatttaaataattcccaaaatgaggaattctgtagttctgtgaaaaatttttttcttcagaatactaatattttgatgcatgtgtatcaccttattttgattaaatcttttccaattttgcaaacactacagtatactgcaacacaaaagattttatctgtaaacacaaagcccttcatctaatatttgttgctattgccaatttttcaatgaaatgacctaaaaacaacaaaaaaaaataacctatacggtagttgctttagggggtggggggatgctatctgttagtgcttaaaagggggtaaatgcttgccgctttagaggtggatggtgctcataaaaggccccagtcgggggtatttaaaaaggactgaacagaaatccttagctagtagaatggcagcacgctgtaaaattattactgtattgtgtactggctataagatgtagacacctttcagtaagccaatcatttgtaaccattctagcagtgtcatattaggttaataaggctgctgtgttttaaagggcatttttatttgggttttggtgaaattctttaatttgttgattatattcacataaaatcagcattcattgacacatagctctaatgacatatgtatgaaaaaccatacactggatgacctagtcgattatttaagcataaaataaattgtgttaaactcttcaccta

SEQ ID NO: 12674 - DNA, 14771 bp, Homo sapiens
ggacaccatcatttgggtttttaaaagcttcagcttctccagcatctttgcattgtgaatatcttcctgcttctagtcaaagctttctctctagtgattggaatgctgctgtaagcctgattagaggtgcctgaggatatcaccttttacaaggaagccgtgtgtgcttgagaggatctttttaaatgcattatggctcatgcagcctcacaattaaagaaaaacagggatttagaaatcaatgctgaagaagagcctgagaaaaaaaggaaacaccgcaaacggtcccgggatcggaagaaaaagtctgatgccaatgcaagttacttaagagcagctcgagctggacaccttgaaaaggccctcgactacataaaaaatggagttgacatcaacatttgcaatcagaatgggttgaacgctctccaccttgcttccaaagaaggccatgtagaggttgtttctgagctgctgcagagagaagccaatgtggatgcagctacaaagaaaggaaacacagcattgcacatcgcatctttggctgggcaagcagaggtggtaaaagtcttggttacaaatggagccaatgtcaatgcacaatctcagaatggtttcacgccattgtatatggcagcccaggaaaatcacctggaagttgtcaagtttcttcttgacaatggtgcaagccagagcctagccacagaggatggcttcacaccattggcagtggctttgcaacaaggtcacgaccaagtcgtttcgctcctgctagagaatgacaccaaaggaaaagtgcgtctcccagctcttcatatcgcggcccgaaaagacgacacgaaagccgccgccctgctgctgcagaatgacaacaatgcagatgtggaatcaaagagtggcttcactccgctccacatagctgctcactatggaaatatcaatgtagccacgttgctgttaaaccgagcggctgctgtggatttcaccgcaaggaatgacatcactcctttacatgttgcatcaaaaagaggaaatgcaaatatggtaaaactattgctcgatcgaggagctaaaatcgatgccaaaaccagggatggtctgacaccactgcactgtggagcaaggagtggccacgagcaggtggtagaaatgttgcttgatcgagctgcccccattctttcaaaaaccaagaatggattatctccattgcacatggccacacaaggggatcatttaaactgcgtccagcttctcctccagcataatgtacccgtggatgatgtcaccaatgactacctgactgccctacacgtggctgcccactgtggccattacaaagttgccaaggttctcttggataagaaagctaaccccaatgccaaagccctgaatggctttacccctcttcatattgcctgcaagaagaatcgaattaaagtaatggaactccttctgaaacacggtgcatccatccaagctgtaaccgagtcgggccttaccccaatccatgttgctgccttcatggggcatgtaaatattgtatcacaactaatgcatcatggagcctcaccaaacaccaccaatgtgagaggagaaacagcactgcacatggcagctcgctccggccaagctgaagttgtgcggtatctggtacaagacggagctcaggtagaagctaaagctaaggatgaccaaacaccactccacatttcagcccgactggggaaagcagacatagtacaacagctgttgcagcaaggggcatctccaaatgcagccacaacttctgggtacaccccacttcacctttccgcccgagaggggcatgaggatgtggccgcgttccttttggatcatggagcgtctttatctataacaacaaagaaaggatttactcctcttcatgtggcagcaaaatatggaaagcttgaagtcgccaatctcctgctacagaaaagtgcatctccagatgctgctgggaagagcgggctaacaccactgcatgtagctgcacattacgataatcagaaagtggcccttctgcttttggaccaaggagcctcacctcacgcagccgcaaagaatggttatacgccactgcacatcgctgccaaaaagaaccagatggacatagcgacaactctgctggaatatggtgctgatgccaacgcagttacccggcaaggaattgcttccgtccatctcgcagctcaggaagggcacgtggacatggtgtcgctgctcctcggtagaaatgcgaatgtgaacctgagcaataagagcggcctgaccccactccatttggctgctcaagaagatcgagtgaatgtggcagaagtcctcgtaaaccaaggggctcatgtggacgcccagacaaagatgggatacacaccactgcatgtgggctgccactatggaaatatcaagattgttaatttcctgctccagcattctgcaaaagttaatgccaaaacaaagaatgggtatacgccattacatcaagcagcacagcaggggcatacgcatataataaatgtcttacttcagaacaacgcctcccccaatgaactcactgtgaatgggaatactgcccttggcattgcccggcgcctcggctacatctcagtagtggacaccctgaagatagtgaccgaagagaccatgaccacaactactgtcacagagaagcacaaaatgaatgttccagaaacgatgaatgaagttcttgatatgtctgatgatgaagttcgtaaagccaatgcccctgaaatgctcagtgatggcgaatatatctcagatgttgaagaaggtgaagatgcaatgaccggggacacagacaaatatcttgggccacaggaccttaaggaattgggtgatgattccctgcctgcagagggttacatgggctttagtctcggagcgcgttctgccagcctccgctccttcagttcggataggtcttacaccttgaacagaagctcctatgcacgggacagcatgatgattgaagaactccttgtgccatccaaagagcagcatctaacattcacaagggaatttgattcagattctcttagacattacagctgggctgcagacaccttagacaatgtcaatcttgtttcaagccccattcattctgggtttctggttagctttatggtggacgcgagagggggctccatgagaggaagccgtcatcacgggatgagaatcatcattcctccacgcaagtgtacggcccccactcgaatcacctgccgtttggtaaagagacataaactggccaacccaccccccatggtggaaggagagggattagccagtaggctggtagaaatgggtcctgcaggggcacaatttttaggccctgtcatagtggaaatccctcactttgggtccatgagaggaaaagagagagaactcattgttcttcgaagtgaaaatggtgaaacttggaaggagcatcagtttgacagcaaaaatgaagatttaaccgagttacttaatggcatggatgaagaacttgatagcccagaagagttagggaaaaagcgtatctgcaggattatcacgaaagatttcccccagtattttgcagtggtttcccggattaagcaggaaagcaaccagattggtcctgaaggtggaattctgagcagcaccacagtgccccttgttcaagcatctttcccagagggtgccctaactaaaagaattcgagtgggcctccaggcccagcctgttccagatgaaattgtgaaaaagatccttggaaacaaagcaacttttagcccaattgtcactgtggaaccaagaagacggaaattccataaaccaatcacaatgaccattccggtgcccccgccctcaggagaaggtgtatccaatggatacaaaggggacactacacccaatctgcgtcttctctgtagcattacagggggcacttcgcctgctcagtgggaagacatcacaggaacaactcctttgacgtttataaaagattgtgtctcctttacaaccaatgtttcagccagattttggcttgcagactgccatcaagttttagaaactgtggggttagccacgcaactgtacagagaattgatatgtgttccatatatggccaagtttgttgtttttgccaaaatgaatgatcccgtagaatcttccttgcgatgtttctgcatgacagatgacaaagtggacaaaactttagagcaacaagagaattttgaggaagtcgcaagaagcaaagatattgaggttctggaaggaaaacctatttatgttgattgttatggaaatttggccccacttaccaaaggaggacagcaacttgtttttaacttttattctttcaaagaaaatagactgccattttccatcaagattagagacaccagccaagagccctgtggtcgtctgtcttttctgaaagaaccaaagacaacaaaaggactgcctcaaacagcggtttgcaacttaaatatcactctgccagcacataaaaaggagacagagtcagatcaagatgatgagattgagaaaacagatagacgacagagcttcgcatccttagctttacgtaagcgctacagctacttgactgagcctggaatgattgaacggagtacaggagcaacaagatccctccccaccacttactcatacaagccattcttttctacaagaccataccagtcctggacaacagctccgattacagtgcctgggccagccaagtcaggcttcacttccttatcaagttcttcctctaatacgccatcagcttctccgttaaaatcaatatggtctgtttcgacaccttctccaatcaaatccacattaggcgcgtcaactacatcttcagttaaatccattagtgacgtggcatctccaattagatcctttcggacaatgtcttcgccgataaaaactgtggtgtcacaatctccatacaatatccaagtttcctctggtaccctggctagagctccagcagtcacggaagctacgcccttaaaagggctggcatccaattctacgttttcctctcgaacctctccagtgactacagcagggtctcttttggagaggtcatcaattactatgacaccccctgcctcccccaaatcaaacattaatatgtattcctcaagtttgccatttaagtcaattattacatcagcagcaccgctaatatcttcacctttaaagtcagtggtgtctccagttaaatcagcagttgatgtcatttcatcagccaaaattacaatggcatcttctctctcatcacctgtgaagcagatgcctggacatgcagaggtagcattagtcaatggatctatttcccctctaaaatatccatcatcctcaactttaattaatggatgcaaagccactgccacgttacaggaaaaaatttcttctgctacaaactctgtgagctctgtggtcagtgcagccactgacacagttgagaaagtgttttctaccacgactgcaatgccattttccccactcaggtcatatgtttctgcagcaccatcagcttttcagtctctaagaactccttccgcaagtgcactctatacatcccttgggtcgtcaatatctgcaactacctcatctgtaacttcatcaattataacagtgccagtatactctgtagtcaatgttttgccagaaccagcattaaagaaacttccagactctaattcatttacaaaatcagcagcagccttgctgtcacccattaaaacattgactacggagacacatcctcagcctcacttcagtcgaacttcatctccagttaagtcatctttgttccttgcaccctctgcccttaagttgtctacaccatcttctttatcttccagtcaggagatactaaaagatgtagctgaaatgaaagaggacctaatgcggatgaccgcaatactacagacagatgtgcctgaggagaagccattccaacctgaactcccaaaggaagggagaatagatgatgaagaacctttcaaaattgtagagaaagtaaaggaagacttagtgaaagttagtgaaatccttaaaaaggatgtatgtgtagataataaaggatcacccaaatcaccaaagagtgacaaaggacactctcctgaagatgactggatagaatttagttcggaagaaatccgggaagccagacaacaagctgctgcgagccagtctccatctctgccagagagagtgcaagtaaaagcaaaagccgcctccgaaaaggattataacttgaccaaagttattgattacctaacaaatgatattgggagtagttcactgacaaacttaaaatacaagtttgaggatgcaaagaaggatggtgaggagagacagaaaagagttttaaaaccagcaattgctttgcaggaacacaaactcaaaatgcctccagcctccatgaggacttccacctctgagaaagaattgtgtaaaatggctgattccttttttggaacagatactattttagagtctcctgatgacttttctcaacacgaccaagataaaagtcccttgtctgacagtggctttgaaacaagaagtgaaaagacaccttcagccccacaaagcgctgaaagcactggtcctaaaccactttttcatgaagttcccatccctcctgtcattacagaaacaagaactgaagtggttcatgttatcaggagctatgatccctcagctggggatgttccccagacccaaccagaggagcctgtgtcacctaaaccttcacctacttttatggaattggaaccaaagcccaccacctctagtattaaagaaaaggttaaagcatttcaaatgaaagccagtagtgaagaagatgaccacaatcgggttttaagcaaaggcatgcgtgttaaagaagagactcacataaccacaaccaccagaatggtttatcattctccaccaggcggtgaaggtgcatctgaaagaattgaagaaaccatgtcagtccatgacatcatgaaggcctttcagtccgggcgggatccttccaaagaactggcaggtctgtttgaacataagtcggcagtgtctccagatgttcacaagtctgctgctgaaacctcagcccagcatgcagagaaggacaaccaaatgaaacccaaactggagcgtataatagaagtccacatcgaaaaaggtaaccaagctgagcccactgaagtcattattagagaaaccaaaaagcatccagaaaaagaaatgtatgtatatcagaaagacttatcccggggagatattaacctaaaagattttctgccagaaaaacacgatgcttttccttgttcagaggaacagggtcagcaagaagaagaagaacttactgctgaagagtcattgccttcttatctggagtcttccagagtaaacactcctgtgtcccaagaagaagatagccgccctagttctgctcaactcatatctgatgactcttataaaacattgaagcttttgagtcaacactcaatagaataccatgacgatgagttgtcagaactaagaggggagtcttacaggtttgctgagaaaatgcttctgtcagaaaagctagatgtgtctcattctgatactgaggaatcggttacagaccatgcaggaccccctagctcagagttacaggggtctgataagcggtccagagaaaaaatagccactgcccccaaaaaagaaattctctccaaaatctataaagatgtttctgaaaatggtgtaggtaaagtgtctaaagatgagcattttgataaagtgacagtgttgcactattctggcaatgttagtagtccaaaacatgccatgtggatgcgctttactgaggacagattagacagaggtagagagaagttgatatatgaagatagggtggacaggactgtgaaggaggctgaagaaaaactgactgaagtgtcacagttttttcgtgacaaaactgaaaagctaaatgatgaactgcagtccccagagaaaaaggcacgccctaaaaatggcaaagaatattcttctcaaagccctaccagtagcagccctgagaaagtgctactgacagaactgctggcatccaatgatgagtgggttaaggcaagacagcatggccctgatggacaaggcttccccaaggccgaggagaaggcacccagtctgcccagcagcccagagaagatggttctctcccaacagactgaggacagcaagtccacagtggaagccaaaggaagtatttcacagagcaaagcaccagatgggccccagtctggattccagctcaaacaatctaaactcagttccattagattaaaatttgaacaaggcacacacgcaaaaagtaaggacatgtctcaagaagacagaaagtcagatggccagtccagaatcccagttaaaaaaatacaggagagcaagctacccgtctaccaagtttttgctagagaaaaacagcagaaggccatagacctcccagatgaaagtgtatctgtgcaaaaagattttatggtattaaaaaccaaagatgagcatgcccaaagcaacgaaattgttgtaaatgattctggctctgataatgtgaaaaaacagagaactgaaatgtcaagtaaagcaatgcctgactctttttctgagcagcaggctaaagacttggcatgtcatataacctcagatttagcaactaggggaccatgggacaaaaaggtctttagaacatgggagagttcgggagccactaacaataagtctcagaaagaaaaactttcgcatgtacttgttcatgatgtaagagagaatcacattggtcaccctgagagtaaaagtgttgatcaaaagaatgaatttatgtctgtgactgagagagaacgcaaattgttaacaaacggctctctctcagaaattaaagaaatgactgtaaaatctccctccaaaaaagtcttatatagggaatatgttgtgaaagaaggggaccatccaggcggattgcttgatcagccttccaggaggagcgagagctcagcagtgtcacacattcccgtcagagttgctgatgagaggagaatgctgtcttctaatattcccgatggtttttgtgaacagtcggcatttccaaaacatgaactatcacaaaaattgtcccagtcaagcatgagtaaagagacagttgagacacagcactttaattctatagaagatgaaaaagttacctattcagaaatcagcaaagtttccaaacaccagagttatgtaggtttatgcccacctctcgaggaaaccgaaacctcccccaccaaatctcctgattctttagagtttagcccaggaaaggaatctccctctagtgatgtattcgaccacagtcccattgatggattggaaaaactcgcaccactagcccagacagagggagggaaagagataaaaactttacccgtttatgtcagttttgtacaagtggggaagcaatatgaaaaggagatacaacaaggaggtgtaaaaaaaatcataagtcaggaatgtaagacagtacaagaaaccagggggaccttttatacaactagacagcaaaagcaacctccttctccccaaggtagtccagaagatgatactctagagcaagtatcctttctagacagctctgggaaaagccctttaaccccagaaacacccagttcagaggaagtgagttatgaatttacatctaagacacctgactcgctcatagcttatataccaggcaaacccagcccaattcccgaggtttctgaggagtcagaggaggaggaacaggccaagtcaacctcccttaagcagactacagtggaggaaacagcagttgagcgtgaaatgcctaatgacgtgagcaaagactctaaccaaagacccaaaaataacagagttgcctatattgaatttccccctcctccaccactggatgcggaccagattgagtcagataagaagcatcattatctcccagaaaaagaggttgacatgattgaagtcaatctgcaagatgagcatgacaagtaccagctggctgaacctgtcattagagtgcagccaccttcaccagttcctcccggggcagacgtcagtgattcaagcgatgacgaatctatttatcagccagtcccagttaaaaaatataccttcaaattaaaggaagtggacgatgaacaaaaagaaaaacccaaagcttctgctgaaaaggcttccaaccagaaagaactggaaagtaatggatctggaaaagataatgaatttggccttggccttgattcacctcagaatgaaattgcccagaatgggaacaacgaccagtccatcacagagtgttccattgccaccacagcagagttttctcatgacacggatgccacagagatcgactctctggatggctatgacctgcaagatgaagatgatggcttgacagagagtgattctaaactcccaattcaagccatggaaattaagaaagatatctggaacacagagggcattctgaagccagctgaccgctcttttagccaaagtaaacttgaagttatcgaggaggagggaaaggtgggaccagatgaggacaagccaccttctaaaagttcttcatctgaaaagactcctgataagactgatcagaagtcaggggcccagttcttcacactggaaggcagacatcctgacagatcagtgtttcctgatacttacttcagttacaaagtagatgaagaatttgccactccttttaaaacagtagctaccaaaggtctagattttgacccttggtctaataaccgaggggatgatgaagtttttgacagtaaatcacgggaagatgaaactaagccatttgggctggcggtagaagaccgctctccagcaacaacccctgatacaacgccagccagaacgccaactgatgaaagtaccccaactagtgagcctaaccccttcccatttcatgaaggaaaaatgtttgagatgactcgcagtggtgcaattgacatgagcaagagggattttgttgaagagaggctccaatttttccagattggtgagcatacttctgaagggaagtcaggggaccagggggaaggggataaaagtatggtcactgccacaccacagccacagtcaggggacaccactgtagaaaccaatctagagagaaatgtagagacacctacagtggaacctaaccccagcatcccgaccagcggagagtgtcaggaaggcacatccagtagtggctccctggagaaatcagcagcagccactaacacctctaaagttgaccccaagttgcgcacgcctataaaaatgggaatttctgcatccaccatgaccatgaagaaagaaggccctggagaaataacagataagatagaagcggtgatgaccagttgtcagggattagaaaatgaaactataacaatgatttcaaatacagccaatagccagatgggcgttaggccccatgaaaaacatgattttcaaaaagataactttaataacaacaacaatttggattcttccactatacagacagataacattatgagtaatatagttctgacagaacattctgcacccacttgtaccacagagaaagataacccagtgaaagtctcatcaggaaaaaagacaggggtactacaaggacactgtgtaagagataagcagaaagttcttggagaacagcaaaaaacaaaggaattgatagggattaggcaaaaatccaaacttcccataaaggccacttcaccaaaagataccttcccaccgaaccatatgtcaaacactaaagcaagtaaaatgaagcaggttagtcaatccgagaaaaccaaagcccttactacttcttcatgtgtagatgtaaagtccagaattccagtgaaaaacacacacagggataacataattgcagttagaaaagcatgtgccacacaaaagcaagggcagccagagaaaggcaaggccaaacagcttccatccaagttgccagtaaaggtaagatccacctgtgtcactaccaccaccaccactgccaccaccaccaccactaccaccactaccaccaccaccagctgcacagttaaagttaggaaaagtcagctcaaggaagtatgtaaacattccattgaatattttaagggaattagtggtgagaccttaaagcttgtggaccgcctctctgaagaagaaaaaaagatgcagtccgagttgtccgatgaggaagaaagtacctcaagaaacacgtcgttgtccgagacttcccggggtggccagccttcggttacaacgaagtctgctagagataagaaaacagaggcagcacctttaaaatcaaagagtgaaaaggccggcagtgagaaaaggagcagtagaaggactggtccacagagtccatgtgaacggacagatatcaggatggcaatagtagccgatcacctgggacttagttggacagaactggcaagggaactgaatttttcagtggatgaaatcaatcaaatacgtgtggaaaatccaaattctttaatttctcagagcttcatgttattaaaaaaatgggttaccagagacggaaaaaatgccacaactgatgccttaacttcggtcttgacaaaaattaatcgaatagatatagtgacactgctagaaggaccaatatttgattatggaaatatttcaggcaccagaagttttgcagatgagaacaatgttttccatgaccctgttgatggttggcagaatgagacatcaagtggaaacctagagtcctgcgctcaagctcgaagagtaactggtgggttactagatcgactggatgacagccctgaccagtgtagagattccattacctcatatctcaaaggagaagctggcaaatttgaagcaaatggaagccatacagaaatcactccagaagcaaagacaaaatcttactttccagaatcccaaaatgatgtaggaaaacagagtaccaaggaaactctgaaaccaaaaatacatggatctggtcatgttgaagaaccagcatcaccactagcagcatatcagaaatctctagaagaaaccagcaagcttataatagaagagactaaaccctgtgtgcctgtcagtatgaaaaagatgagtaggacttctccagcagatggcaagccaaggcttagcctccatgaagaagaggggtccagtgggtctgagcaaaagcagggagaaggttttaaggtgaaaacgaagaaagaaatccggcatgtggaaaagaagagccactcgtaacagcgaacggtcagtcaaggatcataagtttttactgccagtattgagaaattcgtggaagaaatgtcagcaggaagtaaaaattcaccgagaagtgtgtgtgtgttcgctgcttccacacattaatggcatgattttttttatgcaaaaagaaaagaaaagaaaaccacccacattttaatttagcatgagccaatttacagagcatggaaatcactttcatttccggattggcgcgtgtgcaattagcaatgcagtgtatatacaagaagccatgctgttaacagtttatctcaagtaatttggtgtcatttacaaaaggaagaaattcctgccatcagaagggacagaaggagatggaatgatcaaatcacagagaaacactaaaattactaaatctacaacagctcgccttatttttcttggacccaaactgtcagggtataaacactatttgtttcttttttaaaacatcgatagttttgctgtaaataataacactgtataaattctaacagaaaaatagaataaaatgttgataaggcactgcctcttagaacacaaacagaatattgcaaatgcatttaacaaataggggtctcaagtgacttcaccctagaagaggagggagggattctgggtgggggtgactcttcactgattcttgtatattagcaattataatgtttgtatatgcaaaactgctagcttgattttaaaaaaaaacaaatctttaaaatctgctgcaaatttaaataattcccaaaatgaggaattctgtagttctgtgaaaaatttttttcttcagaatactaatattttgatgcatgtgtatcaccttattttgattaaatcttttccaattttgcaaacactacagtatactgcaacacaaaagattttatctgtaaacacaaagcccttcatctaatatttgttgctattgccaatttttcaatgaaatgacctaaaaacaacaaaaaaaaataacctatacggtagttgctttagggggtggggggatgctatctgttagtgcttaaaagggggtaaatgcttgccgctttagaggtggatggtgctcataaaaggccccagtcgggggtatttaaaaaggactgaacagaaatccttagctagtagaatggcagcacgctgtaaaattattactgtattgtgtactggctataagatgtagacacctttcagtaagccaatcatttgtaaccattctagcagtgtcatattaggttaataaggctgctgtgttttaaagggcatttttatttgggttttggtgaaattctttaatttgttgattatattcacataaaatcagcattcattgacacatagctctaatgacatatgtatgaaaaaccatacactggatgacctagtcgattatttaagcataaaataaattgtgttaaactcttcaccta

SEQ ID NO: 12675 - DNA, 2889 bp, Homo sapiens
ctggctgccggctgctgccaccgcaatcccggctcctaaatcagcgcggggaggcgctccctccccacgcccggctctccgggctctcggggccgcgattggccgcgccggcgccccccaccccgggcccccggctccagctgccgcgccattggctgcgggcctccgccagcctttacataagaccgggcgcgctcgagtggagttgtataaagcgagcgcgcggcgtcggggcgggaggctcgaggccagcccgggaccggggctgggagcaagcaggcggcggcgccggcggcagaggcggcagcgagcgcccgcttcccacgcccctaggcggcggggccgagagcgggaggatggctccgagcgctgaccccggcatgtccaggatgttaccgttcctgctgctgctctggtttctgcccatcactgaggggtcccagcgggctgaacccatgttcactgcagtcaccaactcagttctgcctcctgactatgacagtaatcccacccagctcaactatggtgtggcagttactgatgtggaccatgatggggactttgagatcgtcgtggcggggtacaatggacccaacctggttctgaagtatgaccgggcccagaagcggctggtgaacatcgcggtcgatgagcgcagctcaccctactacgcgctgcgggaccggcaggggaacgccatcggggtcacagcctgcgacatcgacggggacggccgggaggagatctacttcctcaacaccaataatgccttctcgggggtggccacgtacaccgacaagttgttcaagttccgcaataaccggtgggaagacatcctgagcgatgaggtcaacgtggcccgtggtgtggccagcctctttgccggacgctctgtggcctgtgtggacagaaagggctctggacgctactctatctacattgccaattacgcctacggtaatgtgggccctgatgccctcattgaaatggaccctgaggccagtgacctctcccggggcattctggcgctcagagatgtggctgctgaggctggggtcagcaaatatacagggggccgaggcgtcagcgtgggccccatcctcagcagcagtgcctcggatatcttctgcgacaatgagaatgggcctaacttccttttccacaaccggggcgatggcacctttgtggacgctgcggccagtgctggtgtggacgacccccaccagcatgggcgaggtgtcgccctggctgacttcaaccgtgatggcaaagtggacatcgtctatggcaactggaatggcccccaccgcctctatctgcaaatgagcacccatgggaaggtccgcttccgggacatcgcctcacccaagttctccatgccctcccctgtccgcacggtcatcaccgccgactttgacaatgaccaggagctggagatcttcttcaacaacattgcctaccgcagctcctcagccaaccgcctcttccgcgtcatccgtagagagcacggagaccccctcatcgaggagctcaatcccggcgacgccttggagcctgagggccggggcacagggggtgtggtgaccgacttcgacggagacgggatgctggacctcatcttgtcccatggagagtccatggctcagccgctgtccgtcttccggggcaatcagggcttcaacaacaactggctgcgagtggtgccacgcacccggtttggggcctttgccaggggagctaaggtcgtgctctacaccaagaagagtggggcccacctgaggatcatcgacgggggctcaggctacctgtgtgagatggagcccgtggcacactttggcctggggaaggatgaagccagcagtgtggaggtgacgtggccagatggcaagatggtgagccggaacgtggccagcggggagatgaactcagtgctggagatcctctacccccgggatgaggacacacttcaggacccagccccactggagtgtggccaaggattctcccagcaggaaaatggccattgcatggacaccaatgaatgcatccagttcccattcgtgtgccctcgagacaagcccgtatgtgtcaacacctatggaagctacaggtgccggaccaacaagaagtgcagtcggggctacgagcccaacgaggatggcacagcctgcgtggggactctcggccagtcaccgggcccccgccccaccacccccaccgctgctgctgccactgccgctgctgctgccgctgctggagctgccactgctgcaccggtcctcgtagatggagatctcaatctggggtcggtggttaaggagagctgcgagcccagctgctgagcaggggtgggacatgaaccagcggatggagtccagcaggggagtgggaaagtgggcttgtgctgctgcctagacagtagggatgtaaaggcctgggagctagaccctccccaagcccatccatgcacattacttagctaacaattagggagactcgtaaggccaggccctgtgctgggcacatagctgtgatcacagcagacagggtcgctgccctgatggcgcttacattccagtgggtctaatgaccatatcttaggacacagatgtgcccagggaggtggtgtcactgcacaggaagtatgaggactttagtgtcctgagttcaaatcctgattcaggaactcacaaagctatgtgaccttacaccagtcacttaacttgttagccatccattatcgcatctgcaaaatggggattaagaatagaatcttggggttagtgtggagattagattaaatgtatgtaagacacttggcacaaaacctggcacatagtaaaggctcaataaaaacaagtgcctctcactgggctttgtcaacacgtg

SEQ ID NO: 12676 - DNA, 5363 bp, Homo sapiens
cagccggcggcgggctgggtgtttgcaatacaaaggcggccacgcgcggcgccgctcggtgcagaccatgaattacgtggggcagttagccggccaggtgtttgtcaccgtgaaggagctctacaaggggctgaatcccgccacactctcagggtgcattgacatcattgtcatccgccagcccaatggaaacctccaatgctcccctttccacgtccgctttgggaagatgggggtcctgcgctcccgagagaaagtggttgacatagaaatcaatggggaatctgtggatttgcatatgaaattgggagataatggagaagcattttttgttcaagaaacagataatgatcaggaagttatccctatgcacctggccacctcccccatcctgtcagaaggagcttcgagaatggaatgccagctgaaaaggggctctgtggacaggatgagaggcctggaccccagcacgccagcccaagtgatcgctcccagcgagacgccgtcaagcagctctgtagtaaagaagagaagaaaaaggaggagaaagtcacagctggacagcctgaagagagatgacaacatgaacacatctgaggatgaggacatgttccccatcgagatgagctcggatgaggccatggagctgctggagagcagcagaactcttcctaatgatatacctccattccaagatgatattcctgaggaaaacctctccctggctgtgatttaccctcagtcagcctcataccctaattcggatagagagtggtcacccactcccagtccttccggttcccgaccttcaacacctaaaagtgattcagaattggtcagcaagtccacggaaaggacagggcagaagaacccagaaatgctttggctgtggggagagctgccgcaggctgctaagtcttcttctccacacaagatgaaagagtccagcccattgagcagtagaaaaatttgtgataaaagtcactttcaggccattcacagcgaatcttcagacacttttagtgaccaatcgccaactctggtcggtggggcacttttggaccagaacaagcctcagacagaaatgcagtttgtgaatgaagaagacctggagaccttaggagcagcagcgccactcttgcccatgatcgaggagctcaaacccccctctgccagtgtagtccagacagcaaacaagacggattctccttccaggaaaagagataaacgaagccgacatcttggtgctgacggcgtctacttggatgacctcacagacatggatcctgaagtggcggccctgtattttcccaaaaacggagatccttccggactcgcaaaacatgcaagcgacaacggagcccggtcagccaaccagtccccgcagtcggtgggcagctcgggcgtggacagtggcgtggagagcacctcggacgggctgagggacctcccttccatcgccatctccctctgcgggggcctcagcgaccaccgggagatcacgaaagatgcattcctggagcaagctgtgtcatatcaacagtttgtggacaaccccgctattatcgatgaccccaatctcgtggtaaagattgggagtaaatattataactggacaacagcagcacccctcctcctggcaatgcaggccttccagaaacctttgccaaaggccactgtggaatctatcatgagggataaaatgcccaaaaagggaggaagatggtggttttcatggaggggaagaaacaccacaatcaaggaggaaagtaagccagagcagtgcttggctggcaaggcccatagcaccggagagcaaccgccgcagctcagcttggccaccagggtaaagcatgaatcatcctccagtgatgaggagcgcgcagctgccaagccatcaaacgcaggccacctccctcttctgcctaatgtcagctacaagaagactctccggctgacttccgagcagcttaaaagcttgaagttgaagaatggccccaacgacgtggttttcagtgtcaccacgcagtaccaaggcacgtgccgctgtgagggcaccatctatctgtggaactgggatgataaagtcatcatttctgatattgatgggacaattaccagatcagatactcttggccacattttgcccacccttgggaaggattggacccatcagggcatcgctaagctgtaccataaagtgagccagaatggatataaatttctctactgttctgcccgtgccatcgggatggcggacatgacgcggggctacctgcactgggtcaacgagaggggcacggtgctgccccaggggcccctgctgctgagtcccagcagcctcttctctgccctgcacagagaagtgattgaaaagaagccagaaaagtttaaagtccagtgtttgacagacatcaaaaacctgtttttccccaacacagaacccttttatgctgcttttggaaaccgaccagctgatgtgtattcatacaagcaagtaggagtgtctttgaatagaatatttaccgtcaaccctaaaggagagctggtacaggaacatgcaaagaccaacatctcttcgtatgtgagactctgtgaagtagtcgaccacgttttcccgttgctgaaaagaagccattcttcagactttccctgttcggataccttcagtaacttcaccttttggagagagccactgccaccttttgaaaaccaggacattcattctgcctcagcgtaaaatgtcccaagcagcctcttgccagcagtgcagagcctggttgtcacccattaaaggataggtctccccggagtgcacagctccacctgggagcctggcgcgtcatcattggcctgacagcagagagaattgagaagcatttctcccctgccccaccccggggctgacatttctaagcaagataggaagggagcactttctaggctaggagttgggtgcatttgtaccgtgaaaagcattcctcagttgtggcttaatgccagttacgacgctgcctttccggcctgctccagcaagtagctactggttcacgtgcagtttggggctgtgaaacctaggcagaaggcggctgtctgagggctgtccccgcctaggacagggtcaatcgaggaatgccagatgtgcacggtttttggcaaagtagggggcacatttccattatagcaatgttagtgccaccaccttctgaacacagtggggagggctgtgaaggctcatgtgacctggatctgaggtctctgatagaaatctggacgccaccgggtccaggcctggcctcagacttggccttgtggatgggccccttacagtatttgctgactagtctcatttttaggtgataaatttttctttaattcctttggttaaagatagtctatttcattggcatatctccccccagtttttgtggctcaaggctggaatatttatgccttaatatatctatggcagacatttaagaatgcgctttatctagctcatggtaactttgcaacgccttagattaaaatgacagtaaatattactaaggcagtattttgaatgagtttgacactgccggcttccttccatccagcgaggtggtgctgacagtgtggacttgagcacacttatgccaaatgataatgatactgacttctgttgggagctctccaaagaaactggttggttttaagaaaatagtttcaagaagttcaactatattcttttagatattatgtattgttttactctgattaggttactgtgataggcatttattcatattctttctataccactgtcattaatatattaaaaagatgtatgtgttagactatcgaaagggccttattctctctttctcatagactgaccttcttttggaatttctgagtcatttattttccttagctttttccactcaaattaagggcaagcgaaaaagtaataatttggcattctttaagcctacagaatgtgattctttcacttgtttattacactggctcgtggacagaacaatttgaaaagtgaaagaattattttggtaaaagattttgctttacttttcgaagcattatttttttaaagagtgttttactccaacgattgaaacattttcctatttaaatttcattgttagaatcacaggaggcaaaaaatggaacggttgaatgaaattttactctttctgtgaaagaaaatccacagagttgttgcctccgttgtagttggtgggccccgttagcattggatgcctttgccaaatggttcatgtggacacacaaaggcaaacagatctgccatcgatcgcagatttctgtagaaacacggatgtgcatgtgcagattcccttttgcaggtattaaaaataattaaaaatagtcctgcctgaggttgcagtgagccgagcttgcactactgcactccagcctgggtgacagagtaagactccatgtcaaaaaaaaaaaaaaaaaaaaaaaagtcctgccttaactaactcctctgcgcttgttcactagtaacctaaagaggctatattcattctttatgcaatgagggtatttttgagtgaattttaactgctctgaactaagtataagctcatgggcctgcaaaggttcagacggtttctcctttgcacccaggaggaactttggctgcgagaatggggggatgtatccctcatgcagttggcatccaggcagccctctgcagcagcacaccctgcaggcggagttttcagaggatgcaattttggatcccgaattttgatgtaccttaaacttccacatcactgcaccctgaaacagagcatgctttccagaaagtcacactctcagatctgtgtcaagttcaatgtgagccctggcaaggctggcatattaacacctgccttctggcttctgaaagtgagatttgtatatgggctgcactcacgcatatacgagttggtttatctttgtgtacatgactataacccagtgatgctgaggtcatgtgctggaatgctgtatttggaccacacatttcaaagttgccctatggaaatgaatcctacttagtgacaagtcatcaaatgtttgtcacatgtgatgaagacaaatatgtatacctggcatagagaaaaatatatacctggtacattggagaaaaataattacactttcaaagagaattccctttgcaattttatgtttggatcaccactgtaagcacactttatttgcatttgatctgtatttgtatatgctgatgcaatgataaaaatcactgtaatacttcattgtgttgtactggatgcaaagctagaaaatattgcaataaatgagaccgatgaaagacttctctgaaaaaaaaa

SEQ ID NO: 12677 - DNA, 7787 bp, Homo sapiens
gagacaaaggctgccgtcgggacgggcgagttagggacttgggtttgggcgaacaaaaggtgagaaggacaagaagggaccgggcgatggcagcaggggagccccgcgggcgcgcgtcctcgggagtggcgccgtgacacgcatggtttccccggacccgcggcggcgctgacttccgcgagtcggagcggcactcggcgagtccgggactgcgctggaacaatggataacttcttcaccgagggaacacgggtctggctgagagaaaatggccagcattttccaagtactgtaaattcctgtgcagaaggcatcgtcgtcttccggacagactatggtcaggtattcacttacaagcagagcacaattacccaccagaaggtgactgctatgcaccccacgaacgaggagggcgtggatgacatggcgtccttgacagagctccatggcggctccatcatgtataacttattccagcggtataagagaaatcaaatatatacctacatcggctccatcctggcctccgtgaacccctaccagcccatcgccgggctgtacgagcctgccaccatggagcagtacagccggcgccacctgggcgagctgcccccgcacatcttcgccatcgccaacgagtgctaccgctgcctgtggaagcgctacgacaaccagtgcatcctcatcagtggtgaaagtggggcaggtaaaaccgaaagcactaaattgatcctcaagtttctgtcagtcatcagtcaacagtctttggaattgtccttaaaggagaagacatcctgtgttgaacgagctattcttgaaagcagccccatcatggaagctttcggcaatgcgaagaccgtgtacaacaacaactctagtcgctttgggaagtttgttcagctgaacatctgtcagaaaggaaatattcagggcgggagaattgtagattatttattagaaaaaaaccgagtagtaaggcaaaatcccggggaaaggaattatcacatattttatgcactgctggcagggctggaacatgaagaaagagaagaattttatttatctacgccagaaaactaccactacttgaatcagtctggatgtgtagaagacaagacaatcagtgaccaggaatcctttagggaagttattacggcaatggacgtgatgcagttcagcaaggaggaagttcgggaagtgtcgaggctgcttgctggtatactgcatcttgggaacatagaatttatcactgctggtggggcacaggtttccttcaaaacagctttgggcagatctgcggagttacttgggctggacccaacacagctcacagatgctttgacccagagatcaatgttcctcaggggagaagagatcctcacgcctctcaatgttcaacaggcagtagacagcagggactccctggccatggctctgtatgcgtgctgctttgagtgggtaatcaagaagatcaacagcaggatcaaaggcaatgaggacttcaagtctattggcatcctcgacatctttggatttgaaaactttgaggttaatcactttgaacagttcaatataaactatgcaaacgagaaacttcaggagtacttcaacaagcatattttttctttagaacaactagaatatagccgggaaggattagtgtgggaagatattgactggatagacaatggagaatgcctggacttgattgagaagaaacttggcctcctagcccttatcaatgaagaaagccattttcctcaagccacagacagcaccttattggagaagctacacagtcagcatgcgaataaccacttttatgtgaagcccagagttgcagttaacaattttggagtgaagcactatgctggagaggtgcaatatgatgtccgaggtatcttggagaagaacagagatacatttcgagatgaccttctcaatttgctaagagaaagccgatttgactttatctacgatctttttgaacatgtttcaagccgcaacaaccaggataccttgaaatgtggaagcaaacatcggcggcctacagtcagctcacagttcaaggactcactgcattccttaatggcaacgctaagctcctctaatcctttctttgttcgctgtatcaagccaaacatgcagaagatgccagaccagtttgaccaggcggttgtgctgaaccagctgcggtactcagggatgctggagactgtgagaatccgcaaagctgggtatgcggtccgaagaccctttcaggacttttacaaaaggtataaagtgctgatgaggaatctggctctgcctgaggacgtccgagggaagtgcacgagcctgctgcagctctatgatgcctccaacagcgagtggcagctggggaagaccaaggtctttcttcgagaatccttggaacagaaactggagaagcggagggaagaggaagtgagccacgcggccatggtgattcgggcccatgtcttgggcttcttagcacgaaaacaatacagaaaggtcctttattgtgtggtgataatacagaagaattacagagcattccttctgaggaggagatttttgcacctgaaaaaggcagccatagttttccagaagcaactcagaggtcagattgctcggagagtttacagacaattgctggcagagaaaagggagcaagaagaaaagaagaaacaggaagaggaagaaaagaagaaacgggaggaagaagaaagagaaagagagagagagcgaagagaagccgagctccgcgcccagcaggaagaagaaacgaggaagcagcaagaactcgaagccttgcagaagagccagaaggaagctgaactgacccgtgaactggagaaacagaaggaaaataagcaggtggaagagatcctccgtctggagaaagaaatcgaggacctgcagcgcatgaaggagcagcaggagctgtcgctgaccgaggcttccctgcagaagctgcaggagcggcgggaccaggagctccgcaggctggaggaggaagcgtgcagggcggcccaggagttcctcgagtccctcaatttcgacgagatcgacgagtgtgtccggaatatcgagcggtccctgtcggtgggaagcgaattttccagcgagctggctgagagcgcatgcgaggagaagcccaacttcaacttcagccagccctacccagaggaggaggtcgatgagggcttcgaagccgacgacgacgccttcaaggactcccccaaccccagcgagcacggccactcagaccagcgaacaagtggcatccggaccagcgatgactcttcagaggaggacccatacatgaacgacacggtggtgcccaccagccccagtgcggacagcacggtgctgctcgccccatcagtgcaggactccgggagcctacacaactcctccagcggcgagtccacctactgcatgccccagaacgctggggacttgccctccccagacggcgactacgactacgaccaggatgactatgaggacggtgccatcacttccggcagcagcgtgaccttctccaactcctacggcagccagtggtcccccgactaccgctgctctgtggggacctacaacagctcgggtgcctaccggttcagctctgagggggcgcagtcctcgtttgaagatagtgaagaggactttgattccaggtttgatacagatgatgagctttcataccggcgtgactctgtgtacagctgtgtcactctgccgtatttccacagctttctgtacatgaaaggtggcctgatgaactcttggaaacgccgctggtgcgtcctcaaggatgaaaccttcttgtggttccgctccaagcaggaggccctcaagcaaggctggctccacaaaaaaggggggggctcctccacgctgtccaggagaaattggaagaagcgctggtttgtcctccgccagtccaagctgatgtactttgaaaacgacagcgaggagaagctcaagggcaccgtagaagtgcgaacggcaaaagagatcatagataacaccaccaaggagaatgggatcgacatcattatggccgataggactttccacctgattgcagagtccccagaagatgccagccagtggttcagcgtgctgagtcaggtccacgcgtccacggaccaggagatccaggagatgcatgatgagcaggcaaacccacagaatgctgtgggcaccttggatgtggggctgattgattctgtgtgtgcctctgacagccctgatagacccaactcgtttgtgatcatcacggccaaccgggtgctgcactgcaacgccgacacgccggaggagatgcaccactggataaccctgctgcagaggtccaaaggggacaccagagtggagggccaggaattcatcgtgagaggatggttgcacaaagaggtgaagaacagtccgaagatgtcttcactgaaactgaagaaacggtggtttgtactcacccacaattccctggattactacaagagttcagagaagaacgcgctcaaactggggaccctggtcctcaacagcctctgctctgtcgtccccccagatgagaagatattcaaagagacaggctactggaacgtcaccgtgtacgggcgcaagcactgttaccggctctacaccaagctgctcaacgaggccacccggtggtccagtgccattcaaaacgtgactgacaccaaggccccgatcgacacccccacccagcagctgattcaagatatcaaggagaactgcctgaactcggatgtggtggaacagatttacaagcggaacccgatccttcgatacacccatcaccccttgcactccccgctcctgccccttccgtatggggacataaatctcaacttgctcaaagacaaaggctataccacccttcaggatgaggccatcaagatattcaattccctgcagcaactggagtccatgtctgacccaattccaataatccagggcatcctacagacagggcatgacctgcgacctctgcgggacgagctgtactgccagcttatcaaacagaccaacaaagtgccccaccccggcagtgtgggcaacctgtacagctggcagatcctgacatgcctgagctgcaccttcctgccgagtcgagggattctcaagtatctcaagttccatctgaaaaggatacgggaacagtttccaggaaccgagatggaaaaatacgctctcttcacttacgaatctcttaagaaaaccaaatgccgagagtttgtgccttcccgagatgaaatagaagctctgatccacaggcaggaaatgacatccacggtctattgccatggcggcggctcctgcaagatcaccatcaactcccacaccactgctggggaggtggtggagaagctgatccgaggcctggccatggaggacagcaggaacatgtttgctttgtttgaatacaacggccacgtcgacaaagccattgaaagtcgaaccgtcgtagctgatgtcttagccaagtttgaaaagctggctgccacatccgaggttggggacctgccatggaaattctacttcaaactttactgcttcctggacacagacaacgtgccaaaagacagtgtggagtttgcatttatgtttgaacaggcccacgaagcggttatccatggccaccatccagccccggaagaaaacctccaggttcttgctgccctgcgactccagtatctgcagggggattatactctgcacgctgccatcccacctctcgaagaggtttattccctgcagagactcaaggcccgcatcagccagtcaaccaaaaccttcaccccttgtgaacggctggagaagaggcggacgagcttcctagaggggaccctgaggcggagcttccggacaggatccgtggtccggcagaaggtcgaggaggagcagatgctggacatgtggattaaggaagaagtctcctctgctcgagccagtatcattgacaagtggaggaaatttcagggaatgaaccaggaacaggccatggccaagtacatggccttgatcaaggagtggcctggctatggctcgacgctgtttgatgtggagtgcaaggaaggtggcttccctcaggaactctggttgggtgtcagcgcggacgccgtctccgtctacaagcgtggagagggaagaccactggaagtcttccagtatgaacacatcctctcttttggggcacccctggcgaatacgtataagatcgtggtcgatgagagggagctgctctttgaaaccagtgaggtggtggatgtggccaagctcatgaaagcctacatcagcatgatcgtgaagaagcgctacagcacgacacgctccgccagcagccagggcagctccaggtgaaggcgggacagagcccacctgtctttgctacctgaacgcaccaccctctggcctaggctggctccagtgtgccatgcccagccaaaacaaacacagagctgcccaggctttctggaagcttctggtctgagggaggtgtctccgaggatccttttgcctgccgccttcattgatcctgtattaagctgtcaactttaacagtctgcacagtttccaaagctttactactcttagaggacacatgccttaaaaaaggaggggaggaaccacgctgccaccaaagcagccggaagtgccttaacttgtggaaccaacactaatcgaccgtaactgtgctactgaagggaactgcctttcccccttctgggggagacttaacagagcgtggaaggggggcattctctgtcaatgatgcactaacctcccaacctgatttccccgaatctgagggaaggtgagggagtgggaagggggatggagagctcgaggggacagtgtgtttgagctggagtgctgcgggcagcctttctcatggaatgacatgaatcaacttttttctttgtttcatcttttaagtgtacgtgcttgcctgttcgtgcatgtgttcataaactcaacactttaatcatggtttcatgagcattaaaaagcaaagggaaaaaggatgtgtaatggtgtacacagtctgtatattttaataatgcagagctatagtctcaattgttactttataaggtggttttattaacaaacccaaatcctggattttcctgtctttgctgtattttgaaaaacacgtgttgactccattgttttacatgtagcaaagtctgccatctgtgtctgctgtattataaacagataagcagcctacaagataactgtatttataaaccactcttcaacagctggctccagtgctggttttagaacaagaatgaagtcattttggagtctttcatgtctaaaagatttaagttaaaaacaaagtgttacttggaaggttagcttctatcattctggatagattacagatataataaccatgttgactatgggggagagacgctgcattccagaaacgtcttaacacttgagtgaatcttcaaaggaccctgacattaaatgctgaggctttaatacacacatattttatcccaagtttataatggtggtctgaacaaggcacctgtaaataaatcagcatttatgaccagaagaaaaataatctggtcttggactttttatttttatatggaaaagttttaaggacttgggccaactaagtctacccacacgaaaaaagaaatttgccttgtccctttgtgtacaaccatgcaaaactgtttgttggctcacagaagttctgacaataaaagatactagct

SEQ ID NO: 12678 - DNA, 4215 bp, Homo sapiens
gccgccgggcgccaggcctgagcggtgggagggctctgcggggcctggtgttcaggcgtcccaccacgagggtggagcagcgttggatacttgttccttagggaccgaagctccggtggcacccgggctatttctcagaggacaattagtaacgtgtcgccatgaggagccggagtaactccggggtccggctggacggctacgctcgactggtgcaacagaccatcctgtgccatcagaatccagtgactggcttgcttccagccagctatgatcagaaagatgcttgggtccgagataatgtgtacagcatcttggctgtgtggggtttgggcctggcctatcggaagaatgcagaccgggatgaggataaggcaaaggcctatgaattggagcagagtgtagtgaagctgatgagaggactactgcactgcatgatcagacaggtggataaagtagaatccttcaaatatagtcagagtactaaggatagcctccatgcaaagtacaacaccaaaacctgtgccactgtagtgggtgatgatcaatggggacacctgcagttggatgctacctctgtgtacctgctcttcttagcccaaatgactgcctcaggactccatatcatccacagcctagatgaagtcaatttcatacagaaccttgtgttttacattgaagctgcatataaaactgctgacttcgggatatgggaacgtggagacaagaccaaccaagggatctcagagttgaatgccagttcagttggaatggcaaaggcagccctggaagcattagatgaactggatctgtttggtgtgaaaggtgggcctcaatcagttatccatgtcctggctgatgaagtacagcactgccagtctatcctaaattcactactgccccgtgcttcaacatcaaaagaggttgatgctagtctactctcagtggtttccttccctgcctttgcagtagaggatagccagttggtggagctcacaaaacaggaaatcatcaccaagcttcagggtcgttatggttgctgtcgctttctacgagatggatataaaactcctaaagaggatcccaatcgtctgtactatgaaccagctgagctgaagctatttgaaaacattgagtgtgaatggccattgttctggacatactttattcttgatggggtcttcagtggcaatgcagaacaggttcaagaatataaagaggctcttgaagcagtcctcatcaagggcaaaaatggagtcccacttctgccagagctgtacagtgttcctcctgacagggtcgatgaagaatatcagaatcctcacactgtggaccgagtccccatggggaaattgcctcacatgtggggtcagtctctatacattttaggaagcttgatggcagagggatttttagcccctggagaaattgatcccctgaatcgcaggttttctactgtaccgaagcccgatgttgtggttcaagtctccattctagctgaaacagaagaaatcaagaccattttgaaggacaagggaatttacgtggagaccattgctgaggtataccccatcagagtacaaccagctcgtattctcagccacatttattccagcctaggatgcaacaatagaatgaaactcagtggacgaccctacagacacatgggagtgcttggaacttcaaaactctatgacattcggaaaactatctttactttcactccacagtttatagaccagcaacagttctacctggctctggacaacaagatgatagtggaaatgcttagaacagacctctcctacctctgtagccgctggcggatgacaggccagcccaccatcaccttccccatctcatacagcatgcttgatgaagatggaacaagcttgaattcaagtatcctggcagcactccgaaaaatgcaagatgggtattttggtggggcaagggttcaaacaggtaaattgtcagagtttttgacaacatcttgttgcacacacttgagcttcatggaccctggacctgagggtaagctgtacagtgaagattatgatgacaactatgattacctggaatctggcaactggatgaatgattatgattcaaccagtcatgctcgctgtggtgatgaagttgctcgttatttagatcaccttttggcgcacactgctccccatcctaaactagcccctacctcacagaagggagggctagatcggttccaagctgctgtgcaaacaacctgcgacttaatgtccttggtgaccaaggccaaggaactgcatgtacagaatgttcacatgtatcttcctacgaagttatttcaggcttcccggccttcattcaacttacttgattcacctcatccccgacaggagaaccaggttccctctgttcgtgtagaaatacatcttcctagagaccagtctggggaggtggactttaaagcactggttttacagttgaaggagacctcaagcttacaggaacaagctgatatcctctatatgctgtatactatgaaaggacctgactggaacactgaattgtataatgaacggagtgctacagtgagagagcttcttaccgagctgtatggcaaagtgggagaaattcgtcactggggcctgatccgatacatttctgggatcttaaggaagaaagtggaagcacttgatgaggcctgcacagaccttctctcccaccagaaacatttgacagtaggacttcctccagaacctcgagaaaagactatctctgcacctctgccctatgaggcgctcactcagctgatagatgaagccagtgaaggggatatgagcatttcaatccttacacaggaaataatggtatatctagccatgtatatgcgaacccagcctggcctctttgctgaaatgtttcgacttcgaattggtctgatcatacaagttatggcaacagaactggcccactcccttcgatgctcagctgaggaagccacagagggcctgatgaatctcagtccttcggccatgaagaatctcctgcatcacattctcagcggcaaggagtttggagtggaacgaagcgttcgtcccactgattcaaatgtcagtcctgctatttctatccacgagattggtgctgttggagcaaccaaaacagaacgaactgggatcatgcagttaaaaagtgagataaagcaggtggaatttcgtagactgtcaatctcagctgagagtcagtcacctggaacctctatgactccaagtagtgggtcctttcctagtgcatatgatcagcagtcatctaaagatagtcgtcaaggtcaatggcaacgccgaagaaggctggatggggcactgaatagagttccagttggattttatcagaaagtatggaaagttttgcagaagtgtcacggactttctgttgaagggtttgtccttccttcctctaccactagagagatgactccaggtgagattaaattctctgttcatgtggagtctgtcctgaatcgtgtacctcagccagagtaccgtcagctgctggttgaagccatccttgtcctcaccatgctggcagatattgaaattcatagcatcggaagcatcattgctgtggaaaaaatagtgcatattgccaatgacttgttccttcaagaacagaaaacccttggcgcagatgataccatgttggcaaaggatcccgcatctggcatctgtactcttctgtatgacagtgcacccagtggcaggtttggcaccatgacctacctctccaaggcagccgccacctacgtgcaggagttcctgccccacagcatctgtgccatgcaatgagggctttggttcctggcttctgggagccttttgacagctggtccctgcctcggttgattgtgcatggaactaaaatgttattgcctaatcactccaaccctgcccctttctgtcccatccttcccaagaagagagaactttttcgataaactaactactgtagaagaagtgaacacttacctggaggctcaccttgcagaaccagtgacaatcttatgagtataatgaacactcagccaggcctgtcatgattggctttatttctttcatcattcataaaagtttgcatgtgtttttattctctagatctgttaccaatatagttttctaactcctgtttggggagcaagtgttaataataacttattcctaaaaaaaaaaa

SEQ ID NO: 12679 - DNA, 2555 bp, Homo sapiens
ccggcgcgccgcggggtgagcggcgccgggcctgaggtcgcccagacgccgtcggggcggagccgggtcgcgaggctgcatcccggccggcggttccggagcctcgcggctggggaggcgcggcccgggacgctcgagcttagggagatctgccttctggagactgcgccgtcctcccgggagagccagaaagaggacatggctgctgggcagcgggaagcgaggccccaggtgtcactgacgtttgaggatgtggctgtgctgtttacccgagatgagtggagaaagctggccccttctcagagaaacttgtaccgggatgtgatgctggagaactataggaacctggtctcactggggctcccatttaccaaaccaaaagtgatctccctgttgcagcaaggagaagatccctgggaggtggagaaagacggttctggcgtctcctctctaggatcgaagagcagtcataaaaccacaaagtcaacgcaaacacaagactcttcatttcagggactgatactgaaaagatccaacaggaatgtaccttgggatttgaaattagaaaagccttacatatatgaaggcagattagagaaaaagcaggataaaaagggaagttttcagatagtttcagccacccacaaaaaaatccccactatagaaagaagccataaaaatactgaattgagccaaaacttcagcccaaagtcagtgcttattaggcaacagatacttcccagagaaaaaacaccaccaaaatgtgaaatacaaggaaacagcctcaaacagaattcacaattacttaatcaaccaaaaattacagcagataaacgctataaatgtagtctgtgtgaaaaaaccttcattaacacttcatcccttcgtaaacatgagaaaaaccatagtggagagaaactatttaagtgtaaagaatgttcaaaagcctttagccaaagttcagctcttattcaacatcaaataacgcatactggagagaaaccctacatatgtaaagaatgtgggaaagcctttactctcagtacatccctttataaacatctaagaacccatactgtggagaaatcctacagatgtaaagaatgtggtaaatccttcagccgaaggtcaggcctttttatacatcaaaaaattcatgctgaagaaaacccttgtaagtataatccgggtaggaaggcatctagttgcagcacatccctttctggatgtcaaagaattcattctagaaagaagtcctacttatgtaatgaatgtggcaacacctttaagtctagctcatcccttcgttatcatcagagaattcacactggagagaagccttttaaatgtagtgaatgtgggagagccttcagccagagtgcctctcttattcaacatgaaagaattcacaccggagaaaagccctatagatgcaatgaatgtgggaaaggctttacttctatttcacgacttaatagacaccgaatcattcatactggagagaagttttataattgtaatgaatgtggtaaagccttaagctcccactcaacacttattattcacgagcgaattcatactggagaaaaaccatgtaaatgtaaagtatgtggaaaagccttcagacagagttcagctctcattcaacatcagagaatgcatactggagaaagaccctataaatgtaacgagtgtgggaaaacattcaggtgtaactcatcacttagtaatcaccagagaattcatactggagagaaaccatatcgatgtgaggaatgtgggatatcttttggccaaagttcagctcttattcagcatcgaaggattcatacaggagaaaaaccctttaaatgtaatacatgtggaaaaacttttagacaaagctcatcacgtattgcacatcagagaattcatactggagagaaaccctatgaatgtaatacatgtgggaaacttttcaaccataggtcatcccttactaatcattataaaattcatatcgaagaggacccctagaaagtagatttgtatgtgtgaaagccttaaaccaaagctcatcgaagaatacatccttgagagagatgtaataaatgtaatggatgtgaaaaaaactgtaataatttagccctcattaggtatttaattccatggataaacctcagctatataatagatatgaggaaagtgtttgtgcctgtcagacacttaaaaaaataacctgagatgaagaatttacaattgaagacattgactttagccatttgtgaaatgggtttgctttttcccttttcctacagacgtatatgctagatgtcacgtgatcatcagaaacagatatccgagtgggtggggaggtgtgctttagatttctcattagaagaccaccaaactggtaatatttttatagcattttaatagcttgatcaaattgtacctttttagagaaaaggaccaaaataaaagaaaaatgaattatgaactacctctcagtctctggggtttgtccttttcctaccctgatgtcaaacttatgcatggatttcattaaaaaagaa

SEQ ID NO: 12680 - DNA, 2140 bp, Homo sapiens
gctgcccggtgagcggcgccgggcttgaggtcgcccagacgtcggaggagccgggtcacgaggctggagcttcctgcttgcagagtgcggcggggaggcgcggcccgggaacgcgggatcctggggagatctgccttctggagactgcgccgtcctcccgggagagccagaaagaggacatggctgctgggcagcgggaagcgaggccccaggtgtcactgacattcgaggacgtggctgtgctctttacctgggatgagtggagaaagctggctccttctcagagaaacttgtaccgggatgtgatgctggagaactataggaacctggtctcactgggactctcatttaccaaaccaaaagtcatctccctgttgcagcaaggagaagatccctgggaggtggagaaagacagttctggtgtctcctctctaggatgtaagagcacacctaaaatgacaaagtcaactcaaactcaggattcatttcaggagcagataaggaaaagattgaaaagggatgaaccctggaacttcatatcagaaagatcctgcatatatgaagagaaattaaagaaacagcaggacaaaaatgaaaatttacaaataatttcagttgcccatacaaaaatccttactgtagatagaagccataaaaatgttgaatttggccaaaacttctacctgaaatcagtcttcattaagcaacagagatttgctaaagaaaaaactccatcaaaatgtgaaatacaaagaaatagtttcaagcagaattcaaatttacttaaccaatcaaaaatcaaaacagcagagaaacgctataaatgcagtacatgtgaaaaagccttcattcacaattcatcccttcgtaaacatcagaaaaaccacactggagaaaaattatttaaatgtaaagaatgtttaaaagctttcagccaaagttctgctcttattcaacatcaaagaactcatacaggagagaaaccctatatatgtaaagaatgtgggaaagccttcagccatagtgcatccctttgtaagcatttaaggacccatactgtggagaaatgctataggtgtaaagaatgtggtaaatccttcagtcgaaggtctgggctttttatacatcaaaaaatccatgctcaagaaaatccccataaatacaatccaggcaggaaggcatccagttacagcacttccctttctggaagtcagaaaattcatctcagaaagaagtcctacttatgtaatgaatgtggcaacacctttaagtctagctcatcccttcgttatcatcagagaattcacactggagagaagccttttaaatgtagtgaatgtgggagagccttcagccagagtgcctctcttattcaacatgaaagaattcacaccggagaaaagccctatagatgcaatgaatgtgggaaaggctttacttctatttcacgacttaatagacaccgaataattcatactggagagaaattgtataattgtaatgaatgtggtaaagccttaagctcccactcaacacttattattcatgagcgaattcatactggagaaaaaccatgtaaatgtaaagtatgtggaaaagccttcagacagagttccgctctcattcaacatcagagaatgcatactggagaaagaccctataagtgtaacgaatgtgacaaaacattcaggtgtaactcatcgcttagtaatcaccagagaattcatactggagagaaaccatatcgatgtttagaatgtgggatgtcttttggccaaagtgcagctcttatacaacatcagaggattcatacaggagaaaaaccctttaaatgtaatacatgtggaaaaacttttagacaaagctcatcacttattgcacatcaaagaattcatactggagagaaaccctatgaatgtaatgcatgtgggaaactctttagccagaggtcatcccttactaatcattataaaattcacattgaagaggactccttaaaagccgatttgcatgtgtgaaagccttaaaccaaaactcatcagagaatacatgcttgagagtgatttattaaatataatgaatatgagaaaactcttagttctcatcagatactaagttttaagaaaaactttagctatgt

SEQ ID NO: 12681 - DNA, 7609 bp, Homo sapiens
atctaccaccttaaaaccctgatctagaaaaaatatatattcatgataggaagttataactaagaaaatttatttgcctcttaatgctcctgaatgaaagaaattatccctttgttctttgggaggacttgtgtatctgagattgttgtaataatcagtcattttattaaaaccttgacatgatcaccagggaggaaaaatagagcaatagtcaaaacctgtgtgttagtccaagatgacttctgaagaaatgacagcttctgttctcatacctgtgactcagagaaaagtggtttctgcccagtcggctgcagatgaaagtagtgaaaaggtctcagacatcaatatttcaaaagcacatactgtcagacgaagtggggagacttctcataccatctcacaactgaacaaacttaaagaagaaccttctggaagcaacttgccaaagattctctcaatagcgagggagaaaatagtgagtgatgagaacagtaatgaaaaatgttgggagaaaatcatgccagattctgcgaaaaaccttaacattaactgcaacaacatattgagaaaccatcagcatggccttcctcagagacaattttatgaaatgtacaactctgttgctgaggaagacttgtgtttagaaactggaattccttctccactggaaagaaaggtgttccctggaattcaactggaactagacagaccttccatgggcattagtcctttaggaaatcagtcagtgatcatagagacaggcagagcacaccctgacagcagaagggcagtatttcattttcattatgaagttgacagaagaatgtcagacactttctgtaccctatcagaaaacttaattttagacgattgtggaaattgtgtaccactacctgggggtgaggagaagcaaaagaaaaactatgtggcatatacctgtaaactgatggaattggccaaaaattgtgataataagaatgagcagctgcagtgtgatcattgtgacaccttgaatgataaatacttttgctttgaaggctcttgtgagaaggttgacatggtatattcaggtgatagcttttgtaggaaagactttactgacagtcaagctgccaagacctttttgagccattttgaggacttccctgataattgtgatgatgtagaagaagacgcttttaaaagcaaaaaggagcgatccactttgttagtcaggagattctgtaaaaatgacagagaagttaagaaatctgtgtatactggaacaagagcaattgtgagaactctgccttctggccacattgggctgactgcatggagttacatagatcagaagagaaatggtcccttactgccttgtgggagagtaatggaacccccgtcaacagtggagataaggcaagatgggagccaacgtctgtcagaagcccagtggtatcctatctacaatgcagtgagaagagaagaaacagaaaatacagttggatctctactccatttcctcaccaagctcccagcctccgagacagcccatggaaggataagcgttggtccatgcttaaagcaatgtgtccgagacactgtatgtgagtatcgcgccaccctccaaaggacttcaatatcgcagtacatcaccggttctctcctagaagcaaccacgtctttgggagcaagaagtggccttctcagtacttttggaggatccactggacgaatgatgctgaaagaacgccagccaggcccctctgtggccaattccaatgccctcccttcaagttcagctgggatcagcaaggagctgatcgatctgcagcctctcatccagttcccagaggaagtcgccagcatcctgatggagcaagagcagactatttaccgcagggtcttgccagtcgactacctttgcttcttaacacgggacttgggcactcctgaatgccagagctccttgccctgcctcaaagcatccatctcagcgtcgattcttaccactcagaatggagagcacaatgcccttgaagatctggtgatgaggtttaatgaggtgagctcctgggtgacatggctgatcctcacggcaggctccatggaggagaagcgagaagtcttttcatatttggtgcatgtggccaaatgctgctggaacatgggcaactacaacgctgtcatggagttcttggctggcctcaggtcaagaaaagttttaaaaatgtggcagttcatggaccagtctgatattgagaccatgaggagcctgaaggatgctatggcccagcatgagtcctcttgtgagtacagaaaggtggtgacacgtgccctgcacatccctggctgtaaggtggttccattctgtggggtgtttctgaaggagctctgtgaagtgcttgacggcgcctccggtctcatgaagctttgcccgcggtacaattcccaagaagaaactttagagtttgtagcagattacagtggacaagataatttcttacaacgagtgggacaaaatggcttaaagaattcggagaaggagtccactgtcaacagcatctttcaggtcatccggagctgcaatcgaagtctggagacagacgaggaggacagccccagtgaagggaacagctccaggaaaagctccttgaaggataaaagccgatggcagtttataattggagatttgttggattcagacaatgacatctttgagcaatccaaagaatacgactctcatggttcagaggactcacagaaggccttcgaccatgggacggagctcatcccttggtacgtgctgtccatccaagccgatgtgcaccagttcctgctgcagggggccacggtcatccactacgaccaggacacacacctctctgcccgctgcttcctccagcttcagcccgacaatagcaccttgacctgggtaaagcccacaactgcctccccagccagcagtaaagcaaaacttggtgtacttaataacacagctgagcctggaaaattcccactactgggtaatgctggattaagtagcctgacggaaggggtcttggatctttttgcagtgaaggctgtatacatgggccaccctggcattgatatacacactgtgtgtgttcagaacaaactgggtagcatgttcctgtcagagactggtgtgacattgctctatgggcttcagaccacagacaacagattattgcacttcgtggcaccaaagcacacagctaaaatgctcttcagcggattattggaactcactagagctgtgagaaagatgaggaaattccctgaccaaagacagcagtggctgcggaaacagtacgtcagcctttatcaggaggatggacggtatgaaggcccaactttggctcacgctgtggagttgtttggtggcagacggtggagtgctcgaaaccccagccccggaacatcagcaaagaatgctgagaagcccaatatgcagagaaacaataccctgggcataagcactaccaagaaaaagaagaaaatcctcatgaggggtgagagtggagaggtaactgacgatgagatggcaacccgaaaggccaagatgcacaaagagtgtcgaagccggagtggttctgatcctcaagacattaatgaacaagaagaatcagaggtgaatgccatcgctaaccctccaaaccccctcccttccagaagagcccactctttgaccacagctgggtcccccaacttggctgccgggacgtcatctcccatcaggccagtgtcctcccctgtgctgtcttcttcaaacaagagcccatccagtgcttggagcagtagtagctggcacgggcggatcaaaggcggcatgaagggatttcagagcttcatggtttcagatagcaacatgagttttgttgaatttgttgagctgttcaaatcattcagtgtcaggagccgcaaggacctgaaggatctgtttgatgtctatgcagtgccctgcaaccgatctggctccgagtcagccccactctacaccaacctgacaattgatgaaaacaccagcgatcttcagcctgacctagatctgttgaccagaaatgtctcggatttggggttgttcattaagagtaaacagcagctatcggacaaccagaggcagatatctgatgccattgctgctgcaagcattgtgacaaatggcactgggattgagagcacatctctgggcatttttggggtgggcatacttcagctcaacgatttcctcgtgaattgccaaggagaacactgcacttatgatgaaatcctcagcatcatccagaagttcgagcctagcatcagtatgtgtcatcagggactaatgtcatttgaagggtttgccaggtttctgatggataaagaaaattttgcctcaaaaaatgatgagtcacaggagaacattaaagaactgcagctacccctctcatactattacatcgaatcttcgcacaatacctacctcacgggccatcagctcaaaggagaatcctcggtagaactctacagccaggtccttttgcaaggctgtcgaagtgtagaattggactgctgggacggagacgatgggatgcccatcatttatcatggacatacgccgacaaccaagatccccttcaaggaagtggttgaagccattgatcgcagtgccttcatcaactctgacctgccaatcatcatatcgattgagaaccactgttcattgcctcagcaacgaaaaatggcagaaattttcaagactgtgtttggagaaaagctggtgactaaattcttatttgagactgatttctcagatgatccaatgcttccttcacctgaccaactcagaaagaaagttcttcttaaaaacaagaagctaaaagcccatcagacgccagtggatatcttaaagcaaaaggctcatcagttagcatctatgcaagtgcaggcttataatggtgggaatgccaacccccgacctgccaataatgaggaagaggaagatgaggaggacgaatatgattatgactatgaatccctttctgatgacaacattctggaagacagacctgaaaataaatcatgtaatgacaagcttcagtttgaatataatgaagaaatcccaaagaggataaagaaagcagataactctgcttgcaacaaaggaaaggtttatgatatggaactgggagaagaattttatcttgatcagaataaaaaggaaagcagacagattgcaccagagctttctgaccttgtaatctatcgtcaagcagtaaaatttccaggactgtcaactctaaatgcatctggctctagcagaggaaaagaaaggaaaagcaggaagtccatttttggcaacaatccgggcagaatgagcccaggggagacagcatcatttaacaaaacatctggaaaaagttcctgtgaaggcattcgacagacctgggaggaatcttcttcccccctcaacccaaccacgtccctcagtgctatcattagaactcccaaatgttatcatatctcgtcgctgaatgaaaatgccgccaaacgtctgtgtcgcaggtattctcagaaactgatccagcacaccgcctgtcagctgctgagaacttaccctgctgccacccgcatcgactcttccaacccgaaccccctcatgttctggctccatgggatacagcttgtggcactcaactaccagactgatgatctccctttacatttaaatgctgcaatgtttgaggcaaatggtggttgtggttatgtattgaaacctccagttctgtgggacaagaactgccccatgtatcagaagttttctccactagaaagagatctggacagcatggatcctgcagtctattctttaactattgtctctggtcagaatgtgtgccccagtaatagcatgggaagcccgtgcattgaagtcgacgtcctgggcatgcctctggacagctgccatttccgcacaaagcccatccatcgaaacaccctgaaccccatgtggaacgagcagtttctgttccgcgttcacttcgaagatcttgtatttcttcgttttgcagttgtggaaaacaatagttcagcggtaactgctcagagaatcattccactgaaagctttaaaacgaggatatcgacatcttcagctgcgaaaccttcacaatgaagtcttggagatttctagtttattcattaacagcagaaggatggaagaaaattcctctggcaataccatgtcagcctcttcgatgtttaatacagaagaaagaaaatgtttgcagactcacagagtcacggtgcatggggtcccagggccagagccctttaccgttttcactattaatggaggcaccaaggcaaagcagcttctgcagcaaattctgacaaatgaacaagacatcaaacctgttaccacagactattttttgatggaagaaaaatattttatatctaaagaaaagaatgaatgtaggaaacaaccattccagagagccattggtccagaagaggagatcatgcaaattttaagcagctggtttccagaagagggatacatgggcaggattgtcttaaaaacccagcaggaaaacctagaagagaaaaacattgttcaagatgacaaagaggtgatcttgagctcagaggaggagagtttctttgtccaagtgcatgatgtttctccagagcaacctcgaacagtcatcaaagcaccccgcgtcagcactgcacaggatgtcattcagcagaccttatgcaaagccaaatattcctacagcatcctgagcaaccccaatccaagcgactatgtgcttttggaagaggtggtgaaagacactaccaacaagaagactaccacaccaaagtcctctcagcgggtccttctggatcaggagtgtgtgtttcaagcccaaagcaagtggaaaggtgcaggaaaattcatccttaagctaaaggagcaggtgcaggcatctcgagaagataaaaagaaaggcatttctttcgcaagtgaactcaagaagctcaccaagtcaactaaacagccccgaggacttacatcaccttctcagctcttgacctcagaaagtatccaaaccaaggaggagaaacctgtgggtggcttgtctccagtgacacaatggattaccgacagtgactaagggcagcatgtttaacccaggtggagatctttaagcaagaagttaaagagtgaacatggtggaaaaaatataattattttcatcagacttaaactggaaattgatgatttctgaactgaagccttcacacatgtgagatccatgctgaggagaagcaaaatggcacagggctagttgccaccaaccaatttactgatgaatgaagcccaggggactgccattttataaatgtcagcagttggaaaaatcgtcacgaattgacttagagcaagggtcagcaagcttgtctgtaaagggccaaacagtaaatattttagggctgggggccataaaatatgttgcaaccacccaattctgccattgtagtgcaaaagcagccatagacaacacatacatgaacgaacgtggctgtattccaataaaactttatttatggacactgaaaaaaaaaaaaaaaaaaaa

SEQ ID NO: 12682 - DNA, 1571 bp, Homo sapiens
aaggtgagcgactgcaggcaaacccggcgacagcgcagctcgcgtcgaccctggctcctctgcctgccccctcaggcccccgcctccttcaggatgacgctggacgtggggccggaggatgagctgcccgactgggccgccgccaaagagttttaccagaagtacgaccctaaggacgtcatcggcagaggagtgagctctgtggtccgccgttgtgttcatcgagctactggccacgagtttgcggtgaagattatggaagtgacagctgagcggctgagtcctgagcagctggaggaggtgcgggaagccacacggcgagagacacacatccttcgccaggtcgccggccacccccacatcatcaccctcatcgattcctacgagtcttctagcttcatgttcctggtgtttgacctgatgcggaagggagagctgtttgactatctcacagagaaggtggccctctctgaaaaggaaaccaggtccatcatgcggtctctgctggaagcagtgagctttctccatgccaacaacattgtgcatcgagatctgaagcccgagaatattctcctagatgacaatatgcagatccgactttcagatttcgggttctcctgccacttggaacctggcgagaagcttcgagagttgtgtgggaccccagggtatctagcgccagagatccttaaatgctccatggatgaaacccacccaggctatggcaaggaggtcgacctctgggcctgtggggtgatcttgttcacactcctggctggctcgccacccttctggcaccggcggcagatcctgatgttacgcatgatcatggagggccagtaccagttcagttcccccgagtgggatgaccgttccagcactgtcaaagacctgatctccaggctgctgcaggtggatcctgaggcacgcctgacagctgagcaggccctacagcaccccttctttgagcgttgtgaaggcagccaaccctggaacctcaccccccgccagcggttccgggtggcagtgtggacagtgctggctgctggacgagtggccctaagcacccatcgtgtacggccactgaccaagaatgcactgttgagggacccttatgcgctgcggtcagtgcggcacctcatcgacaactgtgccttccggctctacgggcactgggtaaagaaaggggagcagcagaaccgggcggctctctttcagcaccggccccctgggccttttcccatcatgggccctgaagaggagggagactctgctgctataactgaggatgaggccgtgcttgtgctgggctaggacctcaaccccagggattcccaggaagcagaactctccagaagaagggttttgatcattccagctcctctgggctctggcctcaggcccactaatgatcctgctaccctcttgaagaccagcccggtacctctctccccactggccaggactctgagatcagagctggggtggaagggagccattctgaacgccacgcctggcccggtcagtgctgcatgcactgcatatgaaataaaatctgctacacgccaggg

SEQ ID NO: 12683 - DNA, 1355 bp, Homo sapiens
ggatggccggagctggcgccctggttctggaggtaaccggttactgagggcgagaagcgccacccggaggctctagcctgacaaatgcttgctgacctgggccagagctcttcccttacgcaagtctcagccggtcgtcgcgacgttcgcccgctcgctctgaggctcctgaagccgaaaccagctagactttcctccttcccgcctgcctgtagcggcgttgttgccactccgccaccatgttcgaggcgcgcctggtccagggctccatcctcaagaaggtgttggaggcactcaaggacctcatcaacgaggcctgctgggatattagctccagcggtgtaaacctgcagagcatggactcgtcccacgtctctttggtgcagctcaccctgcggtctgagggcttcgacacctaccgctgcgaccgcaacctggccatgggcgtgaacctcaccagtatgtccaaaatactaaaatgcgccggcaatgaagatatcattacactaagggccgaagataacgcggataccttggcgctagtatttgaagcaccaaaccaggagaaagtttcagactatgaaatgaagttgatggatttagatgttgaacaacttggaattccagaacaggagtacagctgtgtagtaaagatgccttctggtgaatttgcacgtatatgccgagatctcagccatattggagatgctgttgtaatttcctgtgcaaaagacggagtgaaattttctgcaagtggagaacttggaaatggaaacattaaattgtcacagacaagtaatgtcgataaagaggaggaagctgttaccatagagatgaatgaaccagttcaactaacttttgcactgaggtacctgaacttctttacaaaagccactccactctcttcaacggtgacactcagtatgtctgcagatgtaccccttgttgtagagtataaaattgcggatatgggacacttaaaatactacttggctcccaagatcgaggatgaagaaggatcttaggcattcttaaaattcaagaaaataaaactaagctctttgagaactgcttctaagatgccagcatatactgaagtcttttctgtcaccaaatttgtacctctaagtacatatgtagatattgttttctgtaaataacctatttttttctctattctctgcaatttgtttaaagaataaagtccaaagtcagatctggtctagttaacctagaagtatttttgtctcttagaaatacttgtgatttttataatacaaaagggtcttgactctaaatgcagttttaagaattgtttttgaatttaaataaagttacttgaatttcaaacatca

SEQ ID NO: 12684 - DNA, 1319 bp, Homo sapiens
aacgcggcgcagggtgagagcgcgcgcttgcggacgcggcggcattaaacggttgcaggcgtagcagagtggtcgttgtctttctaggtctcagccggtcgtcgcgacgttcgcccgctcgctctgaggctcctgaagccgaaaccagctagactttcctccttcccgcctgcctgtagcggcgttgttgccactccgccaccatgttcgaggcgcgcctggtccagggctccatcctcaagaaggtgttggaggcactcaaggacctcatcaacgaggcctgctgggatattagctccagcggtgtaaacctgcagagcatggactcgtcccacgtctctttggtgcagctcaccctgcggtctgagggcttcgacacctaccgctgcgaccgcaacctggccatgggcgtgaacctcaccagtatgtccaaaatactaaaatgcgccggcaatgaagatatcattacactaagggccgaagataacgcggataccttggcgctagtatttgaagcaccaaaccaggagaaagtttcagactatgaaatgaagttgatggatttagatgttgaacaacttggaattccagaacaggagtacagctgtgtagtaaagatgccttctggtgaatttgcacgtatatgccgagatctcagccatattggagatgctgttgtaatttcctgtgcaaaagacggagtgaaattttctgcaagtggagaacttggaaatggaaacattaaattgtcacagacaagtaatgtcgataaagaggaggaagctgttaccatagagatgaatgaaccagttcaactaacttttgcactgaggtacctgaacttctttacaaaagccactccactctcttcaacggtgacactcagtatgtctgcagatgtaccccttgttgtagagtataaaattgcggatatgggacacttaaaatactacttggctcccaagatcgaggatgaagaaggatcttaggcattcttaaaattcaagaaaataaaactaagctctttgagaactgcttctaagatgccagcatatactgaagtcttttctgtcaccaaatttgtacctctaagtacatatgtagatattgttttctgtaaataacctatttttttctctattctctgcaatttgtttaaagaataaagtccaaagtcagatctggtctagttaacctagaagtatttttgtctcttagaaatacttgtgatttttataatacaaaagggtcttgactctaaatgcagttttaagaattgtttttgaatttaaataaagttacttgaatttcaaacatca

SEQ ID NO: 12685 - DNA, 1870 bp, Homo sapiens
actgctctgtgtcctctgctcctagaggtccagcctctgtgggcctgtgacctgcagaaattgagagatccacagctaagactccaggaccccctggaagcctagaaatgggactgttgacatttagggatgtggccatagaattctctctggaagaatggcaatgcctggacactgcacagcggaatttatgtaaaaatgtgattttagagaactacagaaacctggtcttcctgggtattgctgtctctaagcaagacctgatcacctgtctggagcaagaaaaagagcctttgactgtgaagagacatgagatggtgaatgaacccccagtaatgtgttctcattttgcccaagagttttggccagagcagaacataaaagattcttttgaaaaagtgacactgagaagatatgaaaaatgtggaaatgataattttcagttaaaaggctgtaaaagtgtggatgaatgtaaggtgcacaagggaggttataatggacttaaccaatgtttaccaactatgcagagcaaaatgtttcaatgtgatgaatatgtgaaagtctttaataaattttcacattcagatagacataagataaaacatatggaaaataaacctttcaaatgtaaagaatgtggcagatcgttttgcatgctttcacacctaactcgacatgaaagaaattataccaaggtgaatttctgcaaatgtgaagaatgtgaaaaagctgttaaccaatcttcaaagcttactaaacataaaagaatttatacttgtgagaaactctacaaatgtcaagaatgtgacagaacttttaaccaattctcaaaccttactgaatataaaaaagattatgctcgagagaaaccatacaaatgtgaagaatgtggcaaagcctttaaccagtcctcacaccttactacacataagataattcatacaggagagaaaccctacaaatgtgaagaatgcggcaaagcctctaaccagttctcaaatcttactacacataaaaaaattcatactggagagcaaccctacatatgtgaagaatgtggcaaggcttttacccaatcctcaacccttactacacataagagaattcatactggagaaaaaccctacaaatgtgaagaatgtggaaaagcttttaaccgatcctcaaaacttactgaacataaaaacattcatactggagagcaaccctacaaatgtgaggaatgcggcaaagcttttaaccgatcctcaaatcttacggaacataggaaaattcataccgaagagaaaccctacaaatgtaaagaatgtggcaaagcctttaaacactcctcagcccttactacacataagagaattcacactggagagaaaccctacaaatgtgaagaatgtggcaaagcttttaaccgatcctcaaaacttactgaatataagaaacttcatactggaaagaaaccctacaaatgtgaagaatgtggcaaagcttttatccaatcctcaaaacttactgaacataagaaaattcattctggagagataccctacaagtgtgaagaatgtggcaaagcttttaaacactcctcatcccttactacacataaaagaattcatactggggagaaaccctacaaatgtgaagaatgtagcaaagcttttagccgatcctcaaaacttactgaacataagataattcatactggagagaaaccctatgaatgtgagagatgtgacaaagcttttaaccaatctgcaaaccttactaaacataaaaaaatacatactggagagaaactacagaactggaatgtgtgataatgattttgacaacacctcaaatttttctaaatataaaggaaatcatactggtg

SEQ ID NO: 12686 - DNA, 483 bp, Homo sapiens
atgtcctacaactgctgctctagaaacttctcctcccgctcctttgggggctacctgtactacccaggctcctaccccagcagcctggtctacagcactgccctctgctctcccagcacctgccagctgcgttcctctctctacagggactgtcagaagacctgctgggagcccgccagctgccagaaatcctgctaccgccccaggacctccatcctctgctgtccctgtcagacgacttgctctggatctctaggctttcggtccagcagctgtcgctcccagggctatggatctaggtgctgctactcgctgggaaatggatccagtggcttcagattcctgaaatatggaggctgtggttttccttccctgagttacggatccagattctgctacccaaactacttggcttctggagcctggcagtcttcttgttacagaccaatctgtggatctcgcttctatcaattcacctgctaa

SEQ ID NO: 12687 - DNA, 5896 bp, Homo sapiens
cgactccattttcctcggtgggggcttagcgcactggaggagcggcgggcttcagacagttatcttcaggcagagtgagaagctgcagcaatgtctgattttgtggaaagcgaggctgaggagtcagaggaagaatacaatgatgaaggcgaggtggtaccccgagtcaccaagaaatttgtggaagaggaggatgatgatgaggaggaggaggaggagaacctagatgatcaggatgagcaaggcaacttgaaaggctttatcaatgacgatgatgatgaagatgaaggggaggaggatgagggcagtgactctggtgattcagaagatgatgttggccacaagaagagaaaacgcacctcttttgatgaccgcctggaggatgatgattttgacctcattgaggagaatttgggtgtcaaagtcaaaagaggacaaaagtaccggcgtgtcaaaaaaatgtcagatgacgaggacgatgacgaggaggaatatggcaaggaggaacatgaaaaagaagctattgcggaagaaatcttccaggatggggaaggggaagaagggcaggaggccatggaggcccccatggctcctccagaggaggaggaagaagatgatgaggagtcagatattgacgacttcattgtggatgatgatggacagcctctgaaaaaacctaagtggcggaaaaagcttcctggatacacagacgcggccctgcaagaagcccaggaaatcttcggtgtggactttgactatgatgaatttgagaaatacaatgagtatgatgaagaactggaggaagagtatgagtatgaggatgatgaggctgagggtgaaatccgagtgcgccccaagaagaccaccaagaagcgtgtgagccgtaggagcatctttgaaatgtatgagcccagtgagctagaaagcagccacctcacagatcaggacaatgaaatccgagccactgacctgcctgagaggttccagctccgctccatcccagtcaagggggctgaagatgatgaactagaagaagaagctgactggatctacaggaatgcttttgccacaccaaccatttctctccaggaaagctgtgattacctagaccgagggcagccagccagcagcttcagtcggaaagggcccagcacaattcagaagatcaaagaggccctgggcttcatgcgaaatcagcattttgaggtgccttttattgccttctatcgaaaggagtatgtggagcctgagttgcacatcaatgacctatggagagtctggcagtgggatgaaaagtggacccagctgcggatccgtaaagagaacctaacacggctgtttgagaagatgcaggcttatcagtatgaacagatctctgctgaccctgacaaacctcttgctgatggcatccgggctctggacaccactgacatggagaggctcaaggatgtccaatcaatggatgagctgaaagatgtctacaaccattttcttctttattatggccgagacatccctaagatgcagaacgccgccaaagctagccgcaagaagctgaagcgtgtcagggaagagggagatgaagaaggtgaaggtgacgaggcagaagatgaggagcagagggggcctgagctcaagcaagcctctcgccgagacatgtacaccatctgccagagtgctgggctagatggcctggccaaaaagtttgggcttactcccgagcagtttggggagaacctgcgggatagctaccagcggcacgagacagagcagtttcccgcggagcccttggagctggccaaggattacgtttgcagccagttccctactccagaagctgtgctagaaggcgcccgctacatggtagccctgcagattgcccgtgagccccttgtccggcaggtgctgaggcaaaccttccaagagagagccaagttaaatataacccccaccaagaaaggtagaaaggatgtggatgaggcccactatgcctattccttcaagtatttaaagaacaagcctgttaaggaactgagagatgaccagtttctcaagatatgcctggctgaagacgaagggctcctcaccactgacatcagcatagatttgaagggagtggaaggctatggcaacgaccagacatattttgaggagataaaacagttttactaccgagatgagttcagccaccaggtgcaggagtggaaccggcagcgcaccatggccatcgaacgggctttacagcagttcctctatgtgcagatggccaaagaactcaagaacaagctgctggctgaagccaaggaatatgtcataaaggcctgtagtcgaaagctctacaattggttgagagtggcaccctaccgaccagatcagcaggtggaagaagatgacgactttatggacgagaaccaagggaagggcattcgagtcctcggcattgctttctcctctgccagagatcaccctgtgttctgcgccctggtcaatggtgaaggagaagtgacagacttccttcgactgccccattttaccaaacggcgaactgcatggagagaggaagagcgggaaaagaaggctcaagacattgaaacgctaaagaaatttctcctgaataagaagcctcatgtagtgacagttgcaggagagaacagggacgcccagatgttgattgaagatgtgaagcgcattgtacatgagctggaccagggccagcagctgtcatctattggggtagagctggttgacaacgagttggccattctctatatgaacagcaagaagtcagaggcagagttccgggattatcctccagtgctgagacaggccgtctccctggcccggcgcatccaggaccctctgattgaatttgcccaggtgtgcagttccgatgaagacatcctgtgtctcaagtttcaccccttgcaggagcatgtggtgaaagaggagctgctcaacgccttgtactgtgaatttatcaaccgagtcaatgaggtcggggtcgatgtcaaccgtgccattgcccacccttacagccaggccttgatccagtatgtttgtggcctgggacctcggaaagggacccacctcctgaagatcctgaagcagaacaacacccggctcgagagccggacccagctggtcaccatgtgccacatgggtcccaaagtcttcatgaattgtgctggcttcctcaagatcgacacggcctccctgggggacagcactgactcatatattgaagtccttgatggttcccgtgtccaccctgagacttatgagtgggctaggaagatggcagtggatgccctggaatacgatgaatcagccgaggatgccaatcctgcaggagcccttgaagaaatcttggaaaacccagagcgactgaaagacctggaccttgatgcctttgcagaagagctggagaggcagggctatggtgacaaacacatcacactctatgacatccgggcagagctgagctgtcgatataaggacctccggacagcctaccgctctcccaacacagaggagatcttcaatatgttaaccaaagaaacaccagagaccttctacattggaaagctcatcatctgcaatgtcactggcattgcccacaggcgtccccagggtgagagctatgaccaggcgatccgcaatgatgagacagggctgtggcagtgccccttctgtcagcaggacaatttccctgaactaagcgaggtgtggaaccactttgacagcggttcgtgcccaggccaggccatcggtgtcaaaacacggctagacaatggtgtcaccggcttcatccccaccaaattcctcagtgacaaagtggtaaagcggccagaagaacgagtgaaggtgggaatgactgttcactgccgcatcatgaagattgacattgagaagttcagtgcagacctgacctgccgcacctcagacctcatggacaggaacaatgagtggaagctgcccaaagacacctactatgactttgatgctgaagctgcagaccacaagcaggaggaggacatgaagcggaagcagcagcggaccacatacatcaagagagtgatcgcacacccatccttccataatatcaatttcaagcaagcagaaaagatgatggagaccatggaccagggtgatgtgattatccgaccaagcagcaagggcgagaaccacctgacagtgacctggaaagtcagtgatggcatctaccagcatgtggatgtgcgggaggagggcaaggaaaatgccttcagcctgggagccactctgtggatcaacagtgaggaattcgaagatttggatgagattgttgctcgctatgtccagcccatggcatcctttgcccgggaccttctgaatcacaagtattatcaggactgcagcggtggggaccgcaagaaattagaggagctgctcatcaaaactaagaaggagaagcccaccttcatcccttatttcatctgtgcctgcaaggaactgcccggcaagttcctactgggataccagccccggggtaaacccaggatagaatatgtaacggtgactccagagggattccggtaccggggccagatcttcccaaccgtgaatggactgtttagatggtttaaggatcactaccaggatcctgtaccaggcatcacccctagcagcagcagcaggacccggacacctgcctctatcaatgctaccccagccaacatcaaccttgcagatctgacacgggctgtgaatgccctgcctcagaacatgacttcacagatgttcagtgccattgctgcggtgacaggccaaggacagaaccctaatgccaccccagcccagtgggcctccagccagtacggctatggcggcagtggaggcggcagcagtgcttaccacgtattcccaacgccagcccagcagccagtggccacaccactaatgacccctagctactcctacacgaccccaagccagcccatcaccacccctcagtaccaccagctccaggccagcaccaccccacagtcggcccaggcccagccccagccctcttccagctcccggcaacggcagcagcagccaaagtccaacagccatgcagccatcgactggggaaaaatggcggagcagtggctgcaggaaaaggaggcagaacggcggaaacagaagcagcggctgacacctcggccctcccccagccccatgatcgaaagcacccccatgtccattgctggcgatgccaccccactcctggacgagatggatcggtagggggcctgctcctcggactctggttacctctgaggctgggaaaggcctggctgcccactgcctccctccctgcccctccttttatgtccataaagtggcgtgaagtgagacgttctctttggtggtcaacccggatgggtgacaggctggatggccttgtgaacttgagctcagtgtatgctaggcaacaattctcccgctccagaccctcaccgaccacctgtcctgggaccaggctgggaggggagtgtggcagggaggaggaagaggaaggtgagaatgagtagaacagttttgtattctactccctacaagccattttgaacttctgccctcaccggactctgggctgtgactggggcaccaaactcagcacatgagtctcccctagctctcgtggggagagggatgctatttattcagtttggggcaggagggagaggagggaaagtatttctgaccctgatgccaacagccgggtggctgtccaagcaggattgcaggggacacagggaagcactgcccagcccctgcctggctgccctttcccccctgctgctgccaccgcttcctgcctgtcatttgaataaacagtgtttctattgaaaaaaaaaaaaaaaaaaaa

SEQ ID NO: 12688 - DNA, 5973 bp, Homo sapiens
cacgtgcatgtgtagcatgccttggtttttcctttggcatctgaaaaaggcacaacctgaaagacctagaacccagtgtcggtccccaggccctttgggacaggaagagaagagccgtgtggccgcggggaggatgtcctgcggcggggctgtcctcgcggactgactggactccatctcccagcgggcgccgcggcgcggccacgcccccccactccccgcgcgcgcccggtggagacttcgattttcagaattcctcctgggaatgctgactccttgcttggtgccctgatgcttctctgagataaactgatgaattggaaccatggtgcaaaagaagaagttctgtcctcggttacttgactatctagtgatcgtaggggccaggcacccgagcagtgatagcgtggcccagactcctgaattgctacggcgataccccttggaggatcacactgagtttcccctgcccccagatgtagtgttcttctgccagcccgagggctgcctgagcgtgcggcagcggcgcatgagccttcgggatgatacctcttttgtcttcaccctcactgacaaggacactggagtcacgcgatatggcatctgtgttaacttctaccgctccttccaaaagcgaatctctaaggagaagggggaaggtggggcagggtcccgtgggaaggaaggaacccatgccacctgtgcctcagaagagggtggcactgagagctcagagagtggctcatccctgcagcctctcagtgctgactctacccctgatgtgaaccagtctcctcggggcaaacgccgggccaaggcggggagccgctcccgcaacagtactctcacgtccctgtgcgtgctcagccactaccctttcttctccaccttccgagagtgtttgtatactctcaagcgcctggtggactgctgtagtgagcgccttctgggcaagaaactgggcatccctcgaggcgtacaaagggacaccatgtggcggatctttactggatcgctgctggtagaggagaagtcaagtgcccttctgcatgaccttcgagagattgaggcctggatctatcgattgctgcgctccccagtacccgtctctgggcagaagcgagtagacatcgaggtcctaccccaagagctccagccagctctgacctttgctcttccagacccatctcgattcaccctagtggatttcccactgcaccttcccttggaacttctaggtgtggacgcctgtctccaggtgctaacctgcattctgttagagcacaaggtggtgctacagtcccgagactacaatgcactctccatgtctgtgatggcattcgtggcaatgatctacccactggaatatatgtttcctgtcatcccgctgctacccacctgcatggcatcagcagagcagctgctgttggctccaaccccgtacatcattggggttcctgccagcttcttcctctacaaactggacttcaaaatgcctgatgatgtatggctagtggatctggacagcaatagggtgattgcccccaccaatgcagaagtgctgcctatcctgccagaaccagaatcactagagctgaaaaagcatttaaagcaggccttggccagcatgagtctcaacacccagcccatcctcaatctggagaaatttcatgagggccaggagatcccccttctcttgggaaggccttctaatgacctgcagtccacaccgtccactgaattcaacccactcatctatggcaatgatgtggattctgtggatgttgcaaccagggttgccatggtacggttcttcaattccgccaacgtgctgcagggatttcagatgcacacgcgtaccctgcgcctctttcctcggcctgtggtagcttttcaagctggctcctttctagcctcacgtccccggcagactccttttgccgagaaattggccaggactcaggctgtggagtactttggggaatggatccttaaccccaccaactatgcctttcagcgaattcacaacaatatgtttgatccagccctgattggtgacaagccaaagtggtatgctcatcagctgcagcctatccactatcgcgtctatgacagcaattcccagctggctgaggccctgagtgtaccaccagagcgggactctgactccgaacctactgatgatagtggcagtgatagtatggattatgacgattcaagctcttcttactcctcccttggtgactttgtcagtgaaatgatgaaatgtgacattaatggtgatactcccaatgtggaccctctgacacatgcagcactgggggatgccagcgaggtggagattgacgagctgcagaatcagaaggaagcagaagagcctggcccagacagtgagaactctcaggaaaaccccccactgcgctccagctctagcaccacagccagcagcagccccagcactgtcatccacggagccaactctgaacctgctgactctacggagatggatgataaggcagcagtaggcgtctccaagcccctcccttccgtgcctcccagcattggcaaatcgaacatggacagacgtcaggcagaaattggagaggggtcagtgcgccggcgaatctatgacaatccatacttcgagccccaatatggctttccccctgaggaagatgaggatgagcagggggaaagttacactccccgattcagccaacatgtcagtggcaatcgggctcaaaagctgctgcggcccaacagcttgagactggcaagtgactcagatgcagagtcagactctcgggcaagctctcccaactccaccgtctccaacaccagcaccgagggcttcgggggcatcatgtcttttgccagcagcctctatcggaaccacagtaccagcttcagtctttcaaacctcacactgcccaccaaaggtgcccgagagaaggccacgcccttccccagtctgaaaggaaacaggagggcgttagtggatcagaagtcatctgtcattaaacacagcccaacagtgaaaagagaacctccatcaccccagggtcgatccagcaattctagtgagaaccagcagttcctgaaggaggtggtgcacagcgtgctggacggccagggagttggctggctcaacatgaaaaaggtgcgccggctgctggagagcgagcagctgcgagtctttgtcctgagcaagctgaaccgcatggtgcagtcagaggacgatgcccggcaggacatcatcccggatgtggagatcagtcggaaggtgtacaagggaatgttagacctcctcaagtgtacagtcctcagcttggagcagtcctatgcccacgcgggtctgggtggcatggccagcatctttgggcttttggagattgcccagacccactactatagtaaagaaccagacaagcggaagagaagtccaacagaaagtgtaaataccccagttggcaaggatcctggcctagctgggcggggggacccaaaggctatggcacaactgagagttccacaactgggacctcgggcaccaagtgccacaggaaagggtcctaaggaactggacaccagaagtttaaaggaagaaaattttatagcatctattgggcctgaagtaatcaaacctgtctttgaccttggtgagacagaggagaaaaagtcccagatcagcgcagacagtggtgtgagcctgacgtctagttcccagaggactgatcaagactctgtcatcggcgtgagtccagctgttatgatccgcagctcaagtcaggattctgaagttagcaccgtggtgagtaatagctctggagagacccttggagctgacagtgacttgagcagcaatgcaggtgatggaccaggtggcgagggcagtgttcacctggcaagctctcggggcactttgtctgatagtgaaattgagaccaactctgccacaagcaccatctttggtaaagcccacagcttgaagccaagcataaaggagaagctggcaggcagccccattcgtacttctgaagatgtgagccagcgagtctatctctatgagggactcctaggcaaagagcgttctactttatgggaccaaatgcaattctgggaagatgccttcttagatgctgtgatgttggagagagaagggatgggtatggaccagggtccccaggaaatgatcgacaggtacctgtcccttggagaacatgaccggaagcgcctggaagatgatgaagatcgcttgctggccacacttctgcacaacctcatctcctacatgctgctgatgaaggtaaataagaatgacatccgcaagaaggtgaggcgcctaatgggaaagtcgcacattgggcttgtgtacagccagcaaatcaatgaggtgcttgatcagctggcgaacctgaatggacgcgatctctctatctggtccagtggcagccggcacatgaagaagcagacatttgtggtacatgcagggacagatacaaacggagatatctttttcatggaggtgtgcgatgactgtgtggtgttgcgtagtaacatcggaacagtgtatgagcgctggtggtacgagaagctcatcaacatgacctactgtcccaagacgaaggtgttgtgcttgtggcgtagaaatggctctgagacccagctcaacaagttctatactaaaaagtgtcgggagctgtactactgtgtgaaggacagcatggagcgcgctgccgcccgacagcaaagcatcaaacccggacctgaattgggtggcgagttccctgtgcaggacctgaagactggtgagggtggcctgctgcaggtgaccctggaagggatcaacctcaaattcatgcacaatcaggttttcatagagctgaatcacattaaaaagtgcaatacagttcgaggcgtctttgtcctggaggaatttgttcctgaaattaaagaagtggtgagccacaagtacaagacaccaatggcccacgaaatctgctactccgtattatgtctcttctcgtacgtggctgcagttcatagcagtgaggaagatctcagaaccccgccccggcctgtctctagctgatggagaggggctacgcagctgccccagcccagggcacgcccctggccccttgctgttcccaagtgcacgatgctgctgtgactgaggagtggatgatgctcgtgtgtcctctgcaagccccctgctgtggcttggttggttaccggttatgtgtccctctgagtgtgtcttgagcgtgtccaccttctccctctccactcccagaagaccaaactgccttcccctcagggctcaagaatgtgtacagtctgtggggccggtgtgaacccactattttgtgtccttgagacatttgtgttgtggttccttgtccttgtccctggcgttataactgtccactgcaagagtctggctctcccttctctgtgacccggcatgactgggcgcctggagcagtttcactctgtgaggagtgagggaaccctggggctcaccctctcagaggaagggcacagagaggaagggaagaattggggggcagccggagtgagtggcagcctccctgcttccttctgcattcccaagccggcagctactgcccagggcccgcagtgttggctgctgcctgccacagcctctgtgactgcagtggagcggcgaattccctgtggcctgccacgccttcggcatcagaggatggagtggtcgaggctagtggagtcccagggaccgctggctgctctgcctgagcatcagggagggggcaggaaagaccaagctgggtttgcacatctgtctgcaggctgtctctccaggcacggggtgtcaggagggagagacagcctgggtatgggcaagaaatgactgtaaatatttcagccccacattatttatagaaaatgtacagttgtgtgaatgtgaaataaatgtcctcaactccc

SEQ ID NO: 12689 - DNA, 6016 bp, Homo sapiens
accgcggccgcgcgcccccctctgcccccgctgcccaggattggtaggctccaccgctcggcagccggcttccctgctcggacgccgagcaccgccaaagcgcacttcgattttcagaattcctcctgggaatgctgactccttgcttggtgccctgatgcttctctgagataaactgatgaattggaaccatggtgcaaaagaagaagttctgtcctcggttacttgactatctagtgatcgtaggggccaggcacccgagcagtgatagcgtggcccagactcctgaattgctacggcgataccccttggaggatcacactgagtttcccctgcccccagatgtagtgttcttctgccagcccgagggctgcctgagcgtgcggcagcggcgcatgagccttcgggatgatacctcttttgtcttcaccctcactgacaaggacactggagtcacgcgatatggcatctgtgttaacttctaccgctccttccaaaagcgaatctctaaggagaagggggaaggtggggcagggtcccgtgggaaggaaggaacccatgccacctgtgcctcagaagagggtggcactgagagctcagagagtggctcatccctgcagcctctcagtgctgactctacccctgatgtgaaccagtctcctcggggcaaacgccgggccaaggcggggagccgctcccgcaacagtactctcacgtccctgtgcgtgctcagccactaccctttcttctccaccttccgagagtgtttgtatactctcaagcgcctggtggactgctgtagtgagcgccttctgggcaagaaactgggcatccctcgaggcgtacaaagggacaccatgtggcggatctttactggatcgctgctggtagaggagaagtcaagtgcccttctgcatgaccttcgagagattgaggcctggatctatcgattgctgcgctccccagtacccgtctctgggcagaagcgagtagacatcgaggtcctaccccaagagctccagccagctctgacctttgctcttccagacccatctcgattcaccctagtggatttcccactgcaccttcccttggaacttctaggtgtggacgcctgtctccaggtgctaacctgcattctgttagagcacaaggtggtgctacagtcccgagactacaatgcactctccatgtctgtgatggcattcgtggcaatgatctacccactggagtatatgtttcctgtcatcccgctgctacccacctgcatggcatcagcagagcagctgctgttggctccaaccccgtacatcattggggttcctgccagcttcttcctctacaaactggacttcaaaatgcctgatgatgtatggctagtggatctggacagcaatagggtgattgcccccaccaatgcagaagtgctgcctatcctgccagaaccagaatcactagagctgaaaaagcatttaaagcaggccttggccagcatgagtctcaacacccagcccatcctcaatctggagaaatttcatgagggccaggagatcccccttctcttgggaaggccttctaatgacctgcagtccacaccgtccactgaattcaacccactcatctatggcaatgatgtggattctgtggatgttgcaaccagggttgccatggtacggttcttcaattccgccaacgtgctgcagggatttcagatgcacacgcgtaccctgcgcctctttcctcggcctgtggtagcttttcaagctggctcctttctagcctcacgtccccggcagactccttttgccgagaaattggccaggactcaggctgtggagtactttggggaatggatccttaaccccaccaactatgcctttcagcgaattcacaacaatatgtttgatccagccctgattggtgacaagccaaagtggtatgctcatcagctgcagcctatccactatcgcgtctatgacagcaattcccagctggctgaggccctgagtgtaccaccagagcgggactctgactccgaacctactgatgatagtggcagtgatagtatggattatgacgattcaagctcttcttactcctcccttggtgactttgtcagtgaaatgatgaaatgtgacattaatggtgatactcccaatgtggaccctctgacacatgcagcactgggggatgccagcgaggtggagattgacgagctgcagaatcagaaggaagcagaagagcctggcccagacagtgagaactctcaggaaaaccccccactgcgctccagctctagcaccacagccagcagcagccccagcactgtcatccacggagccaactctgaacctgctgactctacggagatggatgataaggcagcagtaggcgtctccaagcccctcccttccgtgcctcccagcattggcaaatcgaacatggacagacgtcaggcagaaattggagaggggtcagtgcgccggcgaatctatgacaatccatacttcgagccccaatatggctttccccctgaggaagatgaggatgagcagggggaaagttacactccccgattcagccaacatgtcagtggcaatcgggctcaaaagctgctgcggcccaacagcttgagactggcaagtgactcagatgcagagtcagactctcgggcaagctctcccaactccaccgtctccaacaccagcaccgagggcttcgggggcatcatgtcttttgccagcagcctctatcggaaccacagtaccagcttcagtctttcaaacctcacactgcccaccaaaggtgcccgagagaaggccacgcccttccccagtctgaaagtatttgggctaaatactctaatggagattgttactgaagccggccccgggagtggtgaaggaaacaggagggcgttagtggatcagaagtcatctgtcattaaacacagcccaacagtgaaaagagaacctccatcaccccagggtcgatccagcaattctagtgagaaccagcagttcctgaaggaggtggtgcacagcgtgctggacggccagggagttggctggctcaacatgaaaaaggtgcgccggctgctggagagcgagcagctgcgagtctttgtcctgagcaagctgaaccgcatggtgcagtcagaggacgatgcccggcaggacatcatcccggatgtggagatcagtcggaaggtgtacaagggaatgttagacctcctcaagtgtacagtcctcagcttggagcagtcctatgcccacgcgggtctgggtggcatggccagcatctttgggcttttggagattgcccagacccactactatagtaaagaaccagacaagcggaagagaagtccaacagaaagtgtaaataccccagttggcaaggatcctggcctagctgggcggggggacccaaaggctatggcacaactgagagttccacaactgggacctcgggcaccaagtgccacaggaaagggtcctaaggaactggacaccagaagtttaaaggaagaaaattttatagcatctattgaattgtggaacaagcaccaggaagtgaaaaagcaaaaagctttggaaaaacagaggcctgaagtaatcaaacctgtctttgaccttggtgagacagaggagaaaaagtcccagatcagcgcagacagtggtgtgagcctgacgtctagttcccagaggactgatcaagactctgtcatcggcgtgagtccagctgttatgatccgcagctcaagtcaggattctgaagttagcaccgtggtgagtaatagctctggagagacccttggagctgacagtgacttgagcagcaatgcaggtgatggaccaggtggcgagggcagtgttcacctggcaagctctcggggcactttgtctgatagtgaaattgagaccaactctgccacaagcaccatctttggtaaagcccacagcttgaagccaagcataaaggagaagctggcaggcagccccattcgtacttctgaagatgtgagccagcgagtctatctctatgagggactcctaggaagggacaaaggatccatgtgggaccagttagaggatgcagctatggagaccttttctataagcaaagagcgttctactttatgggaccaaatgcaattctgggaagatgccttcttagatgctgtgatgttggagagagaagggatgggtatggaccagggtccccaggaaatgatcgacaggtacctgtcccttggagaacatgaccggaagcgcctggaagatgatgaagatcgcttgctggccacacttctgcacaacctcatctcctacatgctgctgatgaaggtaaataagaatgacatccgcaagaaggtgaggcgcctaatgggaaagtcgcacattgggcttgtgtacagccagcaaatcaatgaggtgcttgatcagctggcgaacctgaatggacgcgatctctctatctggtccagtggcagccggcacatgaagaagcagacatttgtggtacatgcagggacagatacaaacggagatatctttttcatggaggtgtgcgatgactgtgtggtgttgcgtagtaacatcggaacagtgtatgagcgctggtggtacgagaagctcatcaacatgacctactgtcccaagacgaaggtgttgtgcttgtggcgtagaaatggctctgagacccagctcaacaagttctatactaaaaagtgtcgggagctgtactactgtgtgaaggacagcatggagcgcgctgccgcccgacagcaaagcatcaaacccggacctgaattgggtggcgagttccctgtgcaggacctgaagactggtgagggtggcctgctgcaggtgaccctggaagggatcaacctcaaattcatgcacaatcaggttttcatagagctgaatcacattaaaaagtgcaatacagttcgaggcgtctttgtcctggaggaatttgttcctgaaattaaagaagtggtgagccacaagtacaagacaccaatggcccacgaaatctgctactccgtattatgtctcttctcgtacgtggctgcagttcatagcagtgaggaagatctcagaaccccgccccggcctgtctctagctgatggagaggggctacgcagctgccccagcccagggcacgcccctggccccttgctgttcccaagtgcacgatgctgctgtgactgaggagtggatgatgctcgtgtgtcctctgcaagccccctgctgtggcttggttggttaccggttatgtgtccctctgagtgtgtcttgagcgtgtccaccttctccctctccactcccagaagaccaaactgccttcccctcagggctcaagaatgtgtacagtctgtggggccggtgtgaacccactattttgtgtccttgagacatttgtgttgtggttccttgtccttgtccctggcgttataactgtccactgcaagagtctggctctcccttctctgtgacccggcatgactgggcgcctggagcagtttcactctgtgaggagtgagggaaccctggggctcaccctctcagaggaagggcacagagaggaagggaagaattggggggcagccggagtgagtggcagcctccctgcttccttctgcattcccaagccggcagctactgcccagggcccgcagtgttggctgctgcctgccacagcctctgtgactgcagtggagcggcgaattccctgtggcctgccacgccttcggcatcagaggatggagtggtcgaggctagtggagtcccagggaccgctggctgctctgcctgagcatcagggagggggcaggaaagaccaagctgggtttgcacatctgtctgcaggctgtctctccaggcacggggtgtcaggagggagagacagcctgggtatgggcaagaaatgactgtaaatatttcagccccacattatttatagaaaatgtacagttgtgtgaatgtgaaataaatgtcctcaactccc

SEQ ID NO: 12690 - DNA, 5957 bp, Homo sapiens
agtgcagacgcggaactggcgcccgctcggagcggcgccgcgctggggagcgactgacgccccgctgccgggggacgtcgggctgggcctggccagtcccccagagcttgggagacttcgattttcagaattcctcctgggaatgctgactccttgcttggtgccctgatgcttctctgagataaactgatgaattggaaccatggtgcaaaagaagaagttctgtcctcggttacttgactatctagtgatcgtaggggccaggcacccgagcagtgatagcgtggcccagactcctgaattgctacggcgataccccttggaggatcacactgagtttcccctgcccccagatgtagtgttcttctgccagcccgagggctgcctgagcgtgcggcagcggcgcatgagccttcgggatgatacctcttttgtcttcaccctcactgacaaggacactggagtcacgcgatatggcatctgtgttaacttctaccgctccttccaaaagcgaatctctaaggagaagggggaaggtggggcagggtcccgtgggaaggaaggaacccatgccacctgtgcctcagaagagggtggcactgagagctcagagagtggctcatccctgcagcctctcagtgctgactctacccctgatgtgaaccagtctcctcggggcaaacgccgggccaaggcggggagccgctcccgcaacagtactctcacgtccctgtgcgtgctcagccactaccctttcttctccaccttccgagagtgtttgtatactctcaagcgcctggtggactgctgtagtgagcgccttctgggcaagaaactgggcatccctcgaggcgtacaaagggacaccatgtggcggatctttactggatcgctgctggtagaggagaagtcaagtgcccttctgcatgaccttcgagagattgaggcctggatctatcgattgctgcgctccccagtacccgtctctgggcagaagcgagtagacatcgaggtcctaccccaagagctccagccagctctgacctttgctcttccagacccatctcgattcaccctagtggatttcccactgcaccttcccttggaacttctaggtgtggacgcctgtctccaggtgctaacctgcattctgttagagcacaaggtggtgctacagtcccgagactacaatgcactctccatgtctgtgatggcattcgtggcaatgatctacccactggaatatatgtttcctgtcatcccgctgctacccacctgcatggcatcagcagagcagctgctgttggctccaaccccgtacatcattggggttcctgccagcttcttcctctacaaactggacttcaaaatgcctgatgatgtatggctagtggatctggacagcaatagggtgattgcccccaccaatgcagaagtgctgcctatcctgccagaaccagaatcactagagctgaaaaagcatttaaagcaggccttggccagcatgagtctcaacacccagcccatcctcaatctggagaaatttcatgagggccaggagatcccccttctcttgggaaggccttctaatgacctgcagtccacaccgtccactgaattcaacccactcatctatggcaacgatgtggattctgtggatgttgcaaccagggttgccatggtacggttcttcaattccgccaacgtgctgcagggatttcagatgcacacgcgtaccctgcgcctctttcctcggcctgtggtagcttttcaagctggctcctttctagcctcacgtccccggcagactccttttgccgagaaattggccaggactcaggctgtggagtactttggggaatggatccttaaccccaccaactatgcctttcagcgaattcacaacaatatgtttgatccagccctgattggtgacaagccaaagtggtatgctcatcagctgcagcctatccactatcgcgtctatgacagcaattcccagctggctgaggccctgagtgtaccaccagagcgggactctgactccgaacctactgatgatagtggcagtgatagtatggattatgacgattcaagctcttcttactcctcccttggtgactttgtcagtgaaatgatgaaatgtgacattaatggtgatactcccaatgtggaccctctgacacatgcagcactgggggatgccagcgaggtggagattgacgagctgcagaatcagaaggaagcagaagagcctggcccagacagtgagaactctcaggaaaaccccccactgcgctccagctctagcaccacagccagcagcagccccagcactgtcatccacggagccaactctgaacctgctgactctacggagatggatgataaggcagcagtaggcgtctccaagcccctcccttccgtgcctcccagcattggcaaatcgaacgtggacagacgtcaggcagaaattggagaggggtcagtgcgccggcgaatctatgacaatccatacttcgagccccaatatggctttccccctgaggaagatgaggatgagcagggggaaagttacactccccgattcagccaacatgtcagtggcaatcgggctcaaaagctgctgcggcccaacagcttgagactggcaagtgactcagatgcagagtcagactctcgggcaagctctcccaactccaccgtctccaacaccagcaccgagggcttcgggggcatcatgtcttttgccagcagcctctatcggaaccacagtaccagcttcagtctttcaaacctcacactgcccaccaaaggtgcccgagagaaggccacgcccttccccagtctgaaagtatttgggctaaatactctaatggagattgttactgaagccggccccgggagtggtgaaggaaacaggagggcgttagtggatcagaagtcatctgtcattaaacacagcccaacagtgaaaagagaacctccatcaccccagggtcgatccagcaattctagtgagaaccagcagttcctgaaggaggtggtgcacagcgtgctggacggccagggagttggctggctcaacatgaaaaaggtgcgccggctgctggagagcgagcagctgcgagtctttgtcctgagcaagctgaaccgcatggtgcagtcagaggacgatgcccggcaggacatcatcccggatgtggagatcagtcggaaggtgtacaagggaatgttagacctcctcaagtgtacagtcctcagcttggagcagtcctatgcccacgcgggtctgggtggcatggccagcatctttgggcttttggagattgcccagacccactactatagtaaagaaccagacaagcggaagagaagtccaacagaaagtgtaaataccccagttggcaaggatcctggcctagctgggcggggggacccaaaggctatggcacaactgagagttccacaactgggacctcgggcaccaagtgccacaggaaagggtcctaaggaactggacaccagaagtttaaaggaagaaaattttatagcatctattgaattgtggaacaagcaccaggaagtgaaaaagcaaaaagctttggaaaaacagaggcctgaagtaatcaaacctgtctttgaccttggtgagacagaggagaaaaagtcccagatcagcgcagacagtggtgtgagcctgacgtctagttcccagaggactgatcaagactctgtcatcggcgtgagtccagctgttatgatccgcagctcaagtcaggattctgaagttagcaccgtggtgagtaatagctctggagagacccttggagctgacagtgacttgagcagcaatgcaggtgatggaccaggtggcgagggcagtgttcacctggcaagctctcggggcactttgtctgatagtgaaattgagaccaactctgccacaagcaccatctttggtaaagcccacagcttgaagccaagcataaaggagaagctggcaggcagccccattcgtacttctgaagatgtgagccagcgagtctatctctatgagggactcctaggaagggacaaaggatccatgtgggaccagttagaggatgcagctatggagaccttttctataagcaaagagcgttctactttatgggaccaaatgcaattctgggaagatgccttcttagatgctgtgatgttggagagagaagggatgggtatggaccagggtccccaggaaatgatcgacaggtacctgtcccttggagaacatgaccggaagcgcctggaagatgatgaagatcgcttgctggccacacttctgcacaacctcatctcctacatgctgctgatgaaggtaaataagaatgacatccgcaagaaggtgaggcgcctaatgggaaagtcgcacattgggcttgtgtacagccagcaaatcaatgaggtgcttgatcagctggcgaacctgaatggacgcgatctctctatctggtccagtggcagccggcacatgaagaagcagacatttgtggtacatgcagggacagatacaaacggagatatctttttcatggaggtgtgcgatgactgtgtggtgttgcgtagtaacatcggaacagtgtatgagcgctggtggtacgagaagctcatcaacatgacctactgtcccaagacgaaggtgttgtgcttgtggcgtagaaatggctctgagacccagctcaacaagttctatactaaaaagtgtcgggagctgtactactgtgtgaaggacagcatggagcgcgctgccgcccgacagcaaagcatcaaacccggacctgaattgggtggcgagttccctgtgcaggacctgaagactggtgagggtggcctgctgcaggtgaccctggaagggatcaacctcaaattcatgcacaatcagttcctgaaattaaagaagtggtgagccacaagtacaagacaccaatggcccacgaaatctgctactccgtattatgtctcttctcgtacgtggctgcagttcatagcagtgaggaagatctcagaaccccgccccggcctgtctctagctgatggagaggggctacgcagctgccccagcccagggcacgcccctggccccttgctgttcccaagtgcacgatgctgctgtgactgaggagtggatgatgctcgtgtgtcctctgcaagccccctgctgtggcttggttggttaccggttatgtgtccctctgagtgtgtcttgagcgtgtccaccttctccctctccactcccagaagaccaaactgccttcccctcagggctcaagaatgtgtacagtctgtggggccggtgtgaacccactattttgtgtccttgagacatttgtgttgtggttccttgtccttgtccctggcgttataactgtccactgcaagagtctggctctcccttctctgtgacccggcatgactgggcgcctggagcagtttcactctgtgaggagtgagggaaccctggggctcaccctctcagaggaagggcacagagaggaagggaagaattggggggcagccggagtgagtggcagcctccctgcttccttctgcattcccaagccggcagctactgcccagggcccgcagtgttggctgctgcctgccacagcctctgtgactgcagtggagcggcgaattccctgtggcctgccacgccttcggcatcagaggatggagtggtcgaggctagtggagtcccagggaccgctggctgctctgcctgagcatcagggagggggcaggaaagaccaagctgggtttgcacatctgtctgcaggctgtctctccaggcacggggtgtcaggagggagagacagcctgggtatgggcaagaaatgactgtaaatatttcagccccacattatttatagaaaatgtacagttgtgtgaatgtgaaataaatgtcctcaactccc

SEQ ID NO: 12691 - DNA, 5770 bp, Homo sapiens
accgcggccgcgcgcccccctctgcccccgctgcccaggattggtaggctccaccgctcggcagccggcttccctgctcggacgccgagcaccgccaaagcgcacttcgattttcagaattcctcctgggaatgctgactccttgcttggtgccctgatgcttctctgagataaactgatgaattggaaccatggtgcaaaagaagaagttctgtcctcggttacttgactatctagtgatcgtaggggccaggcacccgagcagtgatagcgtggcccagactcctgaattgctacggcgataccccttggaggatcacactgagtttcccctgcccccagatgtagtgttcttctgccagcccgagggctgcctgagcgtgcggcagcggcgcatgagccttcgggatgatacctcttttgtcttcaccctcactgacaaggacactggagtcacgcgatatggcatctgtgttaacttctaccgctccttccaaaagcgaatctctaaggagaagggggaaggtggggcagggtcccgtgggaaggaaggaacccatgccacctgtgcctcagaagagggtggcactgagagctcagagagtggctcatccctgcagcctctcagtgctgactctacccctgatgtgaaccagtctcctcggggcaaacgccgggccaaggcggggagccgctcccgcaacagtactctcacgtccctgtgcgtgctcagccactaccctttcttctccaccttccgagagtgtttgtatactctcaagcgcctggtggactgctgtagtgagcgccttctgggcaagaaactgggcatccctcgaggcgtacaaagggacaccatgtggcggatctttactggatcgctgctggtagaggagaagtcaagtgcccttctgcatgaccttcgagagattgaggcctggatctatcgattgctgcgctccccagtacccgtctctgggcagaagcgagtagacatcgaggtcctaccccaagagctccagccagctctgacctttgctcttccagacccatctcgattcaccctagtggatttcccactgcaccttcccttggaacttctaggtgtggacgcctgtctccaggtgctaacctgcattctgttagagcacaaggtggtgctacagtcccgagactacaatgcactctccatgtctgtgatggcattcgtggcaatgatctacccactggagtatatgtttcctgtcatcccgctgctacccacctgcatggcatcagcagagcagctgctgttggctccaaccccgtacatcattggggttcctgccagcttcttcctctacaaactggacttcaaaatgcctgatgatgtatggctagtggatctggacagcaatagggtgattgcccccaccaatgcagaagtgctgcctatcctgccagaaccagaatcactagagctgaaaaagcatttaaagcaggccttggccagcatgagtctcaacacccagcccatcctcaatctggagaaatttcatgagggccaggagatcccccttctcttgggaaggccttctaatgacctgcagtccacaccgtccactgaattcaacccactcatctatggcaatgatgtggattctgtggatgttgcaaccagggttgccatggtacggttcttcaattccgccaacgtgctgcagggatttcagatgcacacgcgtaccctgcgcctctttcctcggcctgtggtagcttttcaagctggctcctttctagcctcacgtccccggcagactccttttgccgagaaattggccaggactcaggctgtggagtactttggggaatggatccttaaccccaccaactatgcctttcagcgaattcacaacaatatgtttgatccagccctgattggtgacaagccaaagtggtatgctcatcagctgcagcctatccactatcgcgtctatgacagcaattcccagctggctgaggccctgagtgtaccaccagagcgggactctgactccgaacctactgatgatagtggcagtgatagtatggattatgacgattcaagctcttcttactcctcccttggtgactttgtcagtgaaatgatgaaatgtgacattaatggtgatactcccaatgtggaccctctgacacatgcagcactgggggatgccagcgaggtggagattgacgagctgcagaatcagaaggaagcagaagagcctggcccagacagtgagaactctcaggaaaaccccccactgcgctccagctctagcaccacagccagcagcagccccagcactgtcatccacggagccaactctgaacctgctgactctacggagatggatgataaggcagcagtaggcgtctccaagcccctcccttccgtgcctcccagcattggcaaatcgaacatggacagacgtcaggcagaaattggagagggggctcaaaagctgctgcggcccaacagcttgagactggcaagtgactcagatgcagagtcagactctcgggcaagctctcccaactccaccgtctccaacaccagcaccgagggcttcgggggcatcatgtcttttgccagcagcctctatcggaaccacagtaccagcttcagtctttcaaacctcacactgcccaccaaaggtgcccgagagaaggccacgcccttccccagtctgaaagtatttgggctaaatactctaatggagattgttactgaagccggccccgggagtggtgaaggaaacaggagggcgttagtggatcagaagtcatctgtcattaaacacagcccaacagtgaaaagagaacctccatcaccccagggtcgatccagcaattctagtgagaaccagcagttcctgaaggaggtggtgcacagcgtgctggacggccagggagttggctggctcaacatgaaaaaggtgcgccggctgctggagagcgagcagctgcgagtctttgtcctgagcaagctgaaccgcatggtgcagtcagaggacgatgcccggcaggacatcatcccggatgtggagatcagtcggaaggtgtacaagggaatgttagacctcctcaagtgtacagtcctcagcttggagcagtcctatgcccacgcgggtctgggtggcatggccagcatctttgggcttttggagattgcccagacccactactatagtaaagaaccagacaagcggaagagaagtccaacagaaagtgtaaataccccagttggcaaggatcctggcctagctgggcggggggacccaaaggctatggcacaactgagagttccacaactgggacctcgggcaccaagtgccacaggaaagggtcctaaggaactggacaccagaagtttaaaggaagaaaattttatagcatctattgggcctgaagtaatcaaacctgtctttgaccttggtgagacagaggagaaaaagtcccagatcagcgcagacagtggtgtgagcctgacgtctagttcccagaggactgatcaagactctgtcatcggcgtgagtccagctgttatgatccgcagctcaagtcaggattctgaagttagcaccgtggtgagtaatagctctggagagacccttggagctgacagtgacttgagcagcaatgcaggtgatggaccaggtggcgagggcagtgttcacctggcaagctctcggggcactttgtctgatagtgaaattgagaccaactctgccacaagcaccatctttggtaaagcccacagcttgaagccaagcataaaggagaagctggcaggcagccccattcgtacttctgaagatgtgagccagcgagtctatctctatgagggactcctaggcaaagagcgttctactttatgggaccaaatgcaattctgggaagatgccttcttagatgctgtgatgttggagagagaagggatgggtatggaccagggtccccaggaaatgatcgacaggtacctgtcccttggagaacatgaccggaagcgcctggaagatgatgaagatcgcttgctggccacacttctgcacaacctcatctcctacatgctgctgatgaaggtaaataagaatgacatccgcaagaaggtgaggcgcctaatgggaaagtcgcacattgggcttgtgtacagccagcaaatcaatgaggtgcttgatcagctggcgaacctgaatggacgcgatctctctatctggtccagtggcagccggcacatgaagaagcagacatttgtggtacatgcagggacagatacaaacggagatatctttttcatggaggtgtgcgatgactgtgtggtgttgcgtagtaacatcggaacagtgtatgagcgctggtggtacgagaagctcatcaacatgacctactgtcccaagacgaaggtgttgtgcttgtggcgtagaaatggctctgagacccagctcaacaagttctatactaaaaagtgtcgggagctgtactactgtgtgaaggacagcatggagcgcgctgccgcccgacagcaaagcatcaaacccggacctgaattgggtggcgagttccctgtgcaggacctgaagactggtgagggtggcctgctgcaggtgaccctggaagggatcaacctcaaattcatgcacaatcaggttttcatagagctgaatcacattaaaaagtgcaatacagttcgaggcgtctttgtcctggaggaatttgttcctgaaattaaagaagtggtgagccacaagtacaagacaccaatggcccacgaaatctgctactccgtattatgtctcttctcgtacgtggctgcagttcatagcagtgaggaagatctcagaaccccgccccggcctgtctctagctgatggagaggggctacgcagctgccccagcccagggcacgcccctggccccttgctgttcccaagtgcacgatgctgctgtgactgaggagtggatgatgctcgtgtgtcctctgcaagccccctgctgtggcttggttggttaccggttatgtgtccctctgagtgtgtcttgagcgtgtccaccttctccctctccactcccagaagaccaaactgccttcccctcagggctcaagaatgtgtacagtctgtggggccggtgtgaacccactattttgtgtccttgagacatttgtgttgtggttccttgtccttgtccctggcgttataactgtccactgcaagagtctggctctcccttctctgtgacccggcatgactgggcgcctggagcagtttcactctgtgaggagtgagggaaccctggggctcaccctctcagaggaagggcacagagaggaagggaagaattggggggcagccggagtgagtggcagcctccctgcttccttctgcattcccaagccggcagctactgcccagggcccgcagtgttggctgctgcctgccacagcctctgtgactgcagtggagcggcgaattccctgtggcctgccacgccttcggcatcagaggatggagtggtcgaggctagtggagtcccagggaccgctggctgctctgcctgagcatcagggagggggcaggaaagaccaagctgggtttgcacatctgtctgcaggctgtctctccaggcacggggtgtcaggagggagagacagcctgggtatgggcaagaaatgactgtaaatatttcagccccacattatttatagaaaatgtacagttgtgtgaatgtgaaataaatgtcctcaactccc

SEQ ID NO: 12692 - DNA, 5710 bp, Homo sapiens
accgcggccgcgcgcccccctctgcccccgctgcccaggattggtaggctccaccgctcggcagccggcttccctgctcggacgccgagcaccgccaaagcgcacttcgattttcagaattcctcctgggaatgctgactccttgcttggtgccctgatgcttctctgagataaactgatgaattggaaccatggtgcaaaagaagaagttctgtcctcggttacttgactatctagtgatcgtaggggccaggcacccgagcagtgatagcgtggcccagactcctgaattgctacggcgataccccttggaggatcacactgagtttcccctgcccccagatgtagtgttcttctgccagcccgagggctgcctgagcgtgcggcagcggcgcatgagccttcgggatgatacctcttttgtcttcaccctcactgacaaggacactggagtcacgcgatatggcatctgtgttaacttctaccgctccttccaaaagcgaatctctaaggagaagggggaaggtggggcagggtcccgtgggaaggaaggaacccatgccacctgtgcctcagaagagggtggcactgagagctcagagagtggctcatccctgcagcctctcagtgctgactctacccctgatgtgaaccagtctcctcggggcaaacgccgggccaaggcggggagccgctcccgcaacagtactctcacgtccctgtgcgtgctcagccactaccctttcttctccaccttccgagagtgtttgtatactctcaagcgcctggtggactgctgtagtgagcgccttctgggcaagaaactgggcatccctcgaggcgtacaaagggacaccatgtggcggatctttactggatcgctgctggtagaggagaagtcaagtgcccttctgcatgaccttcgagagattgaggcctggatctatcgattgctgcgctccccagtacccgtctctgggcagaagcgagtagacatcgaggtcctaccccaagagctccagccagctctgacctttgctcttccagacccatctcgattcaccctagtggatttcccactgcaccttcccttggaacttctaggtgtggacgcctgtctccaggtgctaacctgcattctgttagagcacaaggtggtgctacagtcccgagactacaatgcactctccatgtctgtgatggcattcgtggcaatgatctacccactggagtatatgtttcctgtcatcccgctgctacccacctgcatggcatcagcagagcagctgctgttggctccaaccccgtacatcattggggttcctgccagcttcttcctctacaaactggacttcaaaatgcctgatgatgtatggctagtggatctggacagcaatagggtgattgcccccaccaatgcagaagtgctgcctatcctgccagaaccagaatcactagagctgaaaaagcatttaaagcaggccttggccagcatgagtctcaacacccagcccatcctcaatctggagaaatttcatgagggccaggagatcccccttctcttgggaaggccttctaatgacctgcagtccacaccgtccactgaattcaacccactcatctatggcaatgatgtggattctgtggatgttgcaaccagggttgccatggtacggttcttcaattccgccaacgtgctgcagggatttcagatgcacacgcgtaccctgcgcctctttcctcggcctgtggtagcttttcaagctggctcctttctagcctcacgtccccggcagactccttttgccgagaaattggccaggactcaggctgtggagtactttggggaatggatccttaaccccaccaactatgcctttcagcgaattcacaacaatatgtttgatccagccctgattggtgacaagccaaagtggtatgctcatcagctgcagcctatccactatcgcgtctatgacagcaattcccagctggctgaggccctgagtgtaccaccagagcgggactctgactccgaacctactgatgatagtggcagtgatagtatggattatgacgattcaagctcttcttactcctcccttggtgactttgtcagtgaaatgatgaaatgtgacattaatggtgatactcccaatgtggaccctctgacacatgcagcactgggggatgccagcgaggtggagattgacgagctgcagaatcagaaggaagcagaagagcctggcccagacagtgagaactctcaggaaaaccccccactgcgctccagctctagcaccacagccagcagcagccccagcactgtcatccacggagccaactctgaacctgctgactctacggagatggatgataaggcagcagtaggcgtctccaagcccctcccttccgtgcctcccagcattggcaaatcgaacatggacagacgtcaggcagaaattggagagggggctcaaaagctgctgcggcccaacagcttgagactggcaagtgactcagatgcagagtcagactctcgggcaagctctcccaactccaccgtctccaacaccagcaccgagggcttcgggggcatcatgtcttttgccagcagcctctatcggaaccacagtaccagcttcagtctttcaaacctcacactgcccaccaaaggtgcccgagagaaggccacgcccttccccagtctgaaaggaaacaggagggcgttagtggatcagaagtcatctgtcattaaacacagcccaacagtgaaaagagaacctccatcaccccagggtcgatccagcaattctagtgagaaccagcagttcctgaaggaggtggtgcacagcgtgctggacggccagggagttggctggctcaacatgaaaaaggtgcgccggctgctggagagcgagcagctgcgagtctttgtcctgagcaagctgaaccgcatggtgcagtcagaggacgatgcccggcaggacatcatcccggatgtggagatcagtcggaaggtgtacaagggaatgttagacctcctcaagtgtacagtcctcagcttggagcagtcctatgcccacgcgggtctgggtggcatggccagcatctttgggcttttggagattgcccagacccactactatagtaaagaaccagacaagcggaagagaagtccaacagaaagtgtaaataccccagttggcaaggatcctggcctagctgggcggggggacccaaaggctatggcacaactgagagttccacaactgggacctcgggcaccaagtgccacaggaaagggtcctaaggaactggacaccagaagtttaaaggaagaaaattttatagcatctattgggcctgaagtaatcaaacctgtctttgaccttggtgagacagaggagaaaaagtcccagatcagcgcagacagtggtgtgagcctgacgtctagttcccagaggactgatcaagactctgtcatcggcgtgagtccagctgttatgatccgcagctcaagtcaggattctgaagttagcaccgtggtgagtaatagctctggagagacccttggagctgacagtgacttgagcagcaatgcaggtgatggaccaggtggcgagggcagtgttcacctggcaagctctcggggcactttgtctgatagtgaaattgagaccaactctgccacaagcaccatctttggtaaagcccacagcttgaagccaagcataaaggagaagctggcaggcagccccattcgtacttctgaagatgtgagccagcgagtctatctctatgagggactcctaggcaaagagcgttctactttatgggaccaaatgcaattctgggaagatgccttcttagatgctgtgatgttggagagagaagggatgggtatggaccagggtccccaggaaatgatcgacaggtacctgtcccttggagaacatgaccggaagcgcctggaagatgatgaagatcgcttgctggccacacttctgcacaacctcatctcctacatgctgctgatgaaggtaaataagaatgacatccgcaagaaggtgaggcgcctaatgggaaagtcgcacattgggcttgtgtacagccagcaaatcaatgaggtgcttgatcagctggcgaacctgaatggacgcgatctctctatctggtccagtggcagccggcacatgaagaagcagacatttgtggtacatgcagggacagatacaaacggagatatctttttcatggaggtgtgcgatgactgtgtggtgttgcgtagtaacatcggaacagtgtatgagcgctggtggtacgagaagctcatcaacatgacctactgtcccaagacgaaggtgttgtgcttgtggcgtagaaatggctctgagacccagctcaacaagttctatactaaaaagtgtcgggagctgtactactgtgtgaaggacagcatggagcgcgctgccgcccgacagcaaagcatcaaacccggacctgaattgggtggcgagttccctgtgcaggacctgaagactggtgagggtggcctgctgcaggtgaccctggaagggatcaacctcaaattcatgcacaatcaggttttcatagagctgaatcacattaaaaagtgcaatacagttcgaggcgtctttgtcctggaggaatttgttcctgaaattaaagaagtggtgagccacaagtacaagacaccaatggcccacgaaatctgctactccgtattatgtctcttctcgtacgtggctgcagttcatagcagtgaggaagatctcagaaccccgccccggcctgtctctagctgatggagaggggctacgcagctgccccagcccagggcacgcccctggccccttgctgttcccaagtgcacgatgctgctgtgactgaggagtggatgatgctcgtgtgtcctctgcaagccccctgctgtggcttggttggttaccggttatgtgtccctctgagtgtgtcttgagcgtgtccaccttctccctctccactcccagaagaccaaactgccttcccctcagggctcaagaatgtgtacagtctgtggggccggtgtgaacccactattttgtgtccttgagacatttgtgttgtggttccttgtccttgtccctggcgttataactgtccactgcaagagtctggctctcccttctctgtgacccggcatgactgggcgcctggagcagtttcactctgtgaggagtgagggaaccctggggctcaccctctcagaggaagggcacagagaggaagggaagaattggggggcagccggagtgagtggcagcctccctgcttccttctgcattcccaagccggcagctactgcccagggcccgcagtgttggctgctgcctgccacagcctctgtgactgcagtggagcggcgaattccctgtggcctgccacgccttcggcatcagaggatggagtggtcgaggctagtggagtcccagggaccgctggctgctctgcctgagcatcagggagggggcaggaaagaccaagctgggtttgcacatctgtctgcaggctgtctctccaggcacggggtgtcaggagggagagacagcctgggtatgggcaagaaatgactgtaaatatttcagccccacattatttatagaaaatgtacagttgtgtgaatgtgaaataaatgtcctcaactccc

SEQ ID NO: 12693 - DNA, 5850 bp, Homo sapiens
agtgcagacgcggaactggcgcccgctcggagcggcgccgcgctggggagcgactgacgccccgctgccgggggacgtcgggctgggcctggccagtcccccagagcttgggagacttcgattttcagaattcctcctgggaatgctgactccttgcttggtgccctgatgcttctctgagataaactgatgaattggaaccatggtgcaaaagaagaagttctgtcctcggttacttgactatctagtgatcgtaggggccaggcacccgagcagtgatagcgtggcccagactcctgaattgctacggcgataccccttggaggatcacactgagtttcccctgcccccagatgtagtgttcttctgccagcccgagggctgcctgagcgtgcggcagcggcgcatgagccttcgggatgatacctcttttgtcttcaccctcactgacaaggacactggagtcacgcgatatggcatctgtgttaacttctaccgctccttccaaaagcgaatctctaaggagaagggggaaggtggggcagggtcccgtgggaaggaaggaacccatgccacctgtgcctcagaagagggtggcactgagagctcagagagtggctcatccctgcagcctctcagtgctgactctacccctgatgtgaaccagtctcctcggggcaaacgccgggccaaggcggggagccgctcccgcaacagtactctcacgtccctgtgcgtgctcagccactaccctttcttctccaccttccgagagtgtttgtatactctcaagcgcctggtggactgctgtagtgagcgccttctgggcaagaaactgggcatccctcgaggcgtacaaagggacaccatgtggcggatctttactggatcgctgctggtagaggagaagtcaagtgcccttctgcatgaccttcgagagattgaggcctggatctatcgattgctgcgctccccagtacccgtctctgggcagaagcgagtagacatcgaggtcctaccccaagagctccagccagctctgacctttgctcttccagacccatctcgattcaccctagtggatttcccactgcaccttcccttggaacttctaggtgtggacgcctgtctccaggtgctaacctgcattctgttagagcacaaggtggtgctacagtcccgagactacaatgcactctccatgtctgtgatggcattcgtggcaatgatctacccactggaatatatgtttcctgtcatcccgctgctacccacctgcatggcatcagcagagcagctgctgttggctccaaccccgtacatcattggggttcctgccagcttcttcctctacaaactggacttcaaaatgcctgatgatgtatggctagtggatctggacagcaatagggtgattgcccccaccaatgcagaagtgctgcctatcctgccagaaccagaatcactagagctgaaaaagcatttaaagcaggccttggccagcatgagtctcaacacccagcccatcctcaatctggagaaatttcatgagggccaggagatcccccttctcttgggaaggccttctaatgacctgcagtccacaccgtccactgaattcaacccactcatctatggcaacgatgtggattctgtggatgttgcaaccagggttgccatggtacggttcttcaattccgccaacgtgctgcagggatttcagatgcacacgcgtaccctgcgcctctttcctcggcctgtggtagcttttcaagctggctcctttctagcctcacgtccccggcagactccttttgccgagaaattggccaggactcaggctgtggagtactttggggaatggatccttaaccccaccaactatgcctttcagcgaattcacaacaatatgtttgatccagccctgattggtgacaagccaaagtggtatgctcatcagctgcagcctatccactatcgcgtctatgacagcaattcccagctggctgaggccctgagtgtaccaccagagcgggactctgactccgaacctactgatgatagtggcagtgatagtatggattatgacgattcaagctcttcttactcctcccttggtgactttgtcagtgaaatgatgaaatgtgacattaatggtgatactcccaatgtggaccctctgacacatgcagcactgggggatgccagcgaggtggagattgacgagctgcagaatcagaaggaagcagaagagcctggcccagacagtgagaactctcaggaaaaccccccactgcgctccagctctagcaccacagccagcagcagccccagcactgtcatccacggagccaactctgaacctgctgactctacggagatggatgataaggcagcagtaggcgtctccaagcccctcccttccgtgcctcccagcattggcaaatcgaacgtggacagacgtcaggcagaaattggagaggggtcagtgcgccggcgaatctatgacaatccatacttcgagccccaatatggctttccccctgaggaagatgaggatgagcagggggaaagttacactccccgattcagccaacatgtcagtggcaatcgggctcaaaagctgctgcggcccaacagcttgagactggcaagtgactcagatgcagagtcagactctcgggcaagctctcccaactccaccgtctccaacaccagcaccgagggcttcgggggcatcatgtcttttgccagcagcctctatcggaaccacagtaccagcttcagtctttcaaacctcacactgcccaccaaaggtgcccgagagaaggccacgcccttccccagtctgaaaggaaacaggagggcgttagtggatcagaagtcatctgtcattaaacacagcccaacagtgaaaagagaacctccatcaccccagggtcgatccagcaattctagtgagaaccagcagttcctgaaggaggtggtgcacagcgtgctggacggccagggagttggctggctcaacatgaaaaaggtgcgccggctgctggagagcgagcagctgcgagtctttgtcctgagcaagctgaaccgcatggtgcagtcagaggacgatgcccggcaggacatcatcccggatgtggagatcagtcggaaggtgtacaagggaatgttagacctcctcaagtgtacagtcctcagcttggagcagtcctatgcccacgcgggtctgggtggcatggccagcatctttgggcttttggagattgcccagacccactactatagtaaagaaccagacaagcggaagagaagtccaacagaaagtgtaaataccccagttggcaaggatcctggcctagctgggcggggggacccaaaggctatggcacaactgagagttccacaactgggacctcgggcaccaagtgccacaggaaagggtcctaaggaactggacaccagaagtttaaaggaagaaaattttatagcatctattgggcctgaagtaatcaaacctgtctttgaccttggtgagacagaggagaaaaagtcccagatcagcgcagacagtggtgtgagcctgacgtctagttcccagaggactgatcaagactctgtcatcggcgtgagtccagctgttatgatccgcagctcaagtcaggattctgaagttagcaccgtggtgagtaatagctctggagagacccttggagctgacagtgacttgagcagcaatgcaggtgatggaccaggtggcgagggcagtgttcacctggcaagctctcggggcactttgtctgatagtgaaattgagaccaactctgccacaagcaccatctttggtaaagcccacagcttgaagccaagcataaaggagaagctggcaggcagccccattcgtacttctgaagatgtgagccagcgagtctatctctatgagggactcctaggcaaagagcgttctactttatgggaccaaatgcaattctgggaagatgccttcttagatgctgtgatgttggagagagaagggatgggtatggaccagggtccccaggaaatgatcgacaggtacctgtcccttggagaacatgaccggaagcgcctggaagatgatgaagatcgcttgctggccacacttctgcacaacctcatctcctacatgctgctgatgaaggtaaataagaatgacatccgcaagaaggtgaggcgcctaatgggaaagtcgcacattgggcttgtgtacagccagcaaatcaatgaggtgcttgatcagctggcgaacctgaatggacgcgatctctctatctggtccagtggcagccggcacatgaagaagcagacatttgtggtacatgcagggacagatacaaacggagatatctttttcatggaggtgtgcgatgactgtgtggtgttgcgtagtaacatcggaacagtgtatgagcgctggtggtacgagaagctcatcaacatgacctactgtcccaagacgaaggtgttgtgcttgtggcgtagaaatggctctgagacccagctcaacaagttctatactaaaaagtgtcgggagctgtactactgtgtgaaggacagcatggagcgcgctgccgcccgacagcaaagcatcaaacccggacctgaattgggtggcgagttccctgtgcaggacctgaagactggtgagggtggcctgctgcaggtgaccctggaagggatcaacctcaaattcatgcacaatcaggttttcatagagctgaatcacattaaaaagtgcaatacagttcgaggcgtctttgtcctggaggaatttgttcctgaaattaaagaagtggtgagccacaagtacaagacaccaatggcccacgaaatctgctactccgtattatgtctcttctcgtacgtggctgcagttcatagcagtgaggaagatctcagaaccccgccccggcctgtctctagctgatggagaggggctacgcagctgccccagcccagggcacgcccctggccccttgctgttcccaagtgcacgatgctgctgtgactgaggagtggatgatgctcgtgtgtcctctgcaagccccctgctgtggcttggttggttaccggttatgtgtccctctgagtgtgtcttgagcgtgtccaccttctccctctccactcccagaagaccaaactgccttcccctcagggctcaagaatgtgtacagtctgtggggccggtgtgaacccactattttgtgtccttgagacatttgtgttgtggttccttgtccttgtccctggcgttataactgtccactgcaagagtctggctctcccttctctgtgacccggcatgactgggcgcctggagcagtttcactctgtgaggagtgagggaaccctggggctcaccctctcagaggaagggcacagagaggaagggaagaattggggggcagccggagtgagtggcagcctccctgcttccttctgcattcccaagccggcagctactgcccagggcccgcagtgttggctgctgcctgccacagcctctgtgactgcagtggagcggcgaattccctgtggcctgccacgccttcggcatcagaggatggagtggtcgaggctagtggagtcccagggaccgctggctgctctgcctgagcatcagggagggggcaggaaagaccaagctgggtttgcacatctgtctgcaggctgtctctccaggcacggggtgtcaggagggagagacagcctgggtatgggcaagaaatgactgtaaatatttcagccccacattatttatagaaaatgtacagttgtgtgaatgtgaaataaatgtcctcaactcca

SEQ ID NO: 12694 - DNA, 5640 bp, Homo sapiens
accgcggccgcgcgcccccctctgcccccgctgcccaggattggtaggctccaccgctcggcagccggcttccctgctcggacgccgagcaccgccaaagcgcacttcgattttcagaattcctcctgggaatgctgactccttgcttggtgccctgatgcttctctgagataaactgatgaattggaaccatggtgcaaaagaagaagttctgtcctcggttacttgactatctagtgatcgtaggggccaggcacccgagcagtgatagcgtggcccagactcctgaattgctacggcgataccccttggaggatcacactgagtttcccctgcccccagatgtagtgttcttctgccagcccgagggctgcctgagcgtgcggcagcggcgcatgagccttcgggatgatacctcttttgtcttcaccctcactgacaaggacactggagtcacgcgatatggcatctgtgttaacttctaccgctccttccaaaagcgaatctctaaggagaagggggaaggtggggcagggtcccgtgggaaggaaggaacccatgccacctgtgcctcagaagagggtggcactgagagctcagagagtggctcatccctgcagcctctcagtgctgactctacccctgatgtgaaccagtctcctcggggcaaacgccgggccaaggcggggagccgctcccgcaacagtactctcacgtccctgtgcgtgctcagccactaccctttcttctccaccttccgagagtgtttgtatactctcaagcgcctggtggactgctgtagtgagcgccttctgggcaagaaactgggcatccctcgaggcgtacaaagggacaccatgtggcggatctttactggatcgctgctggtagaggagaagtcaagtgcccttctgcatgaccttcgagagattgaggcctggatctatcgattgctgcgctccccagtacccgtctctgggcagaagcgagtagacatcgaggtcctaccccaagagctccagccagctctgacctttgctcttccagacccatctcgattcaccctagtggatttcccactgcaccttcccttggaacttctaggtgtggacgcctgtctccaggtgctaacctgcattctgttagagcacaaggtggtgctacagtcccgagactacaatgcactctccatgtctgtgatggcattcgtggcaatgatctacccactggagtatatgtttcctgtcatcccgctgctacccacctgcatggcatcagcagagcagctgctgttggctccaaccccgtacatcattggggttcctgccagcttcttcctctacaaactggacttcaaaatgcctgatgatgtatggctagtggatctggacagcaatagggtgattgcccccaccaatgcagaagtgctgcctatcctgccagaaccagaatcactagagctgaaaaagcatttaaagcaggccttggccagcatgagtctcaacacccagcccatcctcaatctggagaaatttcatgagggccaggagatcccccttctcttgggaaggccttctaatgacctgcagtccacaccgtccactgaattcaacccactcatctatggcaatgatgtggattctgtggatgttgcaaccagggttgccatggtacggttcttcaattccgccaacgtgctgcagggatttcagatgcacacgcgtaccctgcgcctctttcctcggcctgtggtagcttttcaagctggctcctttctagcctcacgtccccggcagactccttttgccgagaaattggccaggactcaggctgtggagtactttggggaatggatccttaaccccaccaactatgcctttcagcgaattcacaacaatatgtttgatccagccctgattggtgacaagccaaagtggtatgctcatcagctgcagcctatccactatcgcgtctatgacagcaattcccagctggctgaggccctgagtgtaccaccagagcgggactctgactccgaacctactgatgatagtggcagtgatagtatggattatgacgattcaagctcttcttactcctcccttggtgactttgtcagtgaaatgatgaaatgtgacattaatggtgatactcccaatgtggaccctctgacacatgcagcactgggggatgccagcgaggtggagattgacgagctgcagaatcagaaggaagcagaagagcctggcccagacagtgagaactctcaggaaaaccccccactgcgctccagctctagcaccacagccagcagcagccccagcactgtcatccacggagccaactctgaacctgctgactctacggagatggatgataaggcagcagtaggcgtctccaagcccctcccttccgtgcctcccagcattggcaaatcgaacatggacagacgtcaggcagaaattggagagggggctcaaaagctgctgcggcccaacagcttgagactggcaagtgactcagatgcagagtcagactctcgggcaagctctcccaactccaccgtctccaacaccagcaccgagggcttcgggggcatcatgtcttttgccagcagcctctatcggaaccacagtaccagcttcagtctttcaaacctcacactgcccaccaaaggtgcccgagagaaggccacgcccttccccagtctgaaaggaaacaggagggcgttagtggatcagaagtcatctgtcattaaacacagcccaacagtgaaaagagaacctccatcaccccagggtcgatccagcaattctagtgagaaccagcagttcctgaaggaggtggtgcacagcgtgctggacggccagggagttggctggctcaacatgaaaaaggtgcgccggctgctggagagcgagcagctgcgagtctttgtcctgagcaagctgaaccgcatggtgcagtcagaggacgatgcccggcaggacatcatcccggatgtggagatcagtcggaaggtgtacaagggaatgttagacctcctcaagtgtacagtcctcagcttggagcagtcctatgcccacgcgggtctgggtggcatggccagcatctttgggcttttggagattgcccagacccactactatagtaaagaaccagacaagcggaagagaagtccaacagaaagtgtaaataccccagttggcaaggatcctggcctagctgggcggggggacccaaaggctatggcacaactgagagttccacaactgggacctcgggcaccaagtgccacaggaaagggtcctaaggaactggacaccagaagtttaaaggaagaaaattttatagcatctattgggcctgaagtaatcaaacctgtctttgaccttggtgagacagaggagaaaaagtcccagatcagcgcagacagtggtgtgagcctgacgtctagttcccagaggactgatcaagactctgtcatcggcgtgagtccagctgttatgatccgcagctcaagtcaggattctgaagttagcaccgtggtgagtaatagctctggagagacccttggagctgacagtgacttgagcagcaatgcaggtgatggaccaggtggcgagggcagtgttcacctggcaagctctcggggcactttgtctgatagtgaaattgagaccaactctgccacaagcaccatctttggtaaagcccacagcttgaagccaagcataaaggagaagctggcaggcagccccattcgtacttctgaagatgtgagccagcgagtctatctctatgagggactcctaggcaaagagcgttctactttatgggaccaaatgcaattctgggaagatgccttcttagatgctgtgatgttggagagagaagggatgggtatggaccagggtccccaggaaatgatcgacaggtacctgtcccttggagaacatgaccggaagcgcctggaagatgatgaagatcgcttgctggccacacttctgcacaacctcatctcctacatgctgctgatgaaggtaaataagaatgacatccgcaagaaggtgaggcgcctaatgggaaagtcgcacattgggcttgtgtacagccagcaaatcaatgaggtgcttgatcagctggcgaacctgaatggacgcgatctctctatctggtccagtggcagccggcacatgaagaagcagacatttgtggtacatgcagggacagatacaaacggagatatctttttcatggaggtgtgcgatgactgtgtggtgttgcgtagtaacatcggaacagtgtatgagcgctggtggtacgagaagctcatcaacatgacctactgtcccaagacgaaggtgttgtgcttgtggcgtagaaatggctctgagacccagctcaacaagttctatactaaaaagtgtcgggagctgtactactgtgtgaaggacagcatggagcgcgctgccgcccgacagcaaagcatcaaacccggacctgaattgggtggcgagttccctgtgcaggacctgaagactggtgagggtggcctgctgcaggtgaccctggaagggatcaacctcaaattcatgcacaatcagttcctgaaattaaagaagtggtgagccacaagtacaagacaccaatggcccacgaaatctgctactccgtattatgtctcttctcgtacgtggctgcagttcatagcagtgaggaagatctcagaaccccgccccggcctgtctctagctgatggagaggggctacgcagctgccccagcccagggcacgcccctggccccttgctgttcccaagtgcacgatgctgctgtgactgaggagtggatgatgctcgtgtgtcctctgcaagccccctgctgtggcttggttggttaccggttatgtgtccctctgagtgtgtcttgagcgtgtccaccttctccctctccactcccagaagaccaaactgccttcccctcagggctcaagaatgtgtacagtctgtggggccggtgtgaacccactattttgtgtccttgagacatttgtgttgtggttccttgtccttgtccctggcgttataactgtccactgcaagagtctggctctcccttctctgtgacccggcatgactgggcgcctggagcagtttcactctgtgaggagtgagggaaccctggggctcaccctctcagaggaagggcacagagaggaagggaagaattggggggcagccggagtgagtggcagcctccctgcttccttctgcattcccaagccggcagctactgcccagggcccgcagtgttggctgctgcctgccacagcctctgtgactgcagtggagcggcgaattccctgtggcctgccacgccttcggcatcagaggatggagtggtcgaggctagtggagtcccagggaccgctggctgctctgcctgagcatcagggagggggcaggaaagaccaagctgggtttgcacatctgtctgcaggctgtctctccaggcacggggtgtcaggagggagagacagcctgggtatgggcaagaaatgactgtaaatatttcagccccacattatttatagaaaatgtacagttgtgtgaatgtgaaataaatgtcctcaactccc

SEQ ID NO: 12695 - DNA, 5899 bp, Homo sapiens
accgcggccgcgcgcccccctctgcccccgctgcccaggattggtaggctccaccgctcggcagccggcttccctgctcggacgccgagcaccgccaaagcgcacttcgattttcagaattcctcctgggaatgctgactccttgcttggtgccctgatgcttctctgagataaactgatgaattggaaccatggtgcaaaagaagaagttctgtcctcggttacttgactatctagtgatcgtaggggccaggcacccgagcagtgatagcgtggcccagactcctgaattgctacggcgataccccttggaggatcacactgagtttcccctgcccccagatgtagtgttcttctgccagcccgagggctgcctgagcgtgcggcagcggcgcatgagccttcgggatgatacctcttttgtcttcaccctcactgacaaggacactggagtcacgcgatatggcatctgtgttaacttctaccgctccttccaaaagcgaatctctaaggagaagggggaaggtggggcagggtcccgtgggaaggaaggaacccatgccacctgtgcctcagaagagggtggcactgagagctcagagagtggctcatccctgcagcctctcagtgctgactctacccctgatgtgaaccagtctcctcggggcaaacgccgggccaaggcggggagccgctcccgcaacagtactctcacgtccctgtgcgtgctcagccactaccctttcttctccaccttccgagagtgtttgtatactctcaagcgcctggtggactgctgtagtgagcgccttctgggcaagaaactgggcatccctcgaggcgtacaaagggacaccatgtggcggatctttactggatcgctgctggtagaggagaagtcaagtgcccttctgcatgaccttcgagagattgaggcctggatctatcgattgctgcgctccccagtacccgtctctgggcagaagcgagtagacatcgaggtcctaccccaagagctccagccagctctgacctttgctcttccagacccatctcgattcaccctagtggatttcccactgcaccttcccttggaacttctaggtgtggacgcctgtctccaggtgctaacctgcattctgttagagcacaaggtggtgctacagtcccgagactacaatgcactctccatgtctgtgatggcattcgtggcaatgatctacccactggagtatatgtttcctgtcatcccgctgctacccacctgcatggcatcagcagagcagctgctgttggctccaaccccgtacatcattggggttcctgccagcttcttcctctacaaactggacttcaaaatgcctgatgatgtatggctagtggatctggacagcaatagggtgattgcccccaccaatgcagaagtgctgcctatcctgccagaaccagaatcactagagctgaaaaagcatttaaagcaggccttggccagcatgagtctcaacacccagcccatcctcaatctggagaaatttcatgagggccaggagatcccccttctcttgggaaggccttctaatgacctgcagtccacaccgtccactgaattcaacccactcatctatggcaatgatgtggattctgtggatgttgcaaccagggttgccatggtacggttcttcaattccgccaacgtgctgcagggatttcagatgcacacgcgtaccctgcgcctctttcctcggcctgtggtagcttttcaagctggctcctttctagcctcacgtccccggcagactccttttgccgagaaattggccaggactcaggctgtggagtactttggggaatggatccttaaccccaccaactatgcctttcagcgaattcacaacaatatgtttgatccagccctgattggtgacaagccaaagtggtatgctcatcagctgcagcctatccactatcgcgtctatgacagcaattcccagctggctgaggccctgagtgtaccaccagagcgggactctgactccgaacctactgatgatagtggcagtgatagtatggattatgacgattcaagctcttcttactcctcccttggtgactttgtcagtgaaatgatgaaatgtgacattaatggtgatactcccaatgtggaccctctgacacatgcagcactgggggatgccagcgaggtggagattgacgagctgcagaatcagaaggaagcagaagagcctggcccagacagtgagaactctcaggaaaaccccccactgcgctccagctctagcaccacagccagcagcagccccagcactgtcatccacggagccaactctgaacctgctgactctacggagatggatgataaggcagcagtaggcgtctccaagcccctcccttccgtgcctcccagcattggcaaatcgaacatggacagacgtcaggcagaaattggagaggggtcagtgcgccggcgaatctatgacaatccatacttcgagccccaatatggctttccccctgaggaagatgaggatgagcagggggaaagttacactccccgattcagccaacatgtcagtggcaatcgggctcaaaagctgctgcggcccaacagcttgagactggcaagtgactcagatgcagagtcagactctcgggcaagctctcccaactccaccgtctccaacaccagcaccgagggcttcgggggcatcatgtcttttgccagcagcctctatcggaaccacagtaccagcttcagtctttcaaacctcacactgcccaccaaaggtgcccgagagaaggccacgcccttccccagtctgaaagtatttgggctaaatactctaatggagattgttactgaagccggccccgggagtggtgaaggaaacaggagggcgttagtggatcagaagtcatctgtcattaaacacagcccaacagtgaaaagagaacctccatcaccccagggtcgatccagcaattctagtgagaaccagcagttcctgaaggaggtggtgcacagcgtgctggacggccagggagttggctggctcaacatgaaaaaggtgcgccggctgctggagagcgagcagctgcgagtctttgtcctgagcaagctgaaccgcatggtgcagtcagaggacgatgcccggcaggacatcatcccggatgtggagatcagtcggaaggtgtacaagggaatgttagacctcctcaagtgtacagtcctcagcttggagcagtcctatgcccacgcgggtctgggtggcatggccagcatctttgggcttttggagattgcccagacccactactatagtaaagaaccagacaagcggaagagaagtccaacagaaagtgtaaataccccagttggcaaggatcctggcctagctgggcggggggacccaaaggctatggcacaactgagagttccacaactgggacctcgggcaccaagtgccacaggaaagggtcctaaggaactggacaccagaagtttaaaggaagaaaattttatagcatctattgggcctgaagtaatcaaacctgtctttgaccttggtgagacagaggagaaaaagtcccagatcagcgcagacagtggtgtgagcctgacgtctagttcccagaggactgatcaagactctgtcatcggcgtgagtccagctgttatgatccgcagctcaagtcaggattctgaagttagcaccgtggtgagtaatagctctggagagacccttggagctgacagtgacttgagcagcaatgcaggtgatggaccaggtggcgagggcagtgttcacctggcaagctctcggggcactttgtctgatagtgaaattgagaccaactctgccacaagcaccatctttggtaaagcccacagcttgaagccaagcataaaggagaagctggcaggcagccccattcgtacttctgaagatgtgagccagcgagtctatctctatgagggactcctaggcaaagagcgttctactttatgggaccaaatgcaattctgggaagatgccttcttagatgctgtgatgttggagagagaagggatgggtatggaccagggtccccaggaaatgatcgacaggtacctgtcccttggagaacatgaccggaagcgcctggaagatgatgaagatcgcttgctggccacacttctgcacaacctcatctcctacatgctgctgatgaaggtaaataagaatgacatccgcaagaaggtgaggcgcctaatgggaaagtcgcacattgggcttgtgtacagccagcaaatcaatgaggtgcttgatcagctggcgaacctgaatggacgcgatctctctatctggtccagtggcagccggcacatgaagaagcagacatttgtggtacatgcagggacagatacaaacggagatatctttttcatggaggtgtgcgatgactgtgtggtgttgcgtagtaacatcggaacagtgtatgagcgctggtggtacgagaagctcatcaacatgacctactgtcccaagacgaaggtgttgtgcttgtggcgtagaaatggctctgagacccagctcaacaagttctatactaaaaagtgtcgggagctgtactactgtgtgaaggacagcatggagcgcgctgccgcccgacagcaaagcatcaaacccggacctgaattgggtggcgagttccctgtgcaggacctgaagactggtgagggtggcctgctgcaggtgaccctggaagggatcaacctcaaattcatgcacaatcaggttttcatagagctgaatcacattaaaaagtgcaatacagttcgaggcgtctttgtcctggaggaatttgttcctgaaattaaagaagtggtgagccacaagtacaagacaccaatggcccacgaaatctgctactccgtattatgtctcttctcgtacgtggctgcagttcatagcagtgaggaagatctcagaaccccgccccggcctgtctctagctgatggagaggggctacgcagctgccccagcccagggcacgcccctggccccttgctgttcccaagtgcacgatgctgctgtgactgaggagtggatgatgctcgtgtgtcctctgcaagccccctgctgtggcttggttggttaccggttatgtgtccctctgagtgtgtcttgagcgtgtccaccttctccctctccactcccagaagaccaaactgccttcccctcagggctcaagaatgtgtacagtctgtggggccggtgtgaacccactattttgtgtccttgagacatttgtgttgtggttccttgtccttgtccctggcgttataactgtccactgcaagagtctggctctcccttctctgtgacccggcatgactgggcgcctggagcagtttcactctgtgaggagtgagggaaccctggggctcaccctctcagaggaagggcacagagaggaagggaagaattggggggcagccggagtgagtggcagcctccctgcttccttctgcattcccaagccggcagctactgcccagggcccgcagtgttggctgctgcctgccacagcctctgtgactgcagtggagcggcgaattccctgtggcctgccacgccttcggcatcagaggatggagtggtcgaggctagtggagtcccagggaccgctggctgctctgcctgagcatcagggagggggcaggaaagaccaagctgggtttgcacatctgtctgcaggctgtctctccaggcacggggtgtcaggagggagagacagcctgggtatgggcaagaaatgactgtaaatatttcagccccacattatttatagaaaatgtacagttgtgtgaatgtgaaataaatgtcctcaactccc

SEQ ID NO: 12696 - DNA, 1750 bp, Homo sapiens
tggtaactcaggcgccgggcgcactgtccgtagctgctggttttccacgctggttttagctcccggcgtctgcaaaatgaagattgaggaggtgaagagcactacgaagacgcagcgcatcgcctcccacagccacgtgaaagggctggggctggacgagagcggcttggccaagcaggcggcctcagggcttgtgggccaggagaacgcgcgagaggcatgtggcgtcatagtagaattaatcaaaagcaagaaaatggctggaagagctgtcttgttggcaggacctcctggaactggcaagacagctctggctctggctattgctcaggagctgggtagtaaggtccccttctgcccaatggtggggagtgaagtttactcaactgagatcaagaagacagaggtgctgatggagaacttccgcagggccattgggctgcgaataaaggagaccaaggaagtttatgaaggtgaagtcacagagctaactccgtgtgagacagagaatcccatgggaggatatggcaaaaccattagccatgtgatcataggactcaaaacagccaaaggaaccaaacagttgaaactggaccccagcatttttgaaagtttgcagaaagagcgagtagaagctggagatgtgatttacattgaagccaacagtggggccgtgaagaggcagggcaggtgtgatacctatgccacagaattcgaccttgaagctgaagagtatgtccccttgccaaaaggggatgtgcacaaaaagaaagaaatcatccaagatgtgaccttgcatgacttggatgtggctaatgcgcggccccaggggggacaagatatcctgtccatgatgggccagctaatgaagccaaagaagacagaaatcacagacaaacttcgaggggagattaataaggtggtgaacaagtacatcgaccagggcattgctgagctggtcccgggtgtgctgtttgttgatgaggtccacatgctggacattgagtgcttcacctacctgcaccgcgccctggagtcttctatcgctcccatcgtcatctttgcatccaaccgaggcaactgtgtcatcagaggcactgaggacatcacatcccctcacggcatccctcttgaccttctggaccgagtgatgataatccggaccatgctgtatactccacaggaaatgaaacagatcattaaaatccgtgcccagacggaaggaatcaacatcagtgaggaggcactgaaccacctgggggagattggcaccaagaccacactgaggtactcagtgcagctgctgaccccggccaacttgcttgctaaaatcaacgggaaggacagcattgagaaagagcatgtcgaagagatcagtgaacttttctatgatgccaagtcctccgccaaaatcctggctgaccagcaggataagtacatgaagtgagatggctgaggttttcagcagcaagagactccccaggtgtgcctggcctgggtccagcctgtgggcgcttgcccctgggcttggggctgccgtccccactcaggcgtgggctgcagcgctgtcagttcagtgtggaaagcatttctttttaagttatcgtaactgttcctgtggttgctttgaaagaacccttccttacctggtgtgttttctataaatcttcataggttattttgattcttctctctctctctctaagttttttaaaaataaacttttcagaacagttaaaaaaaaaaaaaa

SEQ ID NO: 12697 - DNA, 82402 bp, Homo sapiens
agcagtcgtgcattcccagcctcgcctcgggtgtagggattgcatagaaaagcaaaactacacagtcttgactgtgtagttttgtttttaggattagaggctcaccgattcatgtcggagatggtcagaaaaaccaactctccataggacgtcgtttcagaagcaaccttgggcttagtcccaccctttttaggcactcttgagaaatcaagtgcctagaaagatgacaactcaagcaccgacgtttacgcagccgttacaaagcgttgtggtactggagggtagtaccgcaacctttgaggctcacattagtggttttccagttcctgaggtgagctggtttagggatggccaggtgatttccacttccactctgcccggcgtgcagatctcctttagcgatggccgcgctaaactgacgatccccgccgtgactaaagccaacagtggacgatattccctgaaagccaccaatggatctggacaagcgactagtactgctgagcttctcgtgaaagctgagacagcaccacccaacttcgttcaacgactgcagagcatgaccgtgagacaaggaagccaagtgagactccaagtgagagtgactggaatccctacacctgtggtgaagttctaccgggatggagccgaaatccagagctcccttgatttccaaatttcacaagaaggcgacctctacagcttactgattgcagaagcataccctgaggactcagggacctattcagtaaatgccaccaatagcgttggaagagctacttcgactgctgaattactggttcaaggtgaagaagaagtacctgctaaaaagacaaagacaattgtttcgactgctcagatctcagaatcaagacaaacccgaattgaaaagaagattgaagcccactttgatgccagatcaattgcaacagttgagatggtcatagatggtgccgctgggcaacagctgccacataaaacacctcccaggattcctccgaagccaaagtcaagatccccaacaccaccgtctattgctgccaaagcacagctggctcggcagcagtccccatcgcccataagacactccccttccccggtcagacacgtgcgggcaccgaccccatctccggtcaggtccgtgtctccagcagcaagaatctccacatcccccatcaggtctgttaggtctccattgctcatgcgtaagactcaggcatccaccgtggccacaggtcctgaagtgcctcccccttggaagcaagagggctacgtggcctcctcatctgaggctgagatgagagagacaacgctgacaacctctactcagatcaggacagaagagagatgggaagggagatacggtgtccaggagcaagtgaccatcagtggtgctgcgggtgctgccgccagtgtgtcggccagtgctagctacgcagcagaggctgttgccactggtgctaaagaggtgaaacaagatgctgacaaaagtgcagctgttgcgactgttgttgctgccgttgatatggccagagtgagagaaccagtgatcagcgctgtagagcagactgctcagaggacaaccacgactgctgtgcacatccaacctgctcaagaacaggtaagaaaggaagcggagaagactgctgtaactaaggtagtagtggccgccgataaagccaaggaacaagaattaaaatcaagaaccaaagaagtaattaccacaaagcaagagcagatgcacgtaactcatgagcagataagaaaagaaactgaaaaaacatttgtaccaaaggtagtaatttccgcagctaaagccaaagaacaagaaactagaatttctgaagaaattactaagaaacagaaacaagtaactcaagaagcaataatgaaggaaactaggaaaacagttgtacctaaagtcatagttgccacacccaaagtcaaagaacaagatttagtatcaagaggtagagaaggcattactaccaaaagagaacaagtgcaaataactcaggagaagatgagaaaggaagccgagaaaactgccttgtctacaatagcagttgctactgctaaagccaaagaacaagaaacaatactgagaactagagaaactatggctactagacaagaacaaatccaagttacccatggaaaggtggacgttggaaaaaaggctgaagctgtagcaacagttgttgctgcagtagaccaggcccgagtcagagagcccagagagcctgggcatcttgaagaatcctatgctcagcagaccactttggagtacggatataaggaacgcatttccgccgcaaaggtagctgagcctccccaacgtccagcctcagaaccccacgttgtccctaaagcagtcaagcctagagtaatccaggctccttctgagactcatatcaaaactactgatcaaaagggaatgcacatatcatcacagatcaagaaaactacagatctaacaacggaaagattagtccatgtggataaacgcccccgcacagctagccctcactttactgtttcaaaaatttctgttcctaagacagaacatggatatgaggcatcaatagccggtagtgctattgccacattacaaaaagagttgtcagccacatcttctgctcagaagatcaccaaatcggtgaaggctcctactgtgaagcccagtgagactagagtaagggcagagcccacacccttgccacagttccccttcgctgacacaccagatacttacaagagtgaagctggcgttgaggtgaaaaaggaagtaggggtgagcatcactggcaccaccgtccgtgaagagcgctttgaagtactgcacggacgcgaagccaaggtaacagaaacagcaagagtaccagcacctgttgaaattcctgttactccaccaactttggtctcgggcttaaaaaatgtgactgtcatagaaggtgaatctgtcaccttggagtgccacatctctggatacccatccccgacagtgacatggtacagggaagactaccaaatcgaaagttccattgacttccagataaccttccagagtggaattgctcgtcttatgattcgcgaagcatttgcggaagacagcgggcgatttacttgcagtgctgtaaatgaggctggaaccgtcagcacatcctgctatctggctgtgcaggtgtcagaagaatttgaaaaggaaaccacagccgtgactgagaaatttactacagaagagaaacgctttgttgagtcaagagatgtggttatgactgatactagcctcacagaggaacaagcagggcctggagaacctgccgcgccttactttattacaaaaccagtggtccagaaactggtggaaggtgggagcgtggtgtttggatgccaagttggcggcaacccaaagccccatgtatactggaaaaaatctggtgttcctctaaccactggatacagatacaaagtgagttacaacaaacaaaccggtgaatgcaagctggtgatttctatgacttttgctgatgatgctggagaatacactattgttgttcgcaataagcatggagaaacttctgcatctgcttccttgcttgaagaagctgattatgagttactgatgaagtcccagcaagaaatgctttatcagacacaagtgactgcatttgttcaagaacctaaagttggagaaacagcacctggatttgtatactctgagtatgaaaaagagtatgaaaaagaacaagccttaattaggaagaaaatggccaaagatactgtagtggtcagaacttatgtagaagatcaggaattccatatttcttcctttgaagagagacttattaaagaaattgaatatagaataataaagactacattagaagaacttcttgaagaagatggagaagaaaagatggcagttgacatttctgaatctgaagctgttgaatcaggatttgatttaagaatcaagaattatagaattcttgaggggatgggtgtcacttttcattgcaagatgtctggatatccattaccaaagattgcttggtacaaagatggcaagcgcatcaaacatggagaaagataccaaatggactttctacaagatggcagagctagtctgcgtatacctgttgttcttccagaagatgaaggaatctacactgcatttgccagcaatattaaaggaaatgcaatttgctcagggaaattgtatgtggagcctgctgcaccacttggagctccgacttacattcccacactagagccagtgagcagaatcagatctctctctccacgttcagtgagcaggtctcctatacgcatgtctcctgcacggatgtcacctgcaaggatgtctcctgcacggatgtcccctgcaagaatgtcccctggacgtaggctggaggagacagatgagtcacaacttgagagactatataaaccagtctttgtgttaaaacctgtttctttcaaatgtttagaagggcaaactgccagatttgacttaaaggttgttggtagacctatgccagagacgttctggtttcatgatggccagcaaattgtcaatgactatacccataaagtagtcattaaagaagatggtactcaatcactaattattgtccctgccacacccagtgattctggggaatggactgtggttgcccaaaacagggcaggcagatcttcaatttcagtgattttaactgtggaagctgtggaacatcaggtaaaaccgatgtttgtagaaaaactgaaaaatgtcaatataaaggaaggttcccgacttgaaatgaaagtcagagctacgggtaaccccaaccctgacattgtatggttgaaaaacagtgacatcattgtgcctcataaatatcccaaaatcagaattgaaggaaccaagggagaagctgcccttaaaatcgattccactgtcagccaagattctgcctggtatactgcgactgctattaataaagctggcagagacactacaagatgcaaagtaaatgttgaagttgagtttgcagagcctgagccagagagaaagttaatcatcccacgggggacatatagagcaaaggagattgcagccccagaactggagcccctccatttgcgatatggccaagagcaatgggaagaaggtgatctctatgacaaagagaaacaacagaaaccatttttcaagaaaaaactcacttccttaagacttaagcgctttgggcctgcccactttgaatgcaggctaacacccattggtgacccaacgatggtggtggagtggctccatgatggaaagccacttgaagcagccaacaggctccgtatgatcaatgaatttgggtactgcagccttgattatggcgttgcatattctagagacagtggtatcattacttgcagagccactaacaaatatggaacagatcacacatctgctacccttattgttaaagatgagaaaagtcttgtggaagaatcccaattgcctgaggggaggaaaggcttacagagaattgaagaattagagagaatggctcatgaaggtgcacttacaggtgtaacaacagatcagaaagaaaagcaaaagccagacattgtcttgtacccagagccagttagagtacttgaaggggagactgcaaggttccgctgcagggtaacaggctaccctcagcccaaagtcaactggtacctcaatggacagctcatccgcaaaagcaaaaggttcagagttcgctatgatggtatccattacctggacatcgtggactgcaaatcatatgacacaggtgaagtgaaggtcaccgcggaaaatcctgaaggtgtgatagagcataaagtgaagcttgagattcaacagagggaagattttaggtctgtccttaggagagctcctgaaccaaggcctgagtttcacgtacatgaaccaggaaagcttcagtttgaagtacaaaaagtggatagacctgttgacaccactgaaaccaaagaagttgtgaagttgaaaagggctgaaagaattacccatgaaaaagtgcctgaagagtcggaagagctgcgcagtaaattcaagcgcagaacagaagagggctattatgaagccattaccgctgtggagctcaagtctcgaaagaaggatgaatcctatgaggaactcctcaggaagacaaaagatgaacttctccactggaccaaagagttaactgaagaggaaaagaaagctcttgccgaagaaggcaaaatcacgattccaacttttaaacctgacaagattgaactaagtcctagtatggaggctccaaaaatcttcgaaagaatccagagccaaacagtgggccaaggatctgatgcacacttccgggtcagagtcgtggggaaaccagaccccgaatgtgaatggtacaaaaatggtgtcaaaattgaacggtctgaccggatctactggtactggcccgaagacaatgtttgtgaattggtcataagagatgtgactgctgaggactctgccagcatcatggtaaaagccatcaacatagctggagaaacctccagtcacgcattcttacttgtccaagccaagcaattgatcactttcacacaggaattacaagatgttgttgctaaggaaaaagacactatggcaacctttgaatgtgaaacttcagaaccatttgtcaaagtgaaatggtataaagatggtatggaggttcatgagggagataaatacaggatgcactctgacagaaaggttcacttcctctccatactgaccattgatacgtctgatgctgaagattacagctgtgtacttgtggaagatgaaaatgtcaaaacgactgctaaacttattgttgaaggtgcagttgttgagtttgtgaaagaacttcaggacatagaagttccagaatcatattcaggagaattagagtgcattgtatccccagaaaatatagaaggaaaatggtatcataatgatgtggagcttaaatccaatggcaaatatacaattacatctcgtcgtggacgtcagaacctcacggtcaaggatgtaaccaaggaggaccagggagaatacagctttgtcatcgacgggaaaaagacaacctgtaaattaaagatgaaaccccgccccattgctatcctacaaggacttagtgaccaaaaagtctgtgagggtgacattgttcagcttgaagttaaagtctccttggaaagtgtggaaggcgtctggatgaaagacggccaagaagtgcagcccagtgacagggttcacattgtgatagacaaacaatctcatatgctgctcattgaagacatgactaaggaagatgctggaaattactctttcaccattccagcccttggcctctccaccagtgggcgtgtctctgtctatagtgtggacgtgataacacctctaaaagatgttaatgtgattgaaggcaccaaggctgtgcttgaatgtaaggtgtcagtccctgatgtgacttctgttaagtggtacttaaatgatgaacaaatcaagcctgatgaccgtgtacaggccattgtgaaaggtactaaacagcgactagtcattaaccgaactcatgcttcagacgaaggaccttacaagctgatagttggcagagttgaaaccaactgtaatctctctgtagaaaaaattaaaattatcagaggtcttcgtgaccttacctgtacagaaactcaaaatgtggtgtttgaggttgagctgtcccactctggaattgatgtcctgtggaattttaaggacaaggaaatcaagcccagttctaaatataaaattgaagcacatggaaaaatatataaattgacagttctaaatatgatgaaagatgatgaaggaaaatacacattttacgcgggagaaaatatcacatctggaaaacttactgtggcaggtggggccatctccaagccactcacagatcagaccgtagctgaatcccaggaagctgtgtttgaatgtgaagttgccaacccagattccaaaggcgaatggttgagggatggcaaacacctaccactgactaacaacatcagaagtgagtctgatggccacaaaaggagacttatcattgctgccaccaaattagatgacattggagaatatacctacaaggtggccacctccaaaacatctgccaaactcaaagttgaagctgtcaaaattaagaagactctgaagaacctcacagtgacagaaacacaggatgctgttttcactgtcgagcttacacaccctaatgtcaaaggtgtccagtggatcaaaaatggagttgtgctggaatccaatgaaaagtatgctatctctgtcaaaggaacaatttactctctgaggattaaaaactgtgccatcgtggatgagtctgtttatggcttcaggcttggaaggcttggagccagtgccagactgcacgtggagactgtcaagatcattaaaaagccaaaggatgtgacagccttggaaaatgccactgttgcctttgaagttagtgtttcccatgacactgttccagtaaaatggttccataagagtgtggaaattaagccaagtgacaaacacagactggtctcagaaaggaaagtccacaagctgatgctgcagaacatctccccctcagatgctggggaatacacagctgtggtcgggcaattggaatgcaaagcaaaactgtttgtggagacattacatattacaaaaaccatgaaaaatatcgaggtgcctgagaccaaaactgcctcttttgagtgtgaggtgtcccacttcaatgtcccttccatgtggctgaagaatggtgtggaaattgagatgagtgaaaagttcaagatagttgtgcagggaaaactccatcagctgatcatcatgaacaccagcacagaggactcggcagaatacacatttgtctgtggcaatgaccaagtcagtgccaccctgacagtcaccccaatcatgattacttccatgctgaaagacatcaacgctgaagaaaaagacactattacttttgaggtgacagtgaactatgaaggcatctcttacaaatggttaaagaatggtgtggaaatcaaatcaactgacaagtgccagatgagaaccaaaaagctcacacactcactgaacatcaggaatgttcactttggggatgctgctgactacacctttgtggctggaaaagcaacatcaacagccacactttatgtggaagctcgtcatatagaatttaggaaacacattaaggacattaaggtactggagaagaagcgagccatgtttgaatgtgaagtttctgaacctgacatcactgtacagtggatgaaagatgaccaggaactgcagatcacagacagaataaagattcagaaggagaaatatgtccaccgccttctgatcccatccacccggatgtctgatgctgggaagtacacagtggtggcaggaggcaacgtgtcaactgcaaaactctttgtagaaggcagagatgttcgcatccgaagtattaaaaaggaggttcaggtcattgagaaacagcgtgctgttgttgaatttgaggtcaatgaagacgatgttgatgcccactggtataaagatggcattgaaatcaatttccaagttcaagaacgacacaaatatgtagtggaaagaagaatccaccgaatgtttatctctgagaccagacagagcgatgcaggagaatacacctttgtggcaggaaggaacaggagttctgtcactctctatgtcaatgctcctgaaccgccccaagttctgcaggagctccagcctgtcactgtgcagtctggcaagcctgcccgcttctgtgccgtgatatccggaagaccacagcccaaaatttcctggtacaaggaagagcagctgctttccactggcttcaagtgcaaatttcttcatgatgggcaagagtacacgcttttgctaattgaagccttcccagaggatgcggcagtctatacctgtgaagccaagaatgactatggtgttgccacaacatcagcttcactctcagtggaagttccagaagttgtgtctcctgatcaggaaatgcctgtttatccacctgccatcatcaccccgcttcaggacactgtcacttctgaagggcagccagcccgttttcaatgccgggtttctggaacagatctaaaagtgtcgtggtacagcaaagacaagaaaatcaagccatctcggttctttagaatgactcaatttgaagacacttatcaactggaaattgccgaagcttatccagaagatgaaggaacttacacgtttgttgctagtaatgctgtaggccaagtatcaagcacagccaacctgagtctggaaggatttagcaaatttgaagaaaatacatcaaactcccaatggcatgtctctttatcagtttcatttaagaaggagccccttggccaaaagcccagcttcatccagcctctgtcaagcctcagggtgcacaacggggagacagtcagatttcatgcgagggtttctggcattcccaagccagaaatccaatggtttcataaccagcagctaattctaccaacaaaagatgtagttttccattttgaggagtccacaggcatggctttaatgcttatagttgatgcttactcagagcatgctgggcagtactcttgcaaagcagccaatagtgctggggaagccacttgtgcagctacactcacagtgactccaaaagctcctgaatcaattttgcatgagaggattgaacaagagattgagatggaaatgaaagagttttctagttcttttctgtctgccgaggaagaaggacttcatagcgccgaacttcaattatctaaaataaatgaaacacttgaacttttgtctgaatctccagtttactcaactaaatttgattccgaaaaggaaggcactggcccaattttcatcaaagaagtgtcaaatgctgatataagcatgggggatgtggctacactgtctgtaactgtcattggcatccccaaacctaaaattcagtggttctttaatggagtgctattaaccccttctgctgactacaaatttgtttttgacggtgatgatcatagcctgatcattctgttcaccaaattggaggatgagggagagtatacatgtatggccagtaatgactatggaaagacaatatgtagtgcctatctaaaaattaattccaaaggagagggtcacaaagacactgaaacagaatcagcagtggcaaaatctctggaaaagctgggaggtccttgtcctcctcacttccttaaggagttaaaaccaattcgctgtgctcaagggcttcctgccatctttgagtacacagtggttggagagcctgcccctactgttacatggttcaaagaaaacaagcagctttgcaccagtgtttattacactatcattcataaccctaatggctctggaactttcattgtcaatgaccctcagagggaagacagtggcctctatatctgtaaagcagagaatatgttgggtgagtccacctgtgcagcagagctgcttgtgcttctggaagacacagacatgactgataccccctgcaaagcaaagtccacaccagaggctcctgaggattttccacagacacccttaaagggtcccgcagttgaagcacttgactcagagcaggaaattgcaacgtttgtaaaagacaccattttgaaagctgctttaattacagaagaaaaccagcaactatcttatgagcatattgctaaagccaatgaattgagcagtcagcttcctttgggagctcaggaattgcaatccattttggagcaagacaagctcactcctgaaagcaccagggaatttctttgcatcaatggcagtattcactttcagcctctcaaggaaccatctcccaacctacagctgcagattgtacagtcccagaaaaccttctccaaagaaggtattctaatgcctgaagagcctgagacacaggcagttctatcagataccgagaaaatcttcccaagtgccatgtccatagaacaaattaattcattaacagttgagcctctgaaaactttattagctgaacctgaagggaattatccacagtcttcaatagaacctccaatgcattcttatctaacctctgtggctgaggaagtactttcaccaaaagaaaagacagtatctgacaccaacagagagcaaagagtgactcttcaaaagcaagaggcacaaagtgcgctcatcttgagtcagagcttagctgagggacacgtggagagtctccagagtcctgatgtcatgatctctcaggtaaactatgagcccctagtcccttcagaacactcatgcacagaaggaggtaaaattttgatagaaagtgcaaatccactggaaaatgcagggcaagattctgcggtcagaattgaggaaggcaagtccttaagatttccactagcacttgaagaaaagcaggtactgctcaaagaagagcattctgacaacgtggtgatgcccccagaccaaatcattgagtctaaaagagagcccgtggcaataaagaaagtgcaggaggtacagggaagggaccttctttctaaggaaagcttgctttctggtattccagaagagcagagattaaacctgaaaattcaaatctgccgggctttgcaagcagccgtggccagcgagcagccaggtcttttctctgagtggctaagaaatattgaaaaggtggaggtcgaggctgtaaacatcacccaagagcccagacacatcatgtgcatgtaccttgttacttcggcaaagtctgtaacagaagaagtaaccatcattattgaagatgttgatcctcaaatggctaacctgaaaatggaacttagggatgctttgtgtgctattatatatgaggaaatagacatcctaacagctgagggtcctagaattcagcaaggagccaaaacaagtttgcaagaagaaatggattctttttcaggttcacagaaggttgaacccattactgaaccagaagttgaatctaaatatctgatctcaactgaagaggtcagttattttaacgtgcaaagtagggttaaatatttggatgccacacctgtcactaaaggggttgcttcagctgttgtctctgacgaaaaacaagatgagagtctgaaaccatcagaggaaaaagaggagtcttcctctgaaagtggtactgaggaggttgctacagtaaagatacaggaagctgagggtggcttaatcaaagaggatggccccatgatacatacacctttagtggacactgtttctgaggaaggtgatattgtacacctcacaacatccataacaaatgctaaagaggtgaattggtattttgagaataaactggtgccttcagatgaaaagttcaagtgtttacaagatcaaaatacatatacgctagtcatcgacaaagtaaataccgaagaccatcaaggagagtatgtctgtgaggccttgaatgacagcggaaaaacagcaacttcagccaaactcactgtagtaaaaagagctgccccagtgatcaagaggaaaatcgaacccctggaagtagcactgggccacctagccaaattcacctgtgagatccaaagtgctcccaatgtccggttccagtggtttaaagctggccgagaaatttatgagagtgacaagtgttctattcgatcttcaaagtatatctccagccttgaaatcctgagaacccaggtggttgactgcggcgagtatacatgcaaagcttccaatgagtatggcagtgtcagctgtacagccacactaactgtgacagtgcctggaggtgaaaagaaagttcgcaaattacttccggaacgtaaacctgaaccaaaggaagaagttgttctgaaaagcgttctaagaaaaagacctgaagaagaagaacctaaagtagaacctaaaaaactagaaaaagttaaaaaacctgcagtaccagaaccaccacctccaaaacctgttgaagaggttgaagtacctactgttacaaaaagggaaaggaagattcctgaaccaacaaaagtgcctgaaatcaagccagcaatacctctccctgcacctgaaccgaaaccaaagcccgaagcagaagtgaaaacaatcaaaccacctcctgtggaacctgaaccaacccccatcgctgccccagtaacagtgccagtggttggaaagaaagcagaagccaaagcacctaaggaagaggctgccaagccaaaaggtcctatcaaaggtgtacccaaaaagactccttcaccaatagaagccgaaaggagaaagttaaggccaggaagtggtggagagaaacctcctgatgaagccccgttcacctaccagctaaaggctgtgccactgaagtttgtgaaagaaatcaaagacatcatcttgacagaatcagagttcgttggctcttcagcaatctttgaatgtttggtctccccttccactgcaattacaacctggatgaaagacggtagcaatatccgtgagagtcccaagcacaggtttattgcagatggtaaagacagaaagctgcacatcattgatgttcaactttccgatgctggtgaatacacctgtgttttacgtttgggaaacaaagaaaagacctccacggctaaacttgttgtagaagaacttcctgtgcgttttgtaaaaacactggaagaggaagtcacagtggtcaaaggacagccattgtacttgagctgcgagttaaacaaagagcgtgacgtggtctggaggaaggatggcaagattgtggtggagaaacctggccgaattgtgccaggcgtcattggcttgatgcgggctctgaccatcaacgatgcagatgacacagatgctggaacatacacagttactgtggaaaacgccaacaacctggagtgttcatcttgcgtaaaagtagtagaagtcattagagattggctggtgaaacctatacgagaccagcatgtgaaacccaaggggacagctatttttgcctgtgatatagcaaaagatactccaaacattaagtggttcaaaggatatgatgaaatccctgcggaaccaaatgataagactgaaatactgagagatggaaatcatctgtacctcaaaattaagaatgctatgccagaagatattgctgagtatgcagtggaaattgaaggaaaaagataccctgcaaagctgacacttggagagcgtgaagttgaactgcttaaaccaatagaggacgttaccatttatgagaaagaaagtgcaagctttgatgcagaaatctcagaggcagacattcctggacaatggaaactgaaaggagaacttctaaggccctcacctacttgtgaaatcaaagcagaaggtggaaaacgcttcttaactttgcacaaagtcaaactggaccaagctggtgaagtcctctaccaggcccttaatgcaattacaactgccattttgacagtaaaagaaatcgaacttgactttgctgtgcccctgaaggatgtcactgttccagaaaggcgacaggctcgattcgaatgtgtcctcacccgagaggcaaatgttatatggtccaaaggacctgatataattaagtcatctgacaaatttgatatcatcgctgatggaaagaaacatattcttgttattaatgattctcaatttgatgatgaaggggtctatactgctgaggtggagggcaagaagacctcagctcggttgtttgtcacaggtataagactgaaattcatgtcacctcttgaagatcaaacagtaaaagaaggtgaaacagcaacttttgtttgtgaactttctcatgaaaaaatgcatgtagtctggttcaaaaatgatgccaaactccatacaagcagaacagtactcatctcttctgagggcaagactcacaaattggaaatgaaagaagtgacattggatgatatatctcagataaaagctcaagtcaaggagctgagctccacagcacagctgaaggtcttagaggccgatccctacttcactgtgaaattacatgacaaaactgcagtggagaaggatgagattactttgaagtgtgaagtgagcaaagatgtaccagtgaaatggttcaaagatggtgaagagattgtcccttcacccaaatattctatcaaggcagatggcctgcgccgcatcttaaaaatcaaaaaggcggaccttaaagataaaggcgaatatgtgtgtgactgtggcacagacaagaccaaggcaaatgttactgttgaggctcgactaataaaagtggaaaagcctctgtacggagtagaggtgtttgttggtgaaacagcccactttgaaattgaactttctgaacctgatgttcacggccagtggaagctgaaaggacagcctttgacagcttcccctgactgtgaaatcattgaggatggaaagaagcatattctgatccttcataactgtcagctgggtatgacaggagaggtttccttccaggctgctaatgccaaatctgcagccaatctgaaagtgaaagaattgcctcttatcttcatcacacctctcagtgatgttaaagtcttcgagaaagatgaggctaagtttgagtgtgaagtatccagggagcccaaaacattccgttggctaaaaggaacccaggaaatcacaggtgatgacagatttgagcttataaaggatggcactaagcattcaatggtgatcaagtcagctgcttttgaagatgaagcaaaatacatgtttgaagctgaagataagcacacaagtggcaaactgatcattgaaggaatccggctcaaattcctcacccctctcaaagatgtaactgccaaagagaaggaaagtgctgtatttactgtggagttatctcatgataacatccgagttaaatggttcaagaatgaccagcgcctacacaccaccaggtcggtctcaatgcaagacgaagggaaaactcattcgatcacattcaaagacctgtctattgatgacacctcccaaattagagtagaagctatggggatgagttcagaagctaaactcactgtgcttgagggagacccatattttacaggaaaacttcaagattatactggtgtagagaaagatgaagttattctacagtgtgaaattagcaaagcagatgcaccagtgaaatggtttaaggatgggaaggaaataaagccatccaaaaatgctgttattaaggcagatggcaagaaacgcatgctaatcctaaagaaagccttgaaatcagatattggacagtacacctgtgactgtgggacagataagacctcaggaaaacttgacattgaggatcgggaaattaaactggtgcgacccctgcacagtgtggaggtgatggagactgagacagcacgctttgaaaccgaaatctctgaagatgatatccacgccaactggaaactcaagggagaggccctactccaaacacctgattgtgaaattaaggaagaaggcaaaatacactcccttgttttgcacaactgtcgcctggaccagacgggtggggtggatttccaagctgccaatgttaaatctagtgcccacctccgagttaagccacgagtaattggtcttctgaggcctttaaaggatgtcaccgtgactgcaggggaaacagccaccttcgactgcgagctctcctacgaagatatcccagtggaatggtatctcaaagggaagaaactagagcccagcgataaggtggtcccacgttcagaaggaaaagttcatacacttactctgagggatgtaaagttagaagatgctggggaagtccaactaacagcaaaagatttcaaaactcacgccaacctctttgtgaaagaacccccagttgaattcactaagcctcttgaggaccagacggtcgaagagggagccactgcagtgctggagtgtgaagtctccagagaaaatgctaaggtgaaatggttcaaaaatgggacagaaatcctcaaaagcaagaagtatgaaattgttgctgatggcagggtcagaaaacttgttatacatgactgtaccccagaggatattaaaacatacacttgtgatgctaaggattttaagacttcctgtaacctgaatgtcgtgcctcctcatgtggaattcttaagaccactcaccgaccttcaagttagagaaaaagaaatggctcgatttgagtgtgaactttcccgagaaaatgctaaggttaagtggtttaaagatggtgctgaaattaaaaagggcaaaaaatatgacatcatatccaagggagcagtgcgcattcttgtcatcaacaaatgtctactggatgatgaagctgaatattcctgtgaagtaaggacagcgagaacttctggcatgctgacagttctggaagaagaagctgtctttaccaaaaatcttgccaacattgaagttagtgaaacagacactataaaactggtttgtgaagtctccaaacctggcgcagaagtgatttggtataaaggggatgaggagatcattgaaacaggaagatatgaaatactgactgaaggacggaagagaatcctggtcattcagaacgctcaccttgaggatgctggcaactacaactgtcgactcccaagctctcgaaccgatggcaaagtcaaagtacatgaactggctgctgaatttatctcaaagcctcaaaaccttgaaatacttgaaggagaaaaggctgaatttgtctgctctatatcaaaagaaagctttccagtccagtggaagagggatgataagacacttgaatctggagataaatatgacgttattgctgatggtaaaaagagggtcctagttgtgaaagatgccacattacaagatatgggcacttacgttgtcatggtaggggccgccagagcagcagctcacttgacagtcattgaaaaactcaggatcgtagttcctcttaaggacacccgggtgaaggaacaacaggaagttgtcttcaactgtgaagtcaatactgaaggtgccaaagccaaatggttcagaaatgaagaagctatatttgatagttcaaaatacatcattctccaaaaagacctagtctacaccctcagaattagagatgcacacttagatgaccaagccaactataatgtgtctttgaccaatcacagaggtgaaaatgttaaaagtgcagccaatctaatagtagaagaggaagaccttaggattgttgagcctcttaaagatattgaaacaatggagaagaaatctgtcacattctggtgcaaggtgaatcgtctcaatgtaacactgaagtggaccaaaaatggtgaagaagtgccttttgacaaccgtgtctcatacagagttgataagtacaagcacatgttaaccattaaagactgtggcttcccagatgaaggtgaatacattgtcactgctggacaagataaatctgttgctgagcttctcatcatagaagccccgacagaatttgtggaacacttggaagatcagacagtcactgagttcgatgacgctgtcttctcctgccagctctccagagagaaagccaatgtaaaatggtacagaaatgggagagaaatcaaagaaggcaaaaaatacaaatttgaaaaagatggaagtatacacagactcattataaaagattgcaggctggatgatgagtgtgaatatgcttgcggggtagaagacaggaagtctcgtgctagactttttgtggaagaaattcctgttgagatcatcaggcctccacaagatattcttgaagcccctggtgctgatgttgtctttttagcagaactcaataaagataaggtggaagtccaatggctaagaaataacatggttgttgtccagggtgataaacaccagatgatgagtgaaggaaagatacatcgactacagatttgtgatattaagccccgtgaccagggtgaatacagatttattgccaaagacaaagaagccagagctaagcttgaactggcagctgcaccaaaaatcaagacagctgaccaagaccttgtggttgatgttggcaagcctctgacaatggtggtgccatatgatgcctaccccaaagcagaagctgaatggtttaaagaaaatgaacctttatctacaaaaaccattgatactacggctgaacaaacttctttcagaattttagaagccaagaaaggagacaaagggaggtataaaattgtgcttcagaacaaacatggaaaagcagaaggattcatcaatttaaaagttattgatgttcctgggccagtacgtaacttagaagtgacagaaacatttgatggtgaagtgagccttgcttgggaagaacctttaactgatggtggaagcaaaatcataggttacgttgttgaaagacgtgacattaagagaaagacctgggttctggccacagaccgtgcagagagttgtgagtttactgtcactggtctacagaaaggaggagttgagtacctattccgtgtgagtgcaagaaacagagttggcactggtgagccagtagaaactgacaatcctgtagaagcaaggagtaaatatgatgttccaggccctcctttgaatgtaaccatcactgatgtgaatcgatttggtgtctcactgacatgggaaccaccagagtatgatggaggtgctgagatcacaaactacgtcattgaattaagagacaagacttctatcaggtgggatactgccatgactgtgagagctgaagacctgtctgcaactgttactgatgtggtagaaggacaggagtacagtttccgagtgagagcccaaaatcgaattggagttggaaaaccaagtgcagccacacccttcgtcaaagttgctgatccaattgagagaccaagtcctcctgtaaacctaacttcctcagatcagactcagtcatcagttcagctcaaatgggaacctcctctgaaagatggaggaagcccaatattaggctatataattgagcgatgcgaagaaggaaaagataattggattcgttgcaatatgaaacttgtccctgaactgacttacaaggttaccggattggaaaaaggaaataaatatttatatagagtatctgcagaaaataaagctggtgtttcagatccatctgaaattcttggtcctctcaccgctgacgatgcatttgttgaaccaacaatggatttaagtgcatttaaagatggtctggaagttattgtcccaaatcctatcacgatcctggttccaagtacaggctatccaaggccaactgcaacctggtgttttggagataaagtactagaaacaggggaccgggtgaaaatgaagaccttgtctgcctatgccgaacttgtcatttctccaagtgaacgttcagacaagggcatttatacactgaaattagaaaaccgtgtgaaaacaatttctggggaaattgatgtcaatgtaattgctcgcccaagtgcacccaaagaattgaaatttggtgatataaccaaggactcagtacatttgacttgggaaccacctgatgatgatggaggaagtccgttaactggatacgttgttgaaaaacgagaagtcagccggaaaacatggactaaagttatggactttgtgactgatctagaattcacagttcctgatcttgttcaaggaaaagagtacttatttaaagtttgtgctcgtaacaaatgtggccctggagaacctgcatatgttgatgaacctgtaaatatgtcaactcctgcaacggtacctgacccaccagagaatgttaaatggagagatcgaacagccaatagcatcttcttaacatgggatccacctaaaaatgatggtggttcacgcatcaaaggatatatagttgaaagatgtccacgtggttctgataaatgggttgcctgtggagaacctgttgcagaaacaaaaatggaagtgacaggtcttgaggaaggcaaatggtatgcctaccgcgtgaaggccttaaacaggcagggtgctagcaaaccaagcagacccacagaggaaatccaggctgtggacacacaagaggccccagaaatcttcctcgatgtgaagctccttgctggtctcactgtaaaagctgggaccaagattgaacttcctgccaccgtaaccggaaaacctgaacctaaaataacttggacaaaggctgatatgattctgaagcaggacaaaagaattaccattgaaaatgtccctaagaaatccacagtgactattgttgatagtaagagaagtgacactggcacatatatcattgaggctgtgaatgtgtgtggccgggccactgctgtggtggaagtgaacgtcttagataaacccggaccaccagctgcctttgacatcacagatgtaaccaatgagtcatgtcttctaacatggaacccaccacgcgatgatggtggatctaagatcacaaactatgttgtggagagacgagcaactgatagtgaagtgtggcacaagctctcatccaccgtcaaggatacaaacttcaaggccaccaaattaatccccaataaagagtacatcttcagagttgctgcagaaaacatgtatggtgttggtgaaccagttcaggcctctccaataacagccaaatatcagtttgatccacctggtcctccaactcgcctagaaccttctgatatcactaaagacgcagtgactctcacatggtgtgagccagatgatgatggtggcagcccaatcacaggatactgggttgaaagactggatcctgatacagataaatgggttagatgcaataagatgccagtaaaggacacaacatacagagtgaaaggtctcactaataagaaaaaatacagattccgtgtgttggctgaaaatcttgctggacctggaaaaccaagcaaatcaactgaaccaatcttaataaaggatcccatagatcctccatggccccctggaaaaccaactgtaaaagatgtaggcaaaacatcagtaaggttgaattggacaaaaccagaacatgatggaggtgcaaagattgagtcttatgtcattgaaatgctgaagactggaacagatgagtgggtcagagtggcggaaggggttcccaccactcagcacttgctcccagggctcatggaaggacaggaatactcattccgagttagagctgtgaataaggctggggaaagtgaacccagtgaacccagtgaccctgtgctttgccgggagaagctatatcctccatcaccaccacgctggcttgaagttattaatatcacaaaaaatacagcagacctaaaatggacagttcctgagaaagatggagggtcccccatcaccaactacattgtggaaaagagagacgtcaggcgaaaaggctggcaaacagtggataccactgtcaaggacaccaagtgcacagtcaccccactgactgagggctctttatatgtgttccgagttgctgcagaaaatgctataggacaaagcgactacaccgaaattgaggactctgtgctggccaaagacacctttaccactcctggaccaccctacgccctggcagtggttgatgtgacaaaacgacatgttgacctaaagtgggagccacctaaaaatgatggtggaagaccaatacagagatatgtcattgagaagaaagaaaggttaggtacccgttgggtgaaagctggaaagactgcaggacctgactgtaacttcagagtaactgatgtcatcgaaggaacagaggtccagtttcaggttcgggctgaaaatgaagctggagttggccacccaagtgaacccacagaaatcctatccattgaagatccaacaagtcctccctcaccaccccttgacctacatgtgactgatgctgggagaaaacacattgccattgcttggaagcctccagagaaaaatggtggaagtcctatcataggataccatgttgaaatgtgtccagtaggcactgagaaatggatgagagttaattctcgcccaataaaggacttgaaattcaaggttgaagaaggtgttgttcctgacaaagaatatgtcctgagagtgagagcagtcaatgctattggtgtcagcgagccatctgaaatctctgaaaatgtggttgccaaagacccagactgcaagccaacaattgacctggagactcatgacattattgttattgaaggtgaaaagttaagcattcctgttcccttcagagctgtcccagttccaactgttagttggcataaagatggcaaagaagttaaagcaagtgatagattaacaatgaagaatgatcacatctctgcacaccttgaagttcccaagagtgtccgtgcagatgccggaatttataccattacactggagaataagctcggctcagcaacagcctcaatcaatgtcaaagtcataggcctacctggaccatgcaaagatattaaagcaagtgacattaccaagagttcttgtaagttaacttgggaacctccagaatttgatggtggaaccccaattcttcattatgtcctggagcgcagagaagctgggaggagaacatatataccagtcatgtctggtgagaacaaactgtcatggactgtgaaggatctcataccaaatggtgaatacttcttccgtgttaaagcagtcaacaaggttggtggaggagaatatattgaactgaaaaatccagtcattgctcaagatccaaagcaaccccctgatccacctgtagatgtagaggttcataatcctacagcggaggcaatgactattacatggaagccacctttgtatgatggagggagcaagataatgggctacatcatagagaagattgctaagggtgaagaaaggtggaagagatgcaatgaacacctggtaccaatcctgacctatacagcaaaaggacttgaagaggggaaagagtaccaattccgtgtgcgagcagagaacgccgcgggtattagtgaaccttctcgggctactcctccaaccaaagctgtagatcccattgatgcccccaaagtcattctgagaacaagcctagaagtgaaacgaggtgatgaaatagcacttgatgcaagtatttctggatcaccttacccaactattacatggataaaggatgaaaatgttattgtaccagaggaaattaagaagcgtgcagcacccttggttaggagaaggaagggtgaagttcaagaagaagaaccatttgtcctgcctctgacacagcgtttgagtattgacaacagcaaaaagggagaatctcagctacgcgtccgagattctctccgacctgaccatggtctgtatatgatcaaagttgaaaatgaccacggtattgcaaaagctccttgtactgtcagtgtgttagatacaccgggaccaccaatcaactttgtatttgaagatatcagaaagacctcagtcctttgtaaatgggaaccaccccttgatgatggtggcagtgaaatcataaactacactttggaaaagaaagacaagacaaaacccgactcagaatggattgttgtcacttcaacacttagacattgcaaatattcagtaacaaaactgattgaaggaaaagagtacctcttccgtgtaagagctgaaaacagatttgggccaggtccaccatgtgtttcaaagccacttgtggctaaagatccatttggaccacctgatgcaccagataagcccattgtggaagatgttaccagcaacagtatgctagtgaaatggaatgaaccaaaagataatggaagccccattttgggttactggcttgaaaaacgtgaagttaacagtacacattggtctcgtgtcaacaaaagccttctgaatgccttgaaagccaatgtagatggcttattagaaggactcacctatgtcttcagagtatgtgctgaaaatgcagctggacctggaaagttcagtccaccttcagatcccaaaacagcacatgatccaatctctcctcctgggccacctatcccaagagtcactgacacaagctctacaactattgaactagaatgggaacccccagctttcaatggtggtggggaaattgttggctattttgttgataagcagttggttggcacaaatgaatggtcacgctgcacagagaagatgatcaaggtccgtcagtacaccgtcaaagaaatccgagagggtgctgattacaaacttcgggtgagtgctgtcaatgccgcaggggaaggaccgcctggagaaacacaacctgttactgtggctgaaccacaagagcctccagctgtggaactggatgtttctgtcaagggtggaatacaaataatggctgggaagactcttagaattccagctgtggtgactggtcgccctgtacctacaaaagtatggaccaaagaagaaggggagctggataaagaccgtgttgtaatagacaacgttggaaccaaatctgaactaattatcaaggatgcactgcgaaaagaccatggcagatatgtgattacagctacaaatagctgtggttccaaatttgcagcagccagggtagaagtttttgatgtccctggtccagttcttgacttaaaacctgttgtaacaaacagaaaaatgtgtctacttaactggtctgatccagaagatgatggaggaagtgaaataacaggctttatcattgaaagaaaagatgccaagatgcatacttggagacaaccaatagagactgagagatctaaatgtgacatcacaggtctgcttgagggacaagaatataagttccgtgttattgccaagaacaagtttggctgtggccctcctgttgaaataggaccaattcttgcagttgatccactaggtcctccaacatctccagagaggctcacatacactgaaaggacaaagtccactatcacacttgactggaaagagccccgcagtaatggtggcagtcccatccaaggatatatcattgaaaaacggcgtcatgacaaacctgactttgaaagagttaacaagcgactctgcccaaccacatcttttctggttgaaaatcttgatgaacaccaaatgtatgagttccgtgtcaaagctgtcaatgaaattggtgaaagtgaaccatccctacctcttaatgtagtcatacaagatgatgaagtgcctccaactattaagttgcgtctgagtgttcgaggagacactatcaaagttaaggcaggagagcctgtccacatccctgcagatgtgacaggccttccaatgcctaagattgaatggtccaaaaatgaaactgtaattgaaaaacccactgatgcacttcagataaccaaggaagaggtatcccgaagtgaggcaaaaactgagcttagcattcccaaagcggtccgggaggacaaaggcacttacacagttactgcttccaatcgccttggctcagtgttccgaaatgttcacgttgaagtatatgaccgcccatccccaccaagaaatcttgctgttactgacattaaagctgaatcttgctacttgacatgggatgcccctcttgataatggtggcagtgaaatcacccattatgttattgacaaacgtgatgcaagtaggaagaaagcagaatgggaggaagtcaccaacactgctgtagagaaaagatatgggatctggaaacttatccccaatggtcagtatgagttccgagtcagggcagtgaataaatatggaatcagtgatgagtgcaaatcagataaagtagtcattcaagatccttatcgccttcctggacctccaggaaaaccaaaagttttggcacgcaccaaaggatcaatgctagtgagctggactcctcctttggacaatggtggctctccaattactggctactggctggagaaaagagaagagggaagtccttattggtcacgtgttagccgagcaccaataaccaaagtgggattgaaaggcgtggaatttaatgttcctcgtttgcttgaaggcgttaaataccagttcagagccatggcaataaatgctgcaggaattggtcctcccagtgaaccatcagatccagaggttgcaggagatcccatatttccaccggggccaccttcttgcccagaagttaaagataaaacgaagtcaagcatctcactaggatggaaacctccagccaaagatggtggcagcccaatcaaaggatacattgtagaaatgcaagaagaaggtactactgactggaaaagagtaaatgaaccagacaaacttataactacctgtgaatgtgtggtgcctaatctgaaagagctcaggaagtacagattcagagtgaaagctgtcaatgaagctggtgaatctgaaccaagtgatacaactggggagatccctgccactgatattcaagaggaaccagaagttttcattgacattggagcacaggactgtctggtttgtaaagctggctcacagattaggattcctgctgtcatcaagggacgcccaacaccaaaatcatcttgggaatttgatggaaaggcaaagaaagcaatgaaggatggagttcatgacatacccgaagatgcacagctggagactgctgaaaactcctcagtaattattattccggagtgtaaacgatctcatacaggcaaatacagcatcacagccaagaataaagcaggacaaaagactgcaaattgcagagttaaagtcatggatgtaccaggcccacccaaagatctgaaagtcagtgatatcacaaggggtagttgcagactttcatggaagatgccagacgacgatggaggagacaggatcaaaggctatgttattgagaagaggactattgatggaaaagcctggaccaaagtcaatccagactgtggaagcaccacatttgtagtgcctgatctcctctctgaacagcaatatttcttccgtgtgcgagcagaaaaccgttttggtattggcccacctgtggaaaccattcagaggaccactgccagagatccgatatatcctcctgatcctcctattaaactcaagattggcctcatcacaaagaacacagtgcatctgtcatggaaacccccgaagaatgatgggggctcccctgttacccactatattgttgagtgccttgcatgggaccctactgggacaaagaaagaagcctggaggcagtgcaataagcgtgatgtggaagaactgcaatttactgttgaagacctagtagaaggtggggaatatgaattccgagtcaaagctgtcaatgctgcaggagtcagcaagccttcagccactgttgggccctgtgactgtcaaagaccagacatgccaccatcaattgatctaaaagaattcatggaggttgaagaaggaaccaatgttaacattgtggccaaaattaaaggtgtgccattcccgacactaacctggtttaaagctcctccaaagaagcctgataacaaagaacctgttctctatgacacccatgtcaacaaactggtggtagatgatacttgcactttagttattccgcagtctcgcaggagtgacactggcttatataccatcacagctgtaaataatctgggaacagcatcaaaggagatgagactgaatgtcctgggtcgtcctggccctccagtgggacccataaaatttgaatctgtttcagcagatcaaatgacactatcttggtttccacctaaagatgatggtgggtctaagattacaaactatgtaattgagaaaagagaagctaacaggaagacatgggtccatgtctccagtgaacctaaggagtgcacgtacacgattcccaaattgctagaaggccatgaatatgtattccgaatcatggcccagaataaatatggcattggagaacctcttgacagtgaacctgaaacagcaagaaacctcttctctgtccctggagcaccagataaaccaacagttagcagcgtgactcgtaactccatgactgtcaactgggaagagccagaatatgatggaggctctcctgtgacagggtactggctggaaatgaaagacaccacttcaaagagatggaagagagttaaccgagatcctatcaaagccatgactttgggtgtttcttataaagtgactggtcttattgaaggttccgactatcaattccgggtatatgcaatcaatgctgctggcgtgggtccagcaagtctgccatcagacccagcgactgctagagatccaattgcccctcctggtcctccatttcccaaagtgacagattggactaaatcatctgcagatctggagtggtctcccccactaaaagatggtggatccaaagtaactggatacatcgttgaatataaagaagaaggaaaagaagaatgggaaaagggtaaagataaagaagtgagaggaacaaagctcgttgtgacaggattaaaggaaggagcattctacaaatttagagttagtgcagtcaacattgctggcattggagaacctggagaggtcacagatgtcattgaaatgaaggacagacttgtttcacctgaccttcagctagatgccagtgtcagagatagaattgttgtccatgctggaggggtgatccgaatcattgcctatgtgtctggaaagcctcctccaaccgtcacctggaacatgaatgaaagaaccttacctcaagaagccaccattgagaccacagccattagctcatccatggtcatcaagaactgccagaggagccatcaaggcgtctattctcttcttgccaaaaatgaagccggagaaagaaagaagacaattattgttgatgtattagatgttccaggtcccgttggaacaccattcctagctcacaacctaaccaatgagtcctgcaaactgacatggttttctccagaagatgatggaggctctccaatcaccaattatgtcattgaaaagcgtgaatctgaccgcagagcatggaccccagtgacatatacagttacccgacaaaatgctactgtccagggtctcattcaaggaaaagcctactttttccgaattgcggctgaaaatagtattggcatgggtccatttgttgagacatcagaggcacttgttatcagagagccaataactgtaccagagcgtcctgaagacctggaagtcaaagaagttactaaaaatactgtaactttgacttggaatcctcctaagtatgatggtgggtcagaaattattaactatgtcctagaaagtcggctcattgggactgagaagttccacaaagttacaaatgacaacttgcttagcagaaaatacactgttaaaggcttaaaagaaggtgatacctatgagtaccgtgtcagtgctgtcaacattgttggacaaggcaaaccatcattttgcaccaaaccaattacttgcaaggatgagctggcacccccaacgcttcacctcgacttcagagataagctcacgattcgagttggtgaagcttttgccctcactggccgttactcaggcaaaccaaagcctaaggtttcctggttcaaagatgaagctgatgtgctggaagatgatcgcactcatataaagactacaccagcaacacttgctttagagaagatcaaggccaaacgttcagattccggcaaatactgtgtggttgtggagaacagtacaggctctaggaaaggtttctgtcaagttaatgttgttgaccgtcctggaccaccagtaggaccagttagttttgatgaggtgaccaaagattacatggttatctcttggaagcctcctttagatgatggaggcagtaaaatcaccaattatattattgagaagaaggaagtgggtaaagacgtctggatgccagtgacatctgcaagtgctaaaacaacatgcaaagtttctaaactacttgaaggaaaagattatattttccggatacatgctgaaaatctgtatggaataagtgatcctctggtgtctgattcaatgaaagccaaagatcgtttcagggttcctgatgcacctgatcagccaattgttacagaagttaccaaagactctgcattagtaacctggaataagccacatgatggaggaaaacccatcacaaactacatcctggaaaagagagaaactatgtctaaacgatgggctagagttaccaaagatcctattcatccatacactaaatttagggttcctgatcttctagaaggatgtcagtatgaattccgggtttctgcagaaaatgaaattggtattggagatccaagcccaccatccaaaccagtctttgctaaagatccaattgctaaaccaagtccacctgttaatcctgaagcaatagatacaacatgcaattcagtcgatctaacttggcagccaccacgtcatgatggtgggagcaagattctgggttatattgttgagtaccagaaagttggagatgaagagtggagaagagccaatcacacccctgagtcatgtcctgaaactaaatataaagtcaccggtcttcgggacggtcaaacctataagtttagagtgttagcagtcaatgcagctggtgaatcagatccagctcatgttccggagccagtcctagtaaaagacaggcttgaaccccctgagttgattcttgatgccaacatggcaagagaacaacacattaaagttggtgatactctaagacttagtgccatcatcaaaggagtgccattcccaaaagtaacttggaaaaaagaagacagagatgctccaactaaagcaagaattgatgtgactccagttggtagcaagcttgaaattcgtaatgctgcccatgaagatggtggaatttattctttaacagtggagaatccagctggttcaaaaactgtctcagtaaaagtacttgtattagataaacctgggccacctagagatctggaagtcagtgaaattaggaaagattcatgttaccttacttggaaagaaccactggatgatggtggttctgttattaccaattatgtggttgagaggagagatgttgccagcgcccagtggtcacctctctcagctacatcaaagaaaaagagtcacttcgctaagcatctgaatgaaggcaaccagtacctcttccgagtagctgcggagaaccagtatggacgtggtccttttgttgaaacaccaaaaccaatcaaggctttggatcctctccatcccccagggccacccaaggacctgcaccatgtagatgttgacaagactgaagtctccctagtctggaataagccggatcgtgatggtggttctccaatcactggatatttggtagaatatcaagaagaaggcacccaggactggattaaatttaagactgtgacaaacttagagtgtgtggttactggactacaacaaggaaagacctatagattccgtgtaaaagctgaaaacattgtgggtcttggtctccctgacacaactatcccgatagaatgtcaagaaaaactagtgcctccatccgtggagctagatgtgaaattaattgaaggtcttgtggtaaaggctggaaccacagtcagattccctgctattataagaggtgtgcctgttcctactgcaaagtggacaaccgatgggagtgagattaaaaccgatgagcactacacagttgaaacagacaacttctcatcagtacttaccattaagaactgcttaaggagagacactggggaatatcaaatcacagtttccaatgcagccggtagcaaaacagtagccgtacatcttactgttcttgatgttcctgggccaccaacaggtcctattaatattctggatgttactcctgaacacatgactatctcatggcagccacctaaggatgatggaggaagccctgtgataaattatattgttgagaaacaagatacaaggaaagacacgtggggtgttgtctcttccggaagcagtaagacaaagctgaaaatcccacatctgcagaagggctgtgaatatgttttccgagttagagcagagaataagataggtgttggtcctccccttgactccacacctactgttgctaagcataaatttagtcctccgtctcctcctggtaaaccagtggttactgacattactgaaaatgcagcaacagtgtcttggaccctgccaaaatctgatggtggcagtccaataactggctactatatggaacgtcgagaagtaactggcaaatgggtgagggtcaacaaaacacctatcgctgacctgaagttcagagtgactggactctatgaaggaaatacatatgagtttagagtttttgctgaaaatcttgcaggactaagcaaaccatccccaagttctgatccaataaaagcttgccggcccatcaaaccacctggaccacctattaatcctaaactgaaagacaagagcagagaaacagctgatttggtgtggacaaagcctctcagtgatggtggtagccccattctaggatatgtagtggaatgtcagaaacctggcacggcacaatggaacaggattaataaagatgaactcattaggcaatgtgcctttagggtacctggactaattgaaggaaatgagtacagattccgtataaaggcagctaatattgtaggagagggtgagccaagagaactagcagaatctgtgattgcaaaagatatccttcatcctccagaagtagaacttgatgttacttgtcgtgatgttattaccgtgagagtaggccaaactatccgcattctagctcgagtcaaaggcagacctgaaccagacataacttggactaaggaaggcaaagtattggtccgagaaaagagggtggaccttattcaggatctacctcgtgttgagttacaaattaaagaagctgttagagctgatcatggcaagtatatcatctcagctaagaacagcagtggacatgcccaaggttcagccatcgttaacgtccttgacagacctgggccttgccagaatttgaaggttaccaatgtaaccaaagagaactgtacaatttcttgggaaaacccactagataatggtggctcagaaataacaaacttcatagtagaatatcgcaaaccaaaccagaaaggctggtcaattgttgcatcagatgtcactaaacgattaatcaaggccaaccttttagccaacaatgaatactatttccgagtttgtgcagagaataaagtaggtgttgggccaaccatcgaaacaaaaactcccattctggctattaaccctattgacagaccaggtgagcctgaaaaccttcacattgcagataaaggaaagacatttgtctatctaaagtggcggaggcctgactatgatggtggcagtccaaatctgtcatatcatgttgagagaaggcttaagggctccgatgactgggaaagagtgcataaaggaagcattaaagaaactcactacatggttgacagatgtgttgaaaaccagatttatgagttcagagtgcaaacaaagaatgaaggtggggaaagtgactgggtgaagacagaggaagttgttgtgaaagaagacttacaaaaaccagtacttgatctgaaattaagtggggtcctaactgtcaaagcaggggacaccattaggcttgaggcaggggttagaggcaaaccattcccagaagttgcatggaccaaggacaaagacgctacagacttaacaagatcaccaagggtcaagattgatacccgtgctgattcatctaaattttctcttactaaagcaaagcgaagtgatgggggtaaatatgtagttacggcaactaacacggctggcagttttgtggcctatgccactgtcaatgttttagataagcctggtcctgtgagaaatctgaaaattgttgatgtgtccagtgataggtgtactgtttgctgggatccaccagaagatgatggtggctgtgaaatccaaaattatattctagaaaaatgtgagacaaagcgaatggtttggtctacctattctgctactgtcttgacacctggtactacagtaacacgtctcatagaaggaaatgaatatattttcagagtccgtgcagaaaataaaataggcacagggcctccaacagaaagtaaaccagtcatagccaaaaccaagtatgataaacctggtcgccctgatcccccagaagtcactaaagtaagcaaagaagagatgactgtggtttggaatccacctgaatatgatggtggaaagtctataactggatactttttggagaaaaaggaaaagcattcaacacgatgggtccctgtcaacaagagtgcaatccctgagagacgtatgaaagtacagaatctcctcccagaccatgaatatcagttccgtgtcaaggcagaaaatgaaattggaattggagaaccaagcttgccttcaagaccggtggtggcaaaagaccccatagagccacctggtccaccaaccaatttcagagtggttgatacaaccaaacattccataactcttgggtggggaaaaccagtctatgatggtggtgcaccgatcattggatatgttgtggaaatgagaccaaaaatagcagatgcgtctcctgatgaaggctggaaacggtgtaatgctgcagcacagcttgtacgcaaggaattcactgttaccagcttggatgaaaaccaggaatatgagttcagggtgtgtgcccaaaaccaagttggtattgggcgccctgcagagctaaaggaagctatcaaacctaaagaaatactagaacctccggagattgatttggatgccagcatgaggaaactggtcatagtgagagcaggatgccctattcgtctctttgctatagtgagaggacgaccagcccctaaagtcacttggcgaaaagttggcattgataatgtggtcagaaaaggacaagttgatctggttgacactatggccttccttgtcatccccaattctacccgtgatgactcaggaaaatattccttaacacttgtgaacccagcaggagaaaaggctgtattcgtaaatgtcagagtattagacactcctgggcctgtgtctgatttaaaagtttcagatgtcactaaaacatcatgccatgtgtcctgggcccctcctgaaaacgacggtgggagccaagtgacacattatatcgtggagaaacgtgaggcagacagaaagacatggtcgaccgttaccccagaagttaagaaaacaagcttccatgtaaccaatcttgtccctgggaatgagtattacttcagagtaactgctgtcaacgaatatggccctggcgtcccaacagatgtcccaaaaccagtgcttgcatcagatcctctaagtgagccggatcccccaaggaaattagaagtgactgaaatgaccaagaacagtgccaccttagcctggttacctcccctacgtgatggaggtgctaaaatcgatggctacatcactagttacagagaagaagagcagcctgcagatcgctggacagagtactcagtggtaaaagatctgagccttgttgtcactggcctaaaggaaggaaagaaatacaaatttagagtagcggccagaaatgctgttggagtcagtttgccaagagaagctgaaggagtgtatgaagccaaagaacaactgttgccaccaaagatccttatgccagagcaaataactatcaaagctgggaaaaaactccgaattgaagcccatgtgtatggaaagcctcatcccacctgtaaatggaaaaaaggagaagatgaagttgtcacatccagccacctggcagtgcataaagcagacagctcttcaattctgatcataaaagatgtgactaggaaagacagtggttactacagcctcacagcagagaacagttctgggacagacactcagaaaatcaaagttgtagtcatggatgcccccggcccccctcagcctccatttgacatttctgatatagacgctgatgcttgctccctgtcatggcacatccctctggaggacggaggcagtaacatcaccaattatatagtggagaagtgtgatgtaagccgaggtgactgggtcacggctctagcttcagtcacaaaaacttcctgcagggttggaaagctgatcccaggccaggagtacatcttccgggtccgtgctgaaaaccgatttggcatttcagagcctctcacatctccaaagatggttgcgcagttcccatttggtgttcctagtgaaccaaagaatgcacgagtcaccaaagtcaacaaggactgtatttttgttgcttgggacagaccagatagtgatggagggagccccattattggttatctgattgaacgcaaggaaagaaacagtttgctgtgggtgaaagccaatgatactcttgtccggtcaactgaatatccttgtgctggccttgtagaaggtcttgagtattcattcagaatctatgccctaaacaaagctggatccagcccacccagcaaacccacagaatatgtaactgcaagaatgccagttgatcctcctgggaaacctgaggttattgatgtcaccaagagtactgtatctctgatctgggctcgtccaaagcatgatggaggcagtaaaattattggctatttcgtagaagcttgcaaacttcctggtgataaatgggtacggtgcaatactgcacctcaccagattccccaggaagagtacacagctactggcctagaagagaaagctcagtatcaatttagagctattgccaggaccgcggtaaacattagcccaccttctgaaccttctgatccagtgactatcctcgcagaaaatgtccctcccaggatagacctgagtgtggctatgaaatctttgcttactgtgaaagctggaactaatgtctgcttggatgctactgtttttggtaaaccgatgccaacagtttcttggaaaaaagatggcacactgctaaaaccagcagaaggcataaagatggccatgcagcggaatctgtgcaccttggagctattcagcgtgaaccggaaggactcaggagactataccattactgctgaaaattcaagtggttctaaatcagccaccattaagcttaaagtgttagataaaccgggtcctccagcatctgttaaaatcaacaaaatgtattcagatcgtgctatgctttcttgggaaccgcctcttgaagatggaggctcagaaatcaccaactatattgttgacaaacgtgaaacaagcaggcccaactgggctcaagtctctgcaactgtgcctatcaccagctgcagcgtggagaaacttatagagggccatgagtatcagttccgtatttgtgctgaaaataaatatggagtaggcgatccagtcttcactgaaccagcaattgccaaaaacccatatgacccaccaggacgctgtgatcctcctgttattagcaacataaccaaagatcacatgacagtcagctggaagccaccagcagatgatgggggctcacccatcactggctatttgcttgaaaagcgggaaacccaggctgttaactggactaaggtcaacagaaaacctattatagaaagaacattaaaagcaacaggtcttcaagaaggtaccgaatatgagttccgtgttacagctataaataaagctggaccaggcaaacccagtgacgcatccaaggccgcttatgctcgggaccctcagtatcctcctgcgccaccggctttccctaaagtatatgatacaactcgcagctctgtgagtctatcttggggcaagccagcctatgacggcggcagccctatcattggttatctcgttgaagtaaaacgggctgactccgataactgggtgaggtgcaacttaccacagaatctacagaaaacccgctttgaggttactggcctgatggaagacacacaatatcaattccgtgtgtatgccgttaataagattggatacagtgaccccagtgatgtgccagataaacactatcccaaggacatcttaattccacctgagggagaacttgatgcggacttaaggaagacactcatattacgtgctggagttactatgagactatatgtaccagtaaaaggacgcccacctccaaagattacttggtctaaaccaaatgtcaatctaagagacaggattggactggacataaagtcaactgactttgacactttcttgcgctgtgaaaatgtgaacaaatatgatgcaggaaaatatatcttaaccctggagaacagctgtggtaaaaaggaatataccattgttgtgaaagtgcttgatactcctgggccacctgtcaatgtgactgttaaggaaatatccaaagactctgcttatgttacctgggagcctcccattattgatggcggaagccccatcataaactatgtggtacaaaaacgtgatgcagagaggaaatcctggtctacagtgacaactgagtgctccaaaacaagcttcagagtagctaatttggaggagggaaaatcctacttcttccgagtgtttgctgaaaatgagtatggcattggtgatcccggtgaaactcgtgatgctgtcaaagcttcccaaactcctggaccagttgtggacctgaaagtgaggtctgtatctaagtcatcctgtagcattggctggaaaaagcctcacagtgatggtggaagtcggattattggatatgtagttgatttcctgactgaagaaaataagtggcaacgagttatgaaatccttaagcctacagtactctgcaaaagatttgactgaagggaaggaatataccttcagagtgagtgctgagaatgaaaatggagaaggaaccccaagcgaaatcactgttgtggcaagggatgatgttgtggctcctgatcttgacttaaagggtctacctgatttgtgctacttggctaaagaaaacagcaacttccggcttaagatccccataaaaggcaagccagctccatcagtctcctggaagaaaggggaagatcctctagcaactgacactagagtcagtgttgagtcatctgcggttaacacaactcttatagtgtacgattgccaaaaatctgatgctggaaaatacacaatcacacttaagaatgttgctggcaccaaggaaggaactatctccataaaggttgttggcaagcctggcatccccactggaccaatcaaatttgatgaagtcacagcagaagccatgaccttaaagtgggctcctccaaaggatgatggaggttctgaaatcaccaactatatcctagagaagagggattctgtgaacaacaagtgggtgacgtgcgcctcagctgtccagaaaaccacctttagagtaaccagacttcatgagggcatggaatataccttcagggtcagtgccgaaaataaatatggtgtaggggaaggcctgaaatcggagccaattgttgcgagacatccatttgatgtgcctgatgctcccccacctcccaatattgtggatgtcagacacgattcagtatctctaacttggactgaccccaagaaaactggtggttctccaattacagggtatcatctcgagttcaaggaaagaaacagccttttgtggaagagagctaacaagactccgataaggatgagagactttaaagtgacaggattaactgaaggtcttgaatatgaattccgagttatggcaatcaatttagcaggtgtgggcaagccaagcctaccatcagagcctgttgtggcactggacccaattgatcctcctggaaaacctgaggttattaacataacaaggaattcagtgactctcatttggactgaacctaaatatgacggtggtcataagttaactggatatatagtggagaagcgagatctaccttcgaagtcttggatgaaagccaaccatgttaatgtcccagaatgtgcctttactgtaactgaccttgttgagggtggaaaatatgaattcagaattagagcaaagaatacagcaggtgctatcagtgctccatcagaaagtacagaaaccattatttgcaaggatgaatacgaggcaccaacaattgtccttgatcccacaataaaagatgggctaacaattaaagcaggggataccattgttttgaatgccattagcattcttggcaaaccccttccaaaatcaagttggtccaaggcaggaaaagacattagaccatcagatatcactcagataacttcaaccccaacatcttccatgcttactatcaagtatgccactagaaaagatgcgggtgaatataccatcactgctaccaatccttttggcacgaaggtggaacatgtgaaggtaacagtccttgatgtacctggtcccccaggtcctgttgaaatcagtaatgtttctgctgaaaaagcaacacttacatggacacctcccttggaagatggcggctcaccaattaagtcctatatacttgaaaagagagaaaccagccgacttttgtggacagtggtttctgaagatattcagtcttgcaggcatgtggcaaccaaacttatccaaggaaatgagtacatcttccgggtctcagctgtaaaccactatggcaaaggagaacctgtacagtctgaacctgtcaaaatggtagacagatttggtccccctggccctcctgaaaaaccagaggtatcaaatgtcactaagaacactgccactgtcagctggaaaaggccagtggatgatggtggcagcgaaattacaggatatcatgtagaaaggagagaaaagaaaagcctgcgatgggtgagagcaataaaaacaccagtttccgatctcaggtgcaaagtaacaggactgcaagaaggaagcacctacgaattccgtgtcagtgcagaaaacagagcaggaattggtccacccagtgaggcttcagattctgttctgatgaaagatgcagcatatcctccaggaccaccttcaaatccgcatgtcactgatactaccaagaaatctgcttctttggcatggggcaagcctcattatgatggtggacttgaaatcactggctatgtcgtggagcatcaaaaagtaggagacgaggcctggataaaagataccacaggaaccgccctcagaatcactcagttcgttgttcctgatcttcagactaaagaaaaatacaacttcagaatcagtgccatcaacgatgcaggtgttggggagccagcggtgattccagatgttgaaatcgtagaacgggagatggctcctgattttgaactagatgccgagcttcgaagaacacttgttgttagagcaggactcagtattaggatatttgtgccaattaaaggtcgtcctgctcctgaagtgacatggaccaaagataacatcaacctgaaaaaccgagccaacattgaaaatacggaatcatttactcttctgattatcccagaatgtaacagatatgataccggtaaatttgtcatgaccattgaaaacccggctgggaagaaaagtggctttgtgaacgtcagagtcttggacacgccaggcccagtcctcaacctgcggcctacagacatcacaaaggacagtgtcaccctgcactgggacctccctctgatagatggaggctcacgtataacaaactacattgtagagaaacgtgaagcaacacggaaatcttattccacagccaccactaagtgccataaatgcacatataaagttaccggcttgtctgaagggtgtgaatatttcttcagagtgatggcagagaatgaatatggaattggtgagccaacagaaactacagagcccgtaaaagcctctgaagcaccatctccaccagacagccttaacatcatggacataactaagagcaccgtcagcctggcatggcctaagcccaaacacgatggtggcagcaagatcactggctatgtgattgaagcccaaagaaaaggctctgaccagtggacccacatcacaaccgtgaaagggttagaatgtgttgtgaggaatctaactgaaggagaggaatataccttccaagtgatggcagtgaacagcgcggggagaagtgcccctagagaaagcagacccgtcattgtcaaggagcagacaatgcttccagagctggatctccgtggcatctatcagaaactggtcattgccaaagctggtgacaacatcaaagttgaaattccagtgctcggtcgaccgaagcccacagtgacatggaaaaaaggagaccaaattcttaaacagacacagagagttaattttgaaaccacagcgacttcaaccattttaaatatcaatgagtgtgtcagaagtgatagtgggccctatccattaacagcaaggaacattgtaggagaggttggtgatgtcatcaccattcaagtccatgatatcccagggccacctactggaccaatcaaatttgatgaagtttcatctgattttgtaaccttctcttgggacccacctgagaacgatggtggtgtaccaataagcaactatgtagtggaaatgcggcagactgacagtactacctgggttgagttagcaaccaccgttatacgtactacctataaagccacccgccttactactggattagagtatcagttccgtgtaaaagctcagaatagatatggagttggaccaggcatcacatcagcatgcatagttgccaactatccatttaaggttcctggacctcctggtacccctcaggtaactgcagttaccaaggattcaatgacaattagctggcatgagccactttctgatggtggaagccccattttaggatatcatgttgaaagaaaagaacgaaatggtattctctggcagactgtgagcaaagctttagtaccaggcaacattttcaaatcaagtggacttacagatggtattgcttatgagttccgggtgattgcagaaaacatggcaggcaaaagtaagccaagcaagccatcagaacctatgttggctctggatcccattgacccacctggaaaaccagtacctctaaatattacaagacacacagtaacacttaaatgggctaagcctgaatatactgggggctttaaaattaccagttatatcgttgaaaagagagaccttcctaatggacggtggctgaaggccaacttcagcaacattttggagaatgaatttacagtcagtggcctaacagaagatgctgcatatgaattccgtgtgatcgccaaaaatgctgcaggtgccatcagtccaccatctgagccatctgatgctatcacttgcagggatgatgttgaggcaccaaagataaaggtggatgttaaatttaaggacacggttatattaaaagcaggtgaagcattcagactggaagctgatgtttcaggccgcccacctccaacaatggaatggagcaaagatggaaaagagctggaaggcacagcaaagttagaaataaaaattgcagatttctctactaatctggtaaacaaagattcaacaagaagggatagtggtgcctatacccttacagcgactaatcctggtggctttgctaaacacattttcaatgtcaaagttcttgacagaccaggcccacctgaaggacctttggctgtaactgaagtgacatcagaaaagtgtgtactatcatggttccctccactggatgatggaggtgccaaaattgatcattacatagtacagaaacgtgaaaccagcagattggcatggacaaatgtagcctcagaagtccaagtaacaaagctaaaggtcactaaactcttgaaaggcaatgaatacatattccgtgtcatggctgtaaataaatatggagtgggagagccactggaatcagagcctgtgcttgcagtgaatccttatggaccccctgatccgcccaaaaaccctgaagtgacaactattactaaagattcgatggttgtctgctggggacatcctgattctgatggtggaagtgaaatcatcaattatattgtggaacggcgtgataaagctggccaacgctggattaaatgcaacaaaaaaactcttactgatttaagatataaagtgtctggactgacagaaggacatgaatatgagttcaggattatggctgaaaatgctgctggaattagtgcaccaagtcctaccagtccattttacaaggcttgtgacactgtgtttaaacctggaccaccaggtaacccacgtgttctggatacaagcagatcatccatttcaatcgcttggaataaacctatctatgatggtggttcagaaatcactgggtatatggttgagattgccctgccagaggaagatgaatggcagattgtcactccaccagcaggactcaaggcaacttcgtatactatcactggcctcacagagaatcaggaatataagatccgcatctatgccatgaattccgaaggacttggggaacctgcccttgttcctggaactccaaaggctgaagacagaatgctgcctccagaaattgaactggatgctgacctgcgcaaagttgttactataagggcctgctgcaccctgagactttttgttcccatcaaaggaaggcctgcacctgaggtgaagtgggcccgggaccatggagaatctttagataaagctagcatcgaatccacaagctcttacaccctgcttattgttggaaatgtaaacagatttgacagtggcaaatatatactaactgtagaaaatagttcaggcagcaagtctgcatttgtcaatgttagagttctcgatacaccaggccccccacaggatctgaaggtaaaagaggtcactaagacatctgtcacactcacatgggacccacctctccttgatggaggttcaaaaatcaagaactatattgttgaaaagcgggaatcaacaagaaaagcatattcaactgttgcaacaaactgccacaagacttcctggaaggtagaccagcttcaagaaggctgtagctactatttcagggttctcgcagaaaatgaatatggcattgggctgcctgctgaaaccgcagaatctgtgaaagcatcagaacgacctcttcctccaggaaaaataactttgatggatgtcacaagaaatagtgtgtcactctcttgggagaaaccagagcatgatggaggcagccgaattctaggctacattgtggagatgcagaccaaaggcagtgacaaatgggccacgtgtgccacagtcaaggtcactgaagccactatcactggattaattcagggtgaagaatactctttccgtgtttcagctcagaatgaaaagggcatcagtgatcctagacaactgagtgtgccagtgatcgccaaagatcttgtcattccaccagccttcaaactcctgttcaatactttcactgtactggcaggtgaagacctaaaagttgatgttccattcattggccgccctaccccagctgtaacctggcataaagataatgtaccactgaagcagacaactagagtaaatgcagagagcacagaaaataattcactactgacaataaaggacgcctgccgagaagatgttggccattatgtggttaaactgactaactcagctggtgaagctattgaaacccttaatgttatcgttcttgacaaaccagggcctccaactggaccagttaaaatggatgaagtgacagctgatagtattactctttcctggggcccacccaagtatgatggtggaagttctatcaataattacattgttgagaaacgggacacttccacaaccacctggcaaattgtatcagctacagttgcaaggacaacaataaaggcttgcagactgaagactggatgtgaatatcagtttagaattgcagctgaaaacagatatgggaagagtacctacctcaattcagagcctactgtagcccaatatccattcaaagttcctggtcctcctggcactccagttgtcacactgtcctccagggacagcatggaagtacaatggaatgagccaatcagtgatggaggaagtagagtcattggctatcatctagaacgcaaggaaagaaatagcatcctctgggttaagttgaataaaacacctattcctcaaaccaagtttaagacaactggccttgaagaaggtgttgaatatgaatttagagtctctgcagagaacatcgtgggcattggcaagccgagtaaagtatcagaatgttatgtggctcgtgacccatgtgatccaccaggacggccagaggcaatcattgtcacaaggaattctgtgactcttcagtggaagaaacccacctatgacggtggaagcaagatcactggttatattgttgagaagaaagaattacctgagggccgttggatgaaagccagttttacaaatattattgacactcattttgaagtaactggcctagttgaagatcacagatatgagttccgggttatagcccgaaatgccgcaggagtgtttagtgagccttcagaaagcacaggagcaataacagctagagatgaggtagatccaccacgaataagtatggatccaaaatacaaagacacaatcgtggttcatgctggtgaatcattcaaggttgatgcagatatttatggcaaaccaataccaaccattcagtggataaaaggtgatcaggagctttcaaacacagctcgattagaaataaagagcaccgactttgccaccagtctcagtgtaaaagatgcagtacgtgtcgacagtggaaattacatactgaaggccaaaaatgttgcaggagaaagatcagttactgtgaatgtcaaggttcttgacagaccagggccacctgaaggacctgttgttatctcaggagttacagcagaaaaatgcacactagcttggaaacccccacttcaggatggtgggagtgacatcataaattatattgtggaaaggagagaaaccagccgcttagtttggactgtggttgatgccaatgtgcagactctcagctgcaaggttactaagcttcttgaaggcaatgaatatactttccgtataatggcagtaaacaaatatggtgttggtgaacctcttgaatctgagccagtagttgccaagaatccatttgtagtaccagatgcaccaaaagctccagaagtcacaacagtgaccaaggactcaatgattgttgtatgggaaagaccagcatctgatggtggtagtgaaattcttggatatgttcttgagaaacgggataaagaaggcattagatggacaagatgccataagcgtctgattggagagttgcgcctgagagtaactggactcatagaaaatcacgattatgagttcagagtttctgctgagaatgctgctggacttagtgaaccaagccctccttctgcttaccaaaaggcttgtgatcctatttataaaccaggacccccaaacaaccccaaagtcatagacataaccagatcttcagtattcctttcttggagcaaaccaatatatgatggtggctgtgaaattcaaggatacattgttgaaaaatgtgatgtgagtgttggtgaatggacaatgtgcactccaccaacaggaattaataaaacaaacatagaagtagagaagctgttggaaaagcatgaatacaacttccgtatctgtgctattaataaagctggagttggagaacatgctgacgtccctggacctattatagttgaagaaaaattagaagcaccagacattgatcttgacctagaactaaggaaaatcataaatataagggcaggtggctccttaaggttatttgttcctataaaaggtcgtcctacaccagaagttaaatggggaaaggtggatggtgaaatccgagatgcagctataattgatgtcactagcagtttcacctctcttgttcttgacaatgtcaaccgatatgatagtggaaaatatacgcttacattagaaaacagcagtggaacaaagtctgcctttgttactgtgagagttctggacacgccaagtccacctgttaacctgaaagtcacagaaatcaccaaagactcagtatcaattacatgggaacctcctttgttggatgggggatccaaaataaaaaattacattgttgagaaacgtgaagccacaagaaaatcatatgctgctgttgtaactaactgccataagaattcttggaaaatcgatcagctccaagaaggttgcagttattactttagagtcacagctgagaatgagtatggtattggccttcctgcccagactgctgatccaattaaggttgcagaagtgccacaacctcctggaaaaataactgtggatgatgtcaccagaaacagtgtctctctgagttggacaaaacctgaacatgatggtggcagtaaaatcattcagtatattgtggaaatgcaagctaaacacagtgagaaatggtcagagtgtgctcgagtaaagtctcttcaggcagtaattaccaacctaactcaaggggaagaatatctttttagagttgttgctgtaaatgaaaaggggagaagtgatcctcggtcccttgcagttccaatagttgccaaagatctggtaattgagccagatgtaaaacctgcattcagtagttacagtgtacaggttggccaagatttgaaaatagaagtgccaatttctggacgtcctaagccaaccattacctggactaaagatggtctcccactgaagcagaccacaagaatcaatgttaccgattcactggatctcaccacactcagtattaaagaaactcataaggatgatggtggacaatatggaatcacagttgccaatgttgttggtcagaagacagcatccatcgaaattgtaactctagataaacctgatcctccaaaaggacctgttaaatttgatgacgtcagtgctgaaagtattacattatcttggaaccctccattatatacagggggctgccaaatcaccaactacattgttcagaaaagagatacaaccaccacagtatgggatgttgtttctgctactgttgctagaactacactcaaagtgaccaaactgaaaactggtacagaataccaatttagaatatttgccgaaaacagatatggacaaagctttgccttagagtctgatccaattgtagctcaatatccctacaaagaaccaggccctccaggtacaccatttgccacagccatttccaaagactccatggtcatacagtggcatgaaccagtcaacaatggtggaagccccgtcataggttaccacctggagagaaaagaaagaaacagtattttgtggacaaaggtcaacaaaactattattcatgacacccaattcaaagcacagaatcttgaagaaggcattgaatatgaattcagagtgtatgctgaaaatattgttggtgtaggcaaagcaagcaagaattctgaatgctatgtagccagagatccctgtgacccaccaggaaccccagaaccaataatggttaaaagaaatgaaatcactttacagtggaccaaacctgtgtatgatggtggaagtatgattacaggctacattgtagagaaacgtgatttgcctgatggtcgttggatgaaagctagctttacaaatgtcattgaaactcaatttactgtgtcaggtcttactgaagatcaaagatatgaattcagagtcattgcaaagaatgcagctggtgcaataagtaaaccctctgacagtactggaccaataactgccaaggatgaggttgaactcccaagaatttcaatggatccaaaattcagagacacaattgtggtaaatgctggagaaacattcagacttgaggctgatgtccatggaaagcccctacctaccattgagtggttaagaggagataaggaaattgaagaatctgctagatgtgaaataaagaacacagatttcaaggctttacttattgtaaaagatgcaattagaattgatggtgggcagtatattttaagagcttccaatgttgcaggttctaagtcattcccagtaaatgtaaaagtattagatagaccaggacctccagaagggccagtccaggttactggagtcacttctgaaaaatgctctttaacatggtctccaccacttcaagatggtggcagtgacatttctcactatgttgttgaaaagcgagaaaccagtcgacttgcctggactgttgttgcttcagaagttgtgaccaattctctgaaagttaccaaactcttagaaggtaatgaatatgttttccgtataatggctgtcaacaaatatggtgttggagagcctttggaatctgcaccagtactaatgaaaaatccatttgtgcttcctggaccaccaaaaagcttggaagtcacaaatattgccaaagactccatgaccgtctgttggaaccgtccagatagtgatggtggaagtgagattattggttacattgtagagaaaagagacagaagtggcattcgatggataaaatgtaataaacgccgcattacagatttgcgtctaagagtgacaggattaacagaagatcatgagtatgaattcagggtctctgcagaaaatgctgctggagttggggaaccaagtccagctacagtttattataaagcctgtgatcctgtgttcaaacctggcccacctaccaatgcacacattgtagacaccactaaaaattcaatcacacttgcctggggtaaacccatctatgatggcggcagtgagatcttgggatatgtagtagaaatctgtaaagcagatgaagaagaatggcaaatagttactccacagactggcctgagagtcactcgatttgaaatttcaaaactcactgaacaccaagagtataaaatacgagtctgtgccctcaacaaagttggtttaggtgaggctacatcagttcctggtactgtgaaaccagaagataaacttgaagcacctgaacttgaccttgactccgaattaagaaaaggaattgttgtaagagctggtggatctgccagaattcacattccattcaaaggtcgtccaacgcctgagatcacttggtctcgagaggaaggtgaattcacagataaggtccaaattgaaaagggagtaaactatacccaactatcaatagataactgtgatagaaatgatgctggaaaatacattcttaagttggaaaacagcagtggatcaaagtctgcttttgtaactgtgaaagttcttgacactccaggaccaccacagaatttggcagtcaaagaagtgagaaaagattctgccttcctggtatgggagccacccatcattgatggaggggcaaaggtcaagaactatgtgattgacaaacgtgagtcaaccagaaaagcgtatgctaatgtgagtagtaaatgcagcaaaacaagttttaaagtggaaaaccttacagaaggagccatttattacttcagagtcatggctgaaaatgaatttggagttggtgttccagtggaaactgttgatgccgtgaaagctgctgaacctccttccccaccaggaaaggttacactcactgatgtgtcccagaccagtgcatcacttatgtgggagaaacctgaacatgatggcggtagcagagtcctggggtacgttgttgaaatgcagcccaaaggaactgaaaaatggagcattgtggctgaatccaaagtctgtaatgcagttgttactggtttgagttctggacaagaatatcagttccgtgtcaaggcttataatgagaaaggaaaaagcgatccaagagtgttgggtgttcctgtcatagccaaggacttgactatacagcctagtttaaagttaccatttaacacatatagtatccaagctggagaagatcttaaaatagaaattccagttataggccgaccaagacctaacatttcttgggtcaaagatggtgagcctcttaaacagacaacaagagtaaacgttgaagaaacagctacctcaactgttttgcacattaaagaaggtaacaaagatgactttggaaaatacaccgtaacggcaacaaatagtgcaggcacagcaacagaaaatctcagtgttatcgttttagaaaagcctggacctccagttggcccagttcggtttgatgaagttagtgcagactttgtagtcatatcttgggaacctccagcctatactggtggctgccaaataagcaactacattgtagagaagcgagatacaaccaccaccacttggcacatggtatcagcaacagttgcaagaacaacaattaaaataaccaaactgaaaacaggcacggagtaccagtttagaatttttgctgaaaacaggtatggaaaaagtgccccactggattctaaggcagttattgtacaatatccatttaaagaacctggaccacctggaactccttttgtgacatcaatctcaaaagatcagatgcttgtgcaatggcatgagccagtgaatgatggaggcaccaaaattattggctaccatcttgaacagaaagaaaagaacagtattttatgggtcaagttaaataagacccccattcaggacaccaaattcaaaacaactgggcttgatgagggccttgagtatgagttcaaagtttctgctgaaaatattgttggcattggcaagcctagcaaagtgtcagaatgctttgttgctcgtgatccatgtgacccacctggtcgccctgaagccattgttattacaagaaacaatgtcacactgaaatggaagaaacctgcctatgatggtggtagcaaaataacaggttatattgtagaaaagaaagatctacctgatggccgctggatgaaagccagctttaccaacgtattagaaactgaatttacagtgagtggacttgtagaagaccaaagatatgaatttagagtaattgcaagaaatgcagctggaaactttagtgaaccatctgatagtagtggtgccattactgcaagagatgaaattgatgcaccaaatgcctctctggatccaaaatataaagatgtcatcgttgttcatgcaggagagacttttgttcttgaagccgacatccgtggcaaacctatacctgatgttgtttggtcaaaagatggaaaagaacttgaagaaacagctgctagaatggaaattaaatctactattcagaaaacaactcttgttgtcaaagactgtatacggactgatggaggacaatatattctgaaactcagcaatgttggtggtacaaagtctatacccatcactgtaaaggtacttgacaggccagggcctcctgaagggcctctgaaagttactggagttactgcggaaaaatgttacctggcatggaacccacctttgcaagatggtggtgctaatatttcacattacatcattgaaaagagggagacaagccgactctcttggacccaggtttcaactgaggtacaggcccttaactacaaagttactaaacttcttcctggtaatgagtacattttccgtgtcatggctgtgaataaatatggaattggagagcccttggaatctgggcctgttacggcctgtaatccttataagccaccaggtcctccctcaacacctgaagtctcagcaatcaccaaagattctatggtagtaacatgggcacgcccagtagacgacggaggtaccgaaattgagggctacattcttgaaaaacgagataaggaaggcgttagatggaccaagtgcaacaagaaaacattaacggatctgcggctcagggtaactggtcttaccgaaggccattcctatgaattcagagttgctgctgaaaatgcagctggtgtgggagaacctagtgagccatctgttttctaccgtgcgtgtgatgccttgtatccaccaggtcccccaagcaatccaaaagtgacggacacttccagatcttctgtctccctggcatggagtaagccaatttatgatggtggcgcacctgttaaaggctatgttgtagaggtcaaagaagctgctgcggatgaatggacaacctgcactccaccaacaggattacaaggaaagcagttcacagtgaccaagcttaaagaaaacactgaatataacttccgtatttgtgccatcaattctgaaggtgtaggtgaacctgcaactctacctggctcagtggttgctcaggagaggatagagccaccagaaatagaactcgatgctgatctcagaaaggtggtcgttctgcgtgcaagtgctactttacgcttatttgtcactatcaaaggtcgaccagaacccgaagttaaatgggaaaaggcagaaggcattctcactgacagggctcagatagaggtgaccagctcatttacaatgttggtgattgataatgttaccagatttgacagtggtcggtataatctgacattagaaaataatagtggctccaaaacagcttttgttaacgtcagagttcttgactcaccaagtgcccctgtgaatttgaccataagagaagtgaagaaagactcagtgacgttgtcctgggaaccaccacttattgatggtggagctaagattacaaactacattgtcgaaaaacgagaaactacaagaaaagcctatgctaccattacaaataattgcactaaaactactttcagaattgaaaatctacaagaaggatgttcttactacttccgagtcttggcttccaatgaatatgggattggtttgccagctgaaacaacagaacccgttaaagtgtctgaaccacccctcccacctggaagagtaactcttgttgatgtgacccgtaatacagctacaattaagtgggagaaaccagaaagtgatggtggcagcaaaattactggttatgtggttgaaatgcagactaaagggagtgaaaagtggagcacctgcacacaagttaagactctagaagcaactatatctggcttaactgcaggagaagagtatgtcttcagggtagctgcagttaacgaaaagggaagaagtgatccaagacaacttggagtgccagtaattgcaagggatattgaaataaagccttcagttgagcttcctttccatactttcaatgtaaaggctagagaacaacttaagattgatgtgccattcaaaggaagacctcaagctactgtgaactggagaaaagatggtcagactcttaaagagacaactagagtcaatgtttcttcttcaaagactgtaacatcactatctattaaggaagcttcaaaggaagatgttggaacttatgaattatgtgtttcaaacagtgctggatccataacagttcctattactataattgtccttgacagaccaggacctccaggtcctatacgtattgatgaggttagttgtgacagcataaccatttcttggaatcctccagaatatgatggtggctgccaaattagcaattacattgttgaaaagaaagaaaccacctctacaacatggcacatagtttcacaagcagttgcaagaacatccattaaaatagttcgcctgacaacaggaagtgagtatcagttccgtgtttgtgcagaaaaccgctatggaaagagctcctacagtgaatcttcagctgttgttgcagagtatccattcagtcccccaggtcctcctggtactcctaaagttgtgcatgccacaaaatctaccatgcttgtaacctggcaagtgccagttaatgatggaggaagtcgagtaattggctatcatcttgagtataaagaaagaagcagcattctttggtcaaaagcaaataaaatcctcattgctgatactcaaatgaaagtctccggccttgatgaaggactgatgtatgagtatcgtgtatatgctgaaaatattgctggaattggtaaatgcagtaaatcttgtgaaccagtccctgcaagagatccttgtgaccctcctggacaacctgaagtcacaaatatcacaagaaaatcagtgtcacttaaatggtctaaaccacattatgatggtggagctaagatcacaggatacattgttgaacgcagagaactaccagatggccggtggctgaagtgcaattatactaatatacaagaaacatactttgaagtaactgaacttactgaagatcagcgttatgaattccgggtttttgcaaggaatgctgctgactcagttagtgagccatctgaatccactgggcctattatagttaaagatgatgttgagcctccaagagttatgatggatgtcaagttccgagacgttattgttgtcaaagctggagaggtccttaagataaatgcagacattgcagggcgacctctgccagtaatttcctgggccaaggatggtatagaaattgaagaaagagcaagaacagaaatcatctcaacagacaatcatactttgttaacagttaaagactgtataagacgagacactgggcaatatgtactaacactgaagaatgttgccggcactcggtctgtggccgttaattgcaaagtacttgataagcctggtccaccagcaggaccacttgaaataaatggcctcactgctgagaaatgctctctttcctggggacgtccccaagaagatggtggtgcagatatcgactattacatcgtagaaaaacgtgaaacaagccaccttgcatggacaatatgtgaaggagagttacagatgacatcctgtaaagtaaccaagttactcaaaggcaatgaatatatatttagagtaactggtgttaataaatatggtgttggtgagcccctagagagtgtagctataaaggcactagatccatttacagttccaagtccacccacgtctttggaaattacttctgtgaccaaagaatctatgacactttgctggtcaagacccgagagtgatggaggtagtgaaatatctggatatataattgaaaggcgagagaaaaatagcctaagatgggtgcgtgtaaacaaaaaaccagtttatgatctaagagtgaaatcaacaggacttcgggaaggatgtgaatatgaatatcgtgtttatgcagaaaatgctgctggcctaagtcttccaagtgaaacctctcccttaattagggcagaagatccagtgttcctaccatctcctccatccaaacccaaaattgtggactcaggcaagacaactataactattgcctgggttaagccgctgtttgatggtggggccccgataactggatatactgtagaatacaaaaaatctgatgacactgactggaaaacttccattcagagcttacgagggacagaatatacaataagcggactaacaacaggagctgaatatgttttcagagtaaaatctgtcaataaggttggtgctagtgaccccagtgatagctctgaccctcagatagcaaaggaaagagaagaagaacctttatttgatattgacagtgaaatgaggaagaccttgattgtcaaggctggtgcctcatttaccatgactgtgcctttccgaggaagaccagtacccaatgtcttgtggagtaagccagacactgacctccgtactagagcttatgttgataccacagactcccgtacatcactgaccattgaaaatgccaacagaaatgactctggaaagtacacattaacaattcagaatgttttgagtgctgcttcactgaccttagttgtcaaagttttagataccccaggtcctccaaccaacattactgtgcaagatgtaaccaaagagtctgcagtgttatcctgggatgttcctgaaaacgatggtggagcaccagtgaagaattaccacatagaaaaacgtgaggccagcaagaaagcatgggtctctgtgaccaacaactgtaaccgcctctcctacaaagttaccaatttacaagaaggagctatctattacttcagagtctctggagaaaatgagtttggtgttggtataccagctgaaacaaaggaaggagtaaaaataacagaaaaaccaagcccacctgaaaaacttggagtaacaagtatatccaaagacagtgtttccctgacctggctgaagcctgaacatgatggcggaagcagaattgtacactatgtcgttgaagcactagaaaaaggacagaaaaactgggttaaatgtgcagtggcaaagtcaacccatcacgttgtttccggtctgagagagaattctgaatactttttccgagtgtttgctgaaaatcaagctggcctgagtgacccgagagagcttctgcttcctgttcttattaaggagcaactagaaccacctgaaattgatatgaagaatttcccaagtcacactgtatatgttagagctggttcaaaccttaaagttgacattccaatctctggaaaaccacttcccaaagtgaccttatcaagagatggtgtcccccttaaggcaaccatgagatttaataccgaaattactgctgagaacctgaccatcaatctcaaagaaagtgttacagctgacgctgggagatatgaaatcactgctgccaactccagtggtacaaccaaagctttcattaacattgttgtgctagacaggcctggtcctccaactggccctgttgttattagtgatataactgaagaaagtgtgactctcaaatgggagccacctaagtatgacggtggaagtcaagttaccaactacattctactcaaaagagaaacaagtactgcagtgtggactgaagtgtctgcaacagttgcaagaaccatgatgaaagtcatgaaactgaccacaggagaagaataccaattccgcatcaaggcagaaaaccgctttggcatcagtgatcatatagattcagcttgtgtgactgtcaaactaccatacacaacacctggaccaccatctacaccatgggtcactaatgttactcgagaaagcatcactgtgggctggcatgaaccagtgtcaaatggaggcagtgcagtcgtaggctatcacctggaaatgaaagacagaaacagtattttatggcaaaaagccaacaaactggtcatccgcacaactcacttcaaagtcacaacaatcagtgctggacttatttatgaattcagggtgtatgcagaaaatgctgctggagttggaaaacctagccatccttctgaaccagtcttggcaattgatgcttgtgaacccccaagaaatgttcgtatcactgatatttcaaagaactctgtcagcctttcatggcaacaaccagctttcgatggaggtagcaagattacaggctacattgttgagagacgtgaccttccagatggcagatggaccaaggccagcttcaccaatgttactgaaactcaattcatcatctctggcttgactcagaattcccagtatgaattccgtgtctttgctaggaatgctgttggttccattagcaatccatctgaggttgtagggcccattacttgcatcgattcttatggtggtcctgtaattgatttgcctctagaatatacagaagttgtcaaatacagagcaggtacatctgtgaagctcagagctggcatttctggcaaacctgcgcctactattgagtggtataaagatgataaagaattacaaaccaatgcactggtgtgtgttgaaaataccacggacctcgcatctatactcatcaaagatgccgatcgccttaatagtggatgctatgaattaaaactaaggaatgccatgggctcagcctcagccaccatcagagtacagatccttgacaaaccaggcccacctggtggaccaattgaatttaagactgtaactgctgagaagatcacccttctctggcggcctccagctgatgatggtggtgcaaaaatcactcactacattgtggaaaagcgtgagacaagccgcgttgtgtggtctatggtgtctgaacatttggaagagtgcatcattacaaccaccaaaattatcaaaggaaatgaatacatcttccgggtccgagccgtgaacaaatatggaattggcgagccactggaatctgattccgttgtagccaagaacgcatttgttacacctgggccaccaggcataccagaagtgacaaagattaccaagaattcgatgactgttgtatggagcaggccaattgcagatggcggtagtgatataagtggctatttccttgaaaaacgagacaagaagagcctaggatggtttaaagtactaaaagagactatccgtgacaccagacaaaaagtaacaggactcacagaaaacagtgactatcaatacagagtttgtgctgtaaacgctgctggacagggtccattttctgaaccatctgaattctacaaagctgctgatcctattgatcctccaggtccacctgctaagataagaatcgcagattcaaccaagtcatccatcacccttggctggagtaagcctgtctatgatgggggcagtgctgttactgggtatgttgtcgagataagacaaggagaggaagaggaatggactactgtctctaccaaaggagaggtcagaactacagaatatgtggtatccaacctgaaacctggagtcaattactacttccgggtatctgctgtaaactgtgctggacaaggagaacctatagaaatgaatgaacctgtacaagctaaagatatacttgaggcaccagagattgacctggatgtggctctcagaacttctgttattgccaaagctggtgaagatgtacaagtgttgattccctttaaaggcagacctccacctactgtcacatggagaaaagatgagaagaatcttggcagtgatgccagatacagcattgaaaacactgattcatcctcattactcaccattcctcaagttactcgcaatgatacaggaaaatatattctcacaatagaaaatggagttggtgaacctaagtcttcaactgtgagtgttaaagtgcttgacacaccagctgcctgccagaaactacaggttaaacatgtttctcgaggcacagtcactttgctctgggatcctcctctcattgatggaggatctccaataattaattatgtcattgaaaagagagatgccaccaagagaacatggtctgtcgtgtcacacaaatgttctagcacatccttcaagctaatagatttgtcggagaagactccattcttcttcagagttcttgcagaaaatgaaattggaattggggaaccctgtgaaactacagagccagtgaaggctgctgaagtaccagctcctatacgtgatctctcaatgaaagactcaacaaagacatctgtcatcctcagctggaccaaacctgactttgatggtggtagcgtcatcacagaatatgttgtagaaaggaaaggtaaaggtgaacagacgtggtcccacgctggcataagtaagacatgtgaaattgaggttagccaacttaaggagcagtcagtcctggagttcagagtgtttgccaaaaatgagaaaggactgagtgatcctgtcactattgggccaattacagtgaaagaacttattattacacctgaagttgacctgtcagatatccctggggcacaagtcactgtgagaattgggcacaatgtgcaccttgaattaccttataagggaaaacccaaaccatccatcagttggctgaaagatggcttgccactgaaagaaagtgaatttgttcgcttcagtaaaactgaaaacaaaattactttgagtattaagaatgccaagaaggagcatggaggaaaatacactgttattcttgataatgcagtgtgtagaattgcagtccccattacagtcatcacccttggcccaccatcaaagcccaaaggacccattcgatttgatgaaatcaaggctgatagtgtcatcctgtcatgggatgtacctgaagataatggaggaggagaaattacttgttacagcatcgagaagcgggaaacttcacaaactaactggaggatggtgtgttcaagtgttgccagaacgactttcaaagttcctaatctagtcaaagatgctgagtaccagtttagagtgagagcagaaaacagatacggagtcagccaaccacttgtctcaagcattattgtggcaaaacaccagttcaggattcctggtcccccaggaaagccagttatatacaatgtgacttctgatggcatgtcactaacttgggatgctccagtttatgatggtggttcagaagttactggattccatgttgaaaagaaagaaagaaatagcatcctctggcaaaaagttaatacatcaccaatctctggaagagaatatagagccactggactggtagaaggtctggattaccaattccgtgtatatgctgaaaattctgctggcctaagctcacctagtgacccaagcaaatttaccttagctgtttctccagtagacccacctggcactcctgactacattgatgtcacccgggaaaccatcacacttaaatggaacccaccattgcgtgatggaggcagtaagattgtgggctatagcattgagaaacggcaaggaaatgaacgctgggtgagatgcaactttactgacgtcagtgaatgtcagtacacagttacaggactcagtcctggggatcgctatgagttcagaataattgcaagaaatgctgttggaactataagcccgccctcacagtcttctggcattattatgacaagagatgaaaatgttccaccaatagtagagtttggccctgaatactttgatggtctcattattaagtccggagagagccttagaattaaagctttggtacaaggaagaccagtgcctcgagtaacttggttcaaagatggagtggaaatcgaaaagaggatgaatatggaaataaccgacgtacttggatccaccagcctatttgttagagatgctactcgggaccatcgtggtgtatacacagtggaagccaaaaatgcatctggttctgcaaaagcagaaattaaagtgaaagtacaagatacaccaggaaaagtagttgggccaataagattcaccaatattactggggagaagatgactctgtggtgggatgccccactcaatgacggttgtgctcccataacccactacatcattgaaaaacgggaaaccagcagacttgcctgggcactaattgaggataaatgtgaagcccaaagttacactgccattaaactaataaacggcaatgaataccaattccgtgtttctgcagttaacaagtttggtgttggcaggccacttgattctgatccagtggttgctcaaatacaatatactgttcctgatgcccctggcattccagaacctagcaacataacaggcaacagcattaccctgacatgggcaaggccagaatcagatggtggcagtgaaattcaacagtatatccttgaaagaagagaaaagaaaagcacaagatgggtaaaagtgatcagcaaacgaccaatctctgaaacaagattcaaagtcactggtctgacagaaggcaatgagtatgaattccatgtcatggctgaaaatgctgcaggagttggacctgcaagtggcatctcaagactcattaaatgtagagagcccgtcaacccaccaggtcctcccacagtggtcaaagtaacagacacatcaaagacaactgtgagcttagaatggtccaaaccagtgtttgatggtggcatggaaataattgggtatattattgaaatgtgtaaggccgacttaggagactggcacaaggtgaatgcagaggcatgtgtgaaaacaagatatacagtcactgatctacaagcaggtgaagaatacaaattccgagttagtgctatcaatggtgctggaaaaggcgacagctgtgaagtgactggcacaattaaagcagttgaccggttaacagctcctgagttagacatagatgcaaacttcaaacagactcatgttgttagagctggggccagtattcgcctcttcattgcctaccaaggtagacctactcctacagctgtgtggagcaaaccagactctaaccttagccttcgggctgatatccatacaacagattccttcagcaccctcactgtggaaaactgcaacagaaatgatgcagggaaatatacccttactgtggaaaacaacagtggtagtaagtcaatcacattcaccgtgaaagtgctagacactccaggcccacctggcccaattaccttcaaagatgtgacccggggatctgctacattgatgtgggatgcccctcttcttgacggtggtgcccgaatccatcattatgtggtagagaaacgagaggcaagtcgccgtagttggcaggttatcagtgaaaaatgcactcgtcagatcttcaaggtcaatgacctggccgaaggtgttccgtactatttccgtgtttctgcagtaaatgagtatggtgttggtgagccctatgaaatgccagaaccaattgtagccacagaacagcctgctccacctaggagacttgatgttgttgatactagcaaatcctccgcagtcttagcttggcttaaacctgaccacgatggaggcagccggatcactggctacctgcttgaaatgagacaaaagggatctgacttctgggttgaagctggtcacaccaaacagctaactttcacagtagagcgtcttgttgagaaaactgaatatgaattccgtgtgaaggccaagaatgatgctggctatagtgaacccagagaagccttctcttctgtcatcattaaggagcctcaaatcgagcccactgctgacctcactggaattaccaatcagcttataacttgcaaagcaggaagcccatttaccattgacgtaccaatcagtggtcgtcctgcccccaaagtaacatggaaactggaagaaatgagacttaaagagacagatcgagtgagcattacaacaacaaaagacagaaccacactgactgtaaaggacagcatgagaggtgactctggaagatacttcttgaccctggaaaatacagctggtgttaaaacatttagcgtcacagttgtggtcattggaaggccaggtccagtaaccggccccattgaggtctcatctgtctcagctgaatcgtgtgtcctgtcatggggagaacctaaagatggaggaggcactgaaattactaattacatagttgaaaagcgtgaatcgggtacaacagcttggcagcttgtcaattccagtgtcaagcgcactcaaattaaagtcactcatctcacaaaatacatggaatattctttccgtgtcagttcagagaacagatttggtgtcagcaaacctctagaatcagcaccaataattgctgaacatccatttgtcccaccaagcgctcctaccagacctgaggtctaccatgtgtctgccaatgccatgtctattcgttgggaagaaccctaccacgatggtggcagtaaaatcattggctactgggttgagaagaaagaacgtaatacaattctttgggtgaaagaaaacaaagtgccatgcttagagtgcaactacaaagtaactggtttagtagaaggactggaatatcagttcagaacttatgcactcaatgctgcaggtgttagcaaggccagcgaagcttcaagacctataatggctcaaaatccagttgatgcaccaggcagaccagaggtgacagatgtcacaagatcaacagtatcactgatttggtctgccccagcgtatgatggaggcagcaaggttgtgggctacatcatagagcgtaagccagtcagtgaggtaggagatggtcgctggctgaagtgcaactacaccattgtatctgacaatttcttcaccgtgactgctctcagtgaaggagacacttatgagttccgtgtgttagccaagaatgcagcaggcgtaattagcaaagggtctgaatctacaggccctgtcacttgccgagatgaatacgctccacccaaagccgaactggatgcccgattacacggtgatctggttaccatcagagcaggttctgatcttgttctggatgctgcagttggtggcaaacctgaacccaaaattatctggaccaaaggagacaaggagctagatctctgtgaaaaagtctctttgcagtatactggcaaacgagcaactgctgtgatcaagttctgtgacagaagtgacagtggaaaatacactttaacagtgaaaaatgccagcgggaccaaggccgtgtctgtcatggtcaaagtgcttgattcccctggcccatgtggaaagctcaccgtcagcagagtaacacaggagaagtgcactttagcctggagccttccgcaggaagacggaggagcagaaatcactcactacatcgtggaaagacgcgagactagcaggctcaactgggtgattgttgaaggcgaatgcccaaccctatcctatgtcgttaccaggctcatcaagaacaatgagtacatattccgagtgagggcagtaaacaaatatggccctggtgtgcctgttgaatcagagccaattgtagccagaaactcattcactattccatcaccacccggcatacctgaagaagttgggactggcaaagagcatatcatcattcagtggacaaaacctgaatctgatggtggcaatgaaatcagcaactacctagtagacaaacgtgagaagaagagcctgcgctggacacgtgtcaacaaagactatgtggtgtatgataccaggctgaaggtgaccagcctgatggagggttgtgattaccagttccgggtgaccgcagtgaatgcagctggtaacagtgagcccagcgaagcttccaacttcatctcatgcagagaaccatcatatacccctggaccaccttctgctccaagagttgtggataccaccaaacacagcattagtttggcatggaccaaacccatgtacgatggtggtactgacattgtaggatatgttctggaaatgcaagagaaggacactgatcagtggtaccgagtgcataccaatgccacaataagaaatactgaattcactgtgccagaccttaaaatgggccagaaatattccttcagagttgctgccgtgaacgtgaagggtatgagcgaatacagcgaatcaattgctgaaattgagcccgtggaaagaatagaaataccagatcttgagcttgcagatgatctaaagaagactgtgaccatcagggctggggcctccttgcgcttgatggtgtctgtatctggaagaccacctcctgtcataacgtggagcaagcagggcattgaccttgcaagccgggcaattattgacaccactgagagctactcattgctaatagtggacaaagttaatcggtacgatgctggaaaatacacaattgaagctgaaaaccaatctggcaagaaatcagcaacagtccttgttaaagtctatgatactcctggtccctgtccttcagtgaaagttaaggaagtatcaagagattctgtgactataacttgggaaattcccacgattgatggtggagctccagtcaacaattacatcgttgagaagcgtgaagctgctatgagagcattcaaaacagtaactaccaaatgcagcaagacactttacagaatttctggacttgtagaaggaaccatgtactatttcagagtgctgccagaaaatatttatggcattggagaaccttgtgaaacatctgatgcagtactggtctcagaagtgcctttggtgcctgcaaagctagaagtggtcgatgtcaccaaatccactgttacccttgcctgggaaaaaccactctacgatggtggtagccgactcactggatatgttctcgaggcctgcaaagctggcacagagagatggatgaaggttgtcaccttaaaacccacagtcctagagcacactgttacttccttaaatgaaggtgaacaatacttatttagaataagggcacaaaatgagaaaggtgtgtcagaaccaagagagactgtcacagccgtgactgtacaagacctcagagtgttgccaacaatcgatctttctacaatgcctcagaagaccatccatgtcccagctggcagaccagtagagctggtgatacctattgctggccgtccacctcctgctgcttcctggttctttgctggttctaaactgagagaatcagagcgtgtcacagttgaaactcacactaaagtagctaaattaaccatccgtgaaaccactatcagagatactggagaatacacacttgaattgaagaatgttaccggaactacttcagaaaccattaaagttatcattcttgacaagcctggtccaccaacaggacctattaagattgatgaaattgatgctacatcaattaccatttcctgggaaccacctgaattggacggtggtgctccactgagtggttatgtggtagaacaacgtgacgctcatcgtccaggatggctgcccgtttctgaatcagtgactaggtccacgtttaagtttaccagactcaccgaaggaaatgagtatgtgttccgtgtggctgcaacaaaccgcttcgggattggctcttacttgcagtctgaggtcatagagtgtcgcagcagcatccgtattcctggacccccagaaacattacagatatttgatgtttcccgtgatggcatgacacttacttggtacccaccagaggatgacggtggctcccaagtgactggatatattgtggagcgcaaagaagtgagagcagatcgatgggtccgtgtaaataaagtacctgtgacaatgacacggtaccgctccactggccttactgaaggcttagaatatgaacaccgtgtcacagccattaatgcaagagggtctgggaaaccaagtcgtccttccaaacccatcgttgccatggatccaattgctcctccaggaaagccacaaaacccaagagttactgatacaacaaggacatcagtctccctggcctggagtgttccagaagatgaaggaggatctaaagtcacaggctacttgattgaaatgcaaaaagtagatcaacatgaatggaccaagtgtaacaccactccaaccaagattcgagagtatactctaacacacctacctcagggtgcagaatacaggttccgcgtcctagcttgtaatgctggtggacctggtgagcctgctgaggtaccaggaacagtcaaagtcactgaaatgcttgaatatcctgattatgaacttgatgaaagataccaagaaggtatctttgtaaggcaaggtggcgtcatcagacttaccataccaatcaaaggaaaaccattcccaatatgtaaatggaccaaggaaggccaggatattagtaagcgtgccatgattgcaacatctgaaacacacactgagcttgtgatcaaagaagcagacaggggtgattctggcacttatgacctggttctggaaaataaatgtggcaagaaggctgtctacatcaaggtcagggtgataggaagtcccaacagtccagaagggccactggaatatgatgacatccaagtccgctctgtgagggtcagctggagacctcctgctgatgatggtggtgctgacatcttaggctacatcctcgagagacgagaagtgcctaaagccgcctggtataccattgattccagagtccgaggtacatctctggtggtaaaaggcctcaaagagaatgtagaataccatttccgtgtttcagcagaaaaccagtttggcataagcaaacccttgaaatctgaggaaccagtcacaccaaaaacaccattgaatcctccagaacctccaagcaatcctccagaagtactcgatgtaaccaagagttctgttagcttgtcctggtcccggcccaaagatgatggtggttctagagtcacaggctactacatcgaacgcaaagagacatccactgacaagtgggtcagacacaacaagactcagatcaccaccacaatgtacactgtcacagggcttgttcccgatgctgagtatcagttccgcatcatcgcacagaatgatgttggcctgagtgagaccagccctgcttctgaaccagttgtttgcaaagatccatttgataaaccaagccaaccaggagaacttgagattctttcaatatccaaagatagtgtcactctacagtgggagaaacctgaatgtgatggtggtaaagaaattcttggatactgggttgaatatagacagtctggagacagtgcctggaagaagagcaataaggaacgtattaaggacaagcaattcacaataggaggtttgctggaagctactgagtatgaattcagggtttttgctgagaatgagactgggctgagcagacctcgcagaactgctatgtctataaagactaaactcacatctggagaggccccaggaatacgcaaagaaatgaaggatgttaccacaaaattgggtgaagctgctcaactctcatgccagattgttggaaggcctcttcctgacattaaatggtacagatttggtaaagagctcatacaaagccggaaatacaaaatgtcttcagatggacgcacacacactcttacagtaatgacagaggaacaggaagatgaaggtgtttatacctgcatagccaccaatgaggttggagaagtagaaaccagtagtaagcttctcctgcaagcaacaccgcagttccatcctggttacccactgaaagagaaatattatggagctgtgggttccacacttcggcttcatgttatgtacattggtcgtccagtacctgccatgacttggttccatggtcagaaacttttgcaaaactcagaaaacattactattgaaaacactgagcactatactcatcttgtcatgaagaatgtccaacgtaagactcatgctgggaaatacaaagtccagctcagcaatgtttttggaacagttgatgccatccttgatgtggaaatacaagataaaccagacaaacctacaggaccaattgtgatcgaagctctattgaagaactccgcagtgatcagctggaaaccacccgcagatgacggaggctcctggatcaccaactatgtggtggaaaaatgtgaggccaaggagggggctgaatggcaattggtgtcttcagccatctcagtgacaacctgtagaattgtgaacctcacagaaaatgctggctattacttccgggtttcagctcagaacactttcggcatcagtgaccctctagaagtgtcctcagttgtgatcattaagagtccatttgaaaagccaggtgctcctggcaaaccaactattactgctgtcacaaaagattcttgtgttgtggcctggaagccacctgccagtgatggaggtgcaaagattagaaattactaccttgagaagcgtgagaagaagcagaataaatggatttctgtgacaacagaagaaattcgagaaactgtcttttcagtgaaaaaccttattgaaggtcttgaatacgagtttcgtgtgaaatgtgaaaatctaggtggggaaagtgaatggagtgaaatatcagaacccatcactcccaaatctgatgtcccaattcaggcaccacactttaaagaggaactgagaaatctaaatgtcagatatcagagcaatgctaccttggtctgcaaagtgactggtcatccaaaacctatcgtcaaatggtacagacaaggcaaagaaatcattgcagatggattaaaatataggattcaagaatttaagggtggctaccaccagctcatcattgcaagtgtcacagatgatgatgccacagtttaccaagtcagagctaccaaccaagggggatctgtgtctggcactgcctccttggaagtggaagttccagctaagatacacttacctaaaactcttgaaggcatgggagcagttcatgctctccgaggtgaagtggtcagcatcaagattcctttcagtggcaaaccagatcctgtgatcacctggcagaaaggacaagatctcattgacaataatggccactaccaagttattgtcacaagatccttcacatcacttgttttccccaatggggtagagagaaaagatgctggtttctatgtggtctgtgctaaaaacagatttggaattgatcagaagacagttgaactggatgtggctgatgttcctgacccacccagaggagtcaaagttagtgatgtctcacgagattctgtcaacttaacatggactgagccagcctctgatggtggcagcaaaatcaccaactacattgttgaaaaatgtgcaactactgcagaaagatggctccgtgtaggacaggcccgagaaacacgttataccgtgatcaacttatttggaaaaacaagttaccagttccgggtaatagctgaaaataaatttggtctgagcaagccttcagagccttcagaaccaaccataaccaaagaagataagaccagagctatgaactatgatgaagaggtagatgaaaccagggaagtctccatgactaaagcatctcactcttcaaccaaggaactctatgagaaatatatgattgctgaagatcttgggcgtggtgagtttggaattgtccatcgttgtgttgaaacatcctcaaagaagacatacatggccaaatttgttaaagtcaaagggactgatcaggttttggtaaagaaggaaatttccattctgaatattgctaggcatagaaacatcttacacctccatgaatcatttgaaagcatggaagaattagttatgatctttgagtttatatcaggacttgacatatttgagcgcattaacacaagtgcttttgaacttaatgaaagagaaattgtaagttatgttcaccaggtctgtgaagcacttcagtttttacacagtcataatattggacactttgacattagaccagaaaatatcatttaccaaaccagaagaagctctaccattaaaatcatagaatttggtcaagcccgtcagctgaaaccaggggacaacttcaggcttctattcactgccccagaatactatgcacctgaagtccaccagcatgatgttgtcagcacagccacagacatgtggtcacttggaacactggtatatgtgctattgagtggtatcaacccattcctggctgaaactaaccaacagatcattgagaatatcatgaatgctgaatatactttcgatgaggaagcattcaaagagattagcattgaagccatggattttgttgaccggttgttagtgaaagagaggaaatctcgcatgacagcatcggaggctctccagcacccatggttgaagcagaagatagaaagagtcagtactaaagttatcagaacattaaaacaccggcgttattaccacaccctgatcaagaaagacctcaacatggttgtgtcagcagcccggatctcctgtggtggtgcaattcgatctcagaagggagtgagtgttgctaaagttaaagtggcatccattgaaattggcccagtttctgggcagataatgcatgcagttggtgaagaaggaggacatgtcaaatatgtatgcaaaattgaaaattatgatcagtctacccaagtgacttggtactttggcgtccgacagctggagaacagtgagaaatacgaaatcacctacgaagatggagtggccatcctctatgtcaaagacattaccaaattagatgatggtacctacagatgcaaagtagtcaatgactatggtgaagacagttcttatgcagagctatttgttaaaggtgtgagagaagtctatgactattactgccgtagaaccatgaagaaaattaagcgcagaacagacacaatgagactcctggaaaggccaccagaatttaccctgcctctctataataagacagcttatgtaggtgaaaatgtccggtttggagtaactataactgtccacccagagcctcatgtaacatggtataaatcaggtcagaaaatcaaaccaggtgacaatgacaagaagtacacatttgagtcagacaagggtctttaccaattaacaatcaacagtgtcactacagatgatgacgctgaatatactgttgtggcaaggaacaaatatggtgaagacagctgtaaagcaaagctgacagtaaccctacacccacctccaacagatagtaccttaagacccatgttcaaaaggttactggcaaatgcagaatgccaagaaggccaaagtgtctgctttgagatcagagtgtctggcatccccccaccaacattaaaatgggagaaagatggtcagccactgtccctcgggcctaacattgaaattatccatgaaggcttggattattatgctctgcacatcagggacactttgcctgaagacacgggttattatagagtcacagccactaacacagctgggtccaccagctgccaggctcacctacaagtggaacgcctgaggtacaagaaacaggaattcaagagtaaggaggagcatgagcgacacgtacaaaaacaaattgacaaaaccctcagaatggctgaaattctttctggaactgaaagtgtaccactgacacaggtagctaaagaggctctgagagaagctgctgtcctttataaaccggctgtaagcaccaagactgtaaaaggggaattcagacttgagatagaagaaaagaaggaggagagaaaactccggatgccttatgatgtaccagagccacgcaagtataagcagactaccatagaagaagaccaacgcatcaagcagttcgtgcccatgtctgacatgaagtggtataaaaagatacgtgatcagtatgaaatgcctgggaaacttgacagagttgtacagaaacgacccaagcgcatccgcctttcaagatgggaacagttctatgtgatgcctcttccacgcattacagatcaatacagacctaaatggcgtattcctaaactgtcccaagatgatcttgagatagtgagaccagcccgccggcgtacaccttctcctgattatgacttttactaccgacctagaagacgttctcttggggacatctctgatgaagaattactcctccccattgatgactacttagcaatgaaaagaacagaggaagagaggctgcgtcttgaagaagagcttgagttaggtttttcagcttcacccccaagtcgaagccctccacactttgagctttctagcctacgttactcttcaccacaagctcatgtcaaggtggaggaaacaagaaaagacttcaggtattcaacctatcacatcccaacgaaggctgaagctagtacaagttatgcagaactgagggaacggcatgcccaggctgcgtacagacagccaaagcaacggcaaagaatcatggctgagagggaggatgaagagttgcttcgcccagttacgaccacccagcatctctcagaatacaaaagcgaacttgacttcatgtcaaaggaggaaaagtctagaaagaaatcaaggcgacaaagagaagtgacagaaataacagaaattgaggaagaatacgaaatctcaaaacatgctcaaagagaatcatcctcatctgcgtctagactactgagacgacggcgctccctgtctccaacttatattgagttaatgaggccagtgtctgagctgatccggtcacgtccacaaccggctgaggaatacgaagatgacacagaaagaaggtcacctactccagagagaactcgcccacgatcccccagccctgtgtctagtgagagatcactctcgagatttgagaggtctgcaagatttgatatcttttccaggtatgagtccatgaaagctgctttaaaaactcagaagacatcagaaaggaagtatgaagttttgagtcagcagcctttcacactggaccatgcccctcgaatcacactgagaatgcgctcgcacagggtaccatgtggccaaaatacacgttttattttaaatgttcagtctaagccaactgccgaggttaaatggtaccacaatggtgtggaactccaagaaagcagtaagattcattacaccaacacgagtggagtcctcaccctggaaattctggactgtcatactgatgacagtggaacctaccgtgctgtgtgcaccaactacaagggcgaagcttctgactatgcaacgttggacgtgacaggaggggattataccacctatgcttcccaacgcagagatgaagaggtccccagatctgttttccctgagctgacaagaacagaggcgtatgctgtttcatcatttaagaaaacatctgagatggaagcttcgtcttctgtcagggaagtgaaatcacagatgacggagacaagggaaagtctctcctcatatgaacactctgcatctgcagaaatgaaaagtgctgcattagaagaaaagtcactggaagaaaaatccacaaccagaaagatcaagacgactttggcagcaagaattctaacaaagccacggtccatgaccgtctacgagggcgagtctgcaaggttttcttgtgacaccgatggtgagccggtaccaactgtgacctggctgcgtaaaggacaagtgctaagtacttctgcccgccaccaagtgaccaccacaaagtacaaatcaacctttgagatctcttcagtccaggcttccgatgagggcaattacagcgtggtggtagaaaacagtgaagggaaacaagaagcagagttcactctgactattcaaaaggccagggtaactgaaaaggctgtgacatcaccaccaagagtcaaatccccagagcctcgggtgaaatccccagaagcagttaagtctccaaaacgagtgaaatctccagaaccttctcacccgaaagccgtatcacccacagagacaaaaccaacaccaacagagaaagttcagcacctcccagtctctgccccaccaaagattactcagttcctgaaagcagaagcttctaaagagattgcaaaactgacctgtgtggttgaaagcagtgtattaagggcaaaagaggtcacctggtataaagatggcaagaaactgaaggaaaatgggcatttccagtttcattattcagcagatggtacctatgagctcaaaatcaataacctcactgaatctgatcaaggagaatatgtttgtgagatttctggtgaaggtggaacgtctaaaaccaacttacaatttatggggcaagcctttaagagtatccatgagaaggtatcaaaaatatcagaaactaagaaatcagatcagaaaaccactgagtcaacagtaaccagaaaaactgaaccaaaagctcctgaaccaatttcctcaaaaccagtaattgttactgggttgcaggatacaactgtttcttcagacagtgttgctaaatttgcagttaaggctactggagaaccccggccaactgccatctggacaaaagatggaaaggccattacacaaggaggtaaatataaactctctgaagacaagggagggttcttcttagaaattcataagactgatacttctgacagtggactttatacttgtacagtaaaaaattcagctggatctgtgtcctctagctgcaaattaacaataaaagctataaaagatactgaggcacagaaagtctctacacaaaagacttctgaaattacacctcagaagaaagctgttgtccaagaggaaatttcccaaaaagccctaaggtctgaagaaattaagatgtcagaggcaaaatctcaagaaaagttagccctcaaagaggaagcttcaaaggttctgatttctgaagaagtcaagaaatcagcagcaacctccctggaaaaatccattgtccatgaggaaatcactaaaacatcacaggcatcagaagaagtcagaactcatgctgagattaaagcattttctactcagatgagcataaacgaaggtcaaagactggttttaaaagccaacattgctggtgccactgatgtgaaatgggtactgaatggcgtagagcttaccaactctgaggagtaccgatatggtgtctcaggcagcgatcagaccctaaccatcaagcaagccagtcacagagatgaaggaatcctcacctgcataagcaaaaccaaggaaggaatcgtcaagtgtcagtatgatttgacactgagcaaagaactctcagatgctccagccttcatctcacagcctagatctcaaaatattaatgaaggacaaaatgttctctttacttgtgaaatcagtggcgagccatcccctgaaatcgaatggtttaaaaacaacctgccaatttctatttcttcaaatgtcagcataagccgctccagaaatgtatactcccttgaaatccgaaatgcatcagtcagcgacagtggaaagtacacaattaaggccaaaaatttccgtggccagtgttcagctacagcttccttaatggtccttcctctagttgaagaaccttccagagaggtagtattgagaacaagtggtgacacaagcttgcaaggaagcttctcgtctcagtcagtccaaatgtctgcctccaagcaggaggcctccttcagcagtttcagcagcagcagtgctagcagcatgactgagatgaaatttgcaagcatgtctgcccaaagcatgtcctccatgcaagagtcctttgtagaaatgagttccagcagctttatgggaatatctaatatgacacaactggaaagctcaactagtaaaatgcttaaagcaggcataagaggaattccgcctaaaattgaagctcttccatctgatatcagcattgatgaaggcaaagttctaacagtagcctgtgctttcacgggtgagcctaccccagaagtaacatggtcctgtggtggaagaaaaatccacagtcaagaacaggggaggttccacattgaaaacacagatgacctgacaaccctgatcatcatggacgtacagaaacaagatggtggactttataccctgagtttagggaatgaatttggatctgactctgccactgtgaatatacatattcgatccatttaagagggcctgtgcccttatactctacactcattcttaacttttcgcaaacgtttcacacggactaatctttctgaactgtaaatatttaaagaaaaaaaagtagttttgtatcaacctaaatgagtcaaagttcaaaaatattcatttcaatcttttcataattgttgacctaagaatataatacatttgctagtgacatgtacatactgtatatagccggattaacggttataaagttttgtaccatttattttatgacattttacaatgtaagttttgaaactaactgttggtaggagaaagtttcttatggaacgaataccctgctcaacatttaatcaatctttgtgcctcaacatactgttgatgtctaagtatgcctcagtgggttgagaaaatccccattgaagatgtcctgtccacctaaaagagaatgatgctgtgcatatcacttgatatgtgcaccaatacctactgaatcagaaatgtaaggcattggtgatgtttgcatttaccctcctgtaagcaacactttaacgtcttacattttctctgatgatgtcacacaaaattatcatgacaaatattaccagagcaaagtgtaacggccaacactttgttcgctcattttacgctgtctctgacataaggagtgcctgaatagcttggaaaagtaacatctcctggccatcccttcatttaaccaagctattcaagtattcctatgccagagcagtgccaactcttggaggtcccagagtgcagccaatgcctttgtgtggtagttctaaattttaattgcacctgaaaaacctgggcacctaagcaatgagccacagcaaaaagtaaagaacaacaacaaaataaagctgttgttaaattttaaacaatattactaattgcccaaaatgtcaatttgatgtagttcttttcatgcaagtataaattcaattgttagttataattgttggacctccttgagatagtaacaacaaaataaagcaagctatctgcacctcaaaa

SEQ ID NO: 12698 - DNA, 82027 bp, Homo sapiens
agcagtcgtgcattcccagcctcgcctcgggtgtagggattgcatagaaaagcaaaactacacagtcttgactgtgtagttttgtttttaggattagaggctcaccgattcatgtcggagatggtcagaaaaaccaactctccataggacgtcgtttcagaagcaaccttgggcttagtcccaccctttttaggcactcttgagaaatcaagtgcctagaaagatgacaactcaagcaccgacgtttacgcagccgttacaaagcgttgtggtactggagggtagtaccgcaacctttgaggctcacattagtggttttccagttcctgaggtgagctggtttagggatggccaggtgatttccacttccactctgcccggcgtgcagatctcctttagcgatggccgcgctaaactgacgatccccgccgtgactaaagccaacagtggacgatattccctgaaagccaccaatggatctggacaagcgactagtactgctgagcttctcgtgaaagctgagacagcaccacccaacttcgttcaacgactgcagagcatgaccgtgagacaaggaagccaagtgagactccaagtgagagtgactggaatccctacacctgtggtgaagttctaccgggatggagccgaaatccagagctcccttgatttccaaatttcacaagaaggcgacctctacagcttactgattgcagaagcataccctgaggactcagggacctattcagtaaatgccaccaatagcgttggaagagctacttcgactgctgaattactggttcaaggtgaagaagaagtacctgctaaaaagacaaagacaattgtttcgactgctcagatctcagaatcaagacaaacccgaattgaaaagaagattgaagcccactttgatgccagatcaattgcaacagttgagatggtcatagatggtgccgctgggcaacagctgccacataaaacacctcccaggattcctccgaagccaaagtcaagatccccaacaccaccgtctattgctgccaaagcacagctggctcggcagcagtccccatcgcccataagacactccccttccccggtcagacacgtgcgggcaccgaccccatctccggtcaggtccgtgtctccagcagcaagaatctccacatcccccatcaggtctgttaggtctccattgctcatgcgtaagactcaggcatccaccgtggccacaggtcctgaagtgcctcccccttggaagcaagagggctacgtggcctcctcatctgaggctgagatgagagagacaacgctgacaacctctactcagatcaggacagaagagagatgggaagggagatacggtgtccaggagcaagtgaccatcagtggtgctgcgggtgctgccgccagtgtgtcggccagtgctagctacgcagcagaggctgttgccactggtgctaaagaggtgaaacaagatgctgacaaaagtgcagctgttgcgactgttgttgctgccgttgatatggccagagtgagagaaccagtgatcagcgctgtagagcagactgctcagaggacaaccacgactgctgtgcacatccaacctgctcaagaacaggtaagaaaggaagcggagaagactgctgtaactaaggtagtagtggccgccgataaagccaaggaacaagaattaaaatcaagaaccaaagaagtaattaccacaaagcaagagcagatgcacgtaactcatgagcagataagaaaagaaactgaaaaaacatttgtaccaaaggtagtaatttccgcagctaaagccaaagaacaagaaactagaatttctgaagaaattactaagaaacagaaacaagtaactcaagaagcaataatgaaggaaactaggaaaacagttgtacctaaagtcatagttgccacacccaaagtcaaagaacaagatttagtatcaagaggtagagaaggcattactaccaaaagagaacaagtgcaaataactcaggagaagatgagaaaggaagccgagaaaactgccttgtctacaatagcagttgctactgctaaagccaaagaacaagaaacaatactgagaactagagaaactatggctactagacaagaacaaatccaagttacccatggaaaggtggacgttggaaaaaaggctgaagctgtagcaacagttgttgctgcagtagaccaggcccgagtcagagagcccagagagcctgggcatcttgaagaatcctatgctcagcagaccactttggagtacggatataaggaacgcatttccgccgcaaaggtagctgagcctccccaacgtccagcctcagaaccccacgttgtccctaaagcagtcaagcctagagtaatccaggctccttctgagactcatatcaaaactactgatcaaaagggaatgcacatatcatcacagatcaagaaaactacagatctaacaacggaaagattagtccatgtggataaacgcccccgcacagctagccctcactttactgtttcaaaaatttctgttcctaagacagaacatggatatgaggcatcaatagccggtagtgctattgccacattacaaaaagagttgtcagccacatcttctgctcagaagatcaccaaatcggtgaaggctcctactgtgaagcccagtgagactagagtaagggcagagcccacacccttgccacagttccccttcgctgacacaccagatacttacaagagtgaagctggcgttgaggtgaaaaaggaagtaggggtgagcatcactggcaccaccgtccgtgaagagcgctttgaagtactgcacggacgcgaagccaaggtaacagaaacagcaagagtaccagcacctgttgaaattcctgttactccaccaactttggtctcgggcttaaaaaatgtgactgtcatagaaggtgaatctgtcaccttggagtgccacatctctggatacccatccccgacagtgacatggtacagggaagactaccaaatcgaaagttccattgacttccagataaccttccagagtggaattgctcgtcttatgattcgcgaagcatttgcggaagacagcgggcgatttacttgcagtgctgtaaatgaggctggaaccgtcagcacatcctgctatctggctgtgcaggtgtcagaagaatttgaaaaggaaaccacagccgtgactgagaaatttactacagaagagaaacgctttgttgagtcaagagatgtggttatgactgatactagcctcacagaggaacaagcagggcctggagaacctgccgcgccttactttattacaaaaccagtggtccagaaactggtggaaggtgggagcgtggtgtttggatgccaagttggcggcaacccaaagccccatgtatactggaaaaaatctggtgttcctctaaccactggatacagatacaaagtgagttacaacaaacaaaccggtgaatgcaagctggtgatttctatgacttttgctgatgatgctggagaatacactattgttgttcgcaataagcatggagaaacttctgcatctgcttccttgcttgaagaagctgattatgagttactgatgaagtcccagcaagaaatgctttatcagacacaagtgactgcatttgttcaagaacctaaagttggagaaacagcacctggatttgtatactctgagtatgaaaaagagtatgaaaaagaacaagccttaattaggaagaaaatggccaaagatactgtagtggtcagaacttatgtagaagatcaggaattccatatttcttcctttgaagagagacttattaaagaaattgaatatagaataataaagactacattagaagaacttcttgaagaagatggagaagaaaagatggcagttgacatttctgaatctgaagctgttgaatcaggatttgatttaagaatcaagaattatagaattcttgaggggatgggtgtcacttttcattgcaagatgtctggatatccattaccaaagattgcttggtacaaagatggcaagcgcatcaaacatggagaaagataccaaatggactttctacaagatggcagagctagtctgcgtatacctgttgttcttccagaagatgaaggaatctacactgcatttgccagcaatattaaaggaaatgcaatttgctcagggaaattgtatgtggagcctgctgcaccacttggagctccgacttacattcccacactagagccagtgagcagaatcagatctctctctccacgttcagtgagcaggtctcctatacgcatgtctcctgcacggatgtcacctgcaaggatgtctcctgcacggatgtcccctgcaagaatgtcccctggacgtaggctggaggagacagatgagtcacaacttgagagactatataaaccagtctttgtgttaaaacctgtttctttcaaatgtttagaagggcaaactgccagatttgacttaaaggttgttggtagacctatgccagagacgttctggtttcatgatggccagcaaattgtcaatgactatacccataaagtagtcattaaagaagatggtactcaatcactaattattgtccctgccacacccagtgattctggggaatggactgtggttgcccaaaacagggcaggcagatcttcaatttcagtgattttaactgtggaagctgtggaacatcaggtaaaaccgatgtttgtagaaaaactgaaaaatgtcaatataaaggaaggttcccgacttgaaatgaaagtcagagctacgggtaaccccaaccctgacattgtatggttgaaaaacagtgacatcattgtgcctcataaatatcccaaaatcagaattgaaggaaccaagggagaagctgcccttaaaatcgattccactgtcagccaagattctgcctggtatactgcgactgctattaataaagctggcagagacactacaagatgcaaagtaaatgttgaagttgagtttgcagagcctgagccagagagaaagttaatcatcccacgggggacatatagagcaaaggagattgcagccccagaactggagcccctccatttgcgatatggccaagagcaatgggaagaaggtgatctctatgacaaagagaaacaacagaaaccatttttcaagaaaaaactcacttccttaagacttaagcgctttgggcctgcccactttgaatgcaggctaacacccattggtgacccaacgatggtggtggagtggctccatgatggaaagccacttgaagcagccaacaggctccgtatgatcaatgaatttgggtactgcagccttgattatggcgttgcatattctagagacagtggtatcattacttgcagagccactaacaaatatggaacagatcacacatctgctacccttattgttaaagatgagaaaagtcttgtggaagaatcccaattgcctgaggggaggaaaggcttacagagaattgaagaattagagagaatggctcatgaaggtgcacttacaggtgtaacaacagatcagaaagaaaagcaaaagccagacattgtcttgtacccagagccagttagagtacttgaaggggagactgcaaggttccgctgcagggtaacaggctaccctcagcccaaagtcaactggtacctcaatggacagctcatccgcaaaagcaaaaggttcagagttcgctatgatggtatccattacctggacatcgtggactgcaaatcatatgacacaggtgaagtgaaggtcaccgcggaaaatcctgaaggtgtgatagagcataaagtgaagcttgagattcaacagagggaagattttaggtctgtccttaggagagctcctgaaccaaggcctgagtttcacgtacatgaaccaggaaagcttcagtttgaagtacaaaaagtggatagacctgttgacaccactgaaaccaaagaagttgtgaagttgaaaagggctgaaagaattacccatgaaaaagtgcctgaagagtcggaagagctgcgcagtaaattcaagcgcagaacagaagagggctattatgaagccattaccgctgtggagctcaagtctcgaaagaaggatgaatcctatgaggaactcctcaggaagacaaaagatgaacttctccactggaccaaagagttaactgaagaggaaaagaaagctcttgccgaagaaggcaaaatcacgattccaacttttaaacctgacaagattgaactaagtcctagtatggaggctccaaaaatcttcgaaagaatccagagccaaacagtgggccaaggatctgatgcacacttccgggtcagagtcgtggggaaaccagaccccgaatgtgaatggtacaaaaatggtgtcaaaattgaacggtctgaccggatctactggtactggcccgaagacaatgtttgtgaattggtcataagagatgtgactgctgaggactctgccagcatcatggtaaaagccatcaacatagctggagaaacctccagtcacgcattcttacttgtccaagccaagcaattgatcactttcacacaggaattacaagatgttgttgctaaggaaaaagacactatggcaacctttgaatgtgaaacttcagaaccatttgtcaaagtgaaatggtataaagatggtatggaggttcatgagggagataaatacaggatgcactctgacagaaaggttcacttcctctccatactgaccattgatacgtctgatgctgaagattacagctgtgtacttgtggaagatgaaaatgtcaaaacgactgctaaacttattgttgaaggtgcagttgttgagtttgtgaaagaacttcaggacatagaagttccagaatcatattcaggagaattagagtgcattgtatccccagaaaatatagaaggaaaatggtatcataatgatgtggagcttaaatccaatggcaaatatacaattacatctcgtcgtggacgtcagaacctcacggtcaaggatgtaaccaaggaggaccagggagaatacagctttgtcatcgacgggaaaaagacaacctgtaaattaaagatgaaaccccgccccattgctatcctacaaggacttagtgaccaaaaagtctgtgagggtgacattgttcagcttgaagttaaagtctccttggaaagtgtggaaggcgtctggatgaaagacggccaagaagtgcagcccagtgacagggttcacattgtgatagacaaacaatctcatatgctgctcattgaagacatgactaaggaagatgctggaaattactctttcaccattccagcccttggcctctccaccagtgggcgtgtctctgtctatagtgtggacgtgataacacctctaaaagatgttaatgtgattgaaggcaccaaggctgtgcttgaatgtaaggtgtcagtccctgatgtgacttctgttaagtggtacttaaatgatgaacaaatcaagcctgatgaccgtgtacaggccattgtgaaaggtactaaacagcgactagtcattaaccgaactcatgcttcagacgaaggaccttacaagctgatagttggcagagttgaaaccaactgtaatctctctgtagaaaaaattaaaattatcagaggtcttcgtgaccttacctgtacagaaactcaaaatgtggtgtttgaggttgagctgtcccactctggaattgatgtcctgtggaattttaaggacaaggaaatcaagcccagttctaaatataaaattgaagcacatggaaaaatatataaattgacagttctaaatatgatgaaagatgatgaaggaaaatacacattttacgcgggagaaaatatcacatctggaaaacttactgtggcaggtggggccatctccaagccactcacagatcagaccgtagctgaatcccaggaagctgtgtttgaatgtgaagttgccaacccagattccaaaggcgaatggttgagggatggcaaacacctaccactgactaacaacatcagaagtgagtctgatggccacaaaaggagacttatcattgctgccaccaaattagatgacattggagaatatacctacaaggtggccacctccaaaacatctgccaaactcaaagttgaagctgtcaaaattaagaagactctgaagaacctcacagtgacagaaacacaggatgctgttttcactgtcgagcttacacaccctaatgtcaaaggtgtccagtggatcaaaaatggagttgtgctggaatccaatgaaaagtatgctatctctgtcaaaggaacaatttactctctgaggattaaaaactgtgccatcgtggatgagtctgtttatggcttcaggcttggaaggcttggagccagtgccagactgcacgtggagactgtcaagatcattaaaaagccaaaggatgtgacagccttggaaaatgccactgttgcctttgaagttagtgtttcccatgacactgttccagtaaaatggttccataagagtgtggaaattaagccaagtgacaaacacagactggtctcagaaaggaaagtccacaagctgatgctgcagaacatctccccctcagatgctggggaatacacagctgtggtcgggcaattggaatgcaaagcaaaactgtttgtggagacattacatattacaaaaaccatgaaaaatatcgaggtgcctgagaccaaaactgcctcttttgagtgtgaggtgtcccacttcaatgtcccttccatgtggctgaagaatggtgtggaaattgagatgagtgaaaagttcaagatagttgtgcagggaaaactccatcagctgatcatcatgaacaccagcacagaggactcggcagaatacacatttgtctgtggcaatgaccaagtcagtgccaccctgacagtcaccccaatcatgattacttccatgctgaaagacatcaacgctgaagaaaaagacactattacttttgaggtgacagtgaactatgaaggcatctcttacaaatggttaaagaatggtgtggaaatcaaatcaactgacaagtgccagatgagaaccaaaaagctcacacactcactgaacatcaggaatgttcactttggggatgctgctgactacacctttgtggctggaaaagcaacatcaacagccacactttatgtggaagctcgtcatatagaatttaggaaacacattaaggacattaaggtactggagaagaagcgagccatgtttgaatgtgaagtttctgaacctgacatcactgtacagtggatgaaagatgaccaggaactgcagatcacagacagaataaagattcagaaggagaaatatgtccaccgccttctgatcccatccacccggatgtctgatgctgggaagtacacagtggtggcaggaggcaacgtgtcaactgcaaaactctttgtagaaggcagagatgttcgcatccgaagtattaaaaaggaggttcaggtcattgagaaacagcgtgctgttgttgaatttgaggtcaatgaagacgatgttgatgcccactggtataaagatggcattgaaatcaatttccaagttcaagaacgacacaaatatgtagtggaaagaagaatccaccgaatgtttatctctgagaccagacagagcgatgcaggagaatacacctttgtggcaggaaggaacaggagttctgtcactctctatgtcaatgctcctgaaccgccccaagttctgcaggagctccagcctgtcactgtgcagtctggcaagcctgcccgcttctgtgccgtgatatccggaagaccacagcccaaaatttcctggtacaaggaagagcagctgctttccactggcttcaagtgcaaatttcttcatgatgggcaagagtacacgcttttgctaattgaagccttcccagaggatgcggcagtctatacctgtgaagccaagaatgactatggtgttgccacaacatcagcttcactctcagtggaagttccagaagttgtgtctcctgatcaggaaatgcctgtttatccacctgccatcatcaccccgcttcaggacactgtcacttctgaagggcagccagcccgttttcaatgccgggtttctggaacagatctaaaagtgtcgtggtacagcaaagacaagaaaatcaagccatctcggttctttagaatgactcaatttgaagacacttatcaactggaaattgccgaagcttatccagaagatgaaggaacttacacgtttgttgctagtaatgctgtaggccaagtatcaagcacagccaacctgagtctggaagctcctgaatcaattttgcatgagaggattgaacaagagattgagatggaaatgaaagagttttctagttcttttctgtctgccgaggaagaaggacttcatagcgccgaacttcaattatctaaaataaatgaaacacttgaacttttgtctgaatctccagtttactcaactaaatttgattccgaaaaggaaggcactggcccaattttcatcaaagaagtgtcaaatgctgatataagcatgggggatgtggctacactgtctgtaactgtcattggcatccccaaacctaaaattcagtggttctttaatggagtgctattaaccccttctgctgactacaaatttgtttttgacggtgatgatcatagcctgatcattctgttcaccaaattggaggatgagggagagtatacatgtatggccagtaatgactatggaaagacaatatgtagtgcctatctaaaaattaattccaaaggagagggtcacaaagacactgaaacagaatcagcagtggcaaaatctctggaaaagctgggaggtccttgtcctcctcacttccttaaggagttaaaaccaattcgctgtgctcaagggcttcctgccatctttgagtacacagtggttggagagcctgcccctactgttacatggttcaaagaaaacaagcagctttgcaccagtgtttattacactatcattcataaccctaatggctctggaactttcattgtcaatgaccctcagagggaagacagtggcctctatatctgtaaagcagagaatatgttgggtgagtccacctgtgcagcagagctgcttgtgcttctggaagacacagacatgactgataccccctgcaaagcaaagtccacaccagaggctcctgaggattttccacagacacccttaaagggtcccgcagttgaagcacttgactcagagcaggaaattgcaacgtttgtaaaagacaccattttgaaagctgctttaattacagaagaaaaccagcaactatcttatgagcatattgctaaagccaatgaattgagcagtcagcttcctttgggagctcaggaattgcaatccattttggagcaagacaagctcactcctgaaagcaccagggaatttctttgcatcaatggcagtattcactttcagcctctcaaggaaccatctcccaacctacagctgcagattgtacagtcccagaaaaccttctccaaagaaggtattctaatgcctgaagagcctgagacacaggcagttctatcagataccgagaaaatcttcccaagtgccatgtccatagaacaaattaattcattaacagttgagcctctgaaaactttattagctgaacctgaagggaattatccacagtcttcaatagaacctccaatgcattcttatctaacctctgtggctgaggaagtactttcaccaaaagaaaagacagtatctgacaccaacagagagcaaagagtgactcttcaaaagcaagaggcacaaagtgcgctcatcttgagtcagagcttagctgagggacacgtggagagtctccagagtcctgatgtcatgatctctcaggtaaactatgagcccctagtcccttcagaacactcatgcacagaaggaggtaaaattttgatagaaagtgcaaatccactggaaaatgcagggcaagattctgcggtcagaattgaggaaggcaagtccttaagatttccactagcacttgaagaaaagcaggtactgctcaaagaagagcattctgacaacgtggtgatgcccccagaccaaatcattgagtctaaaagagagcccgtggcaataaagaaagtgcaggaggtacagggaagggaccttctttctaaggaaagcttgctttctggtattccagaagagcagagattaaacctgaaaattcaaatctgccgggctttgcaagcagccgtggccagcgagcagccaggtcttttctctgagtggctaagaaatattgaaaaggtggaggtcgaggctgtaaacatcacccaagagcccagacacatcatgtgcatgtaccttgttacttcggcaaagtctgtaacagaagaagtaaccatcattattgaagatgttgatcctcaaatggctaacctgaaaatggaacttagggatgctttgtgtgctattatatatgaggaaatagacatcctaacagctgagggtcctagaattcagcaaggagccaaaacaagtttgcaagaagaaatggattctttttcaggttcacagaaggttgaacccattactgaaccagaagttgaatctaaatatctgatctcaactgaagaggtcagttattttaacgtgcaaagtagggttaaatatttggatgccacacctgtcactaaaggggttgcttcagctgttgtctctgacgaaaaacaagatgagagtctgaaaccatcagaggaaaaagaggagtcttcctctgaaagtggtactgaggaggttgctacagtaaagatacaggaagctgagggtggcttaatcaaagaggatggccccatgatacatacacctttagtggacactgtttctgaggaaggtgatattgtacacctcacaacatccataacaaatgctaaagaggtgaattggtattttgagaataaactggtgccttcagatgaaaagttcaagtgtttacaagatcaaaatacatatacgctagtcatcgacaaagtaaataccgaagaccatcaaggagagtatgtctgtgaggccttgaatgacagcggaaaaacagcaacttcagccaaactcactgtagtaaaaagagctgccccagtgatcaagaggaaaatcgaacccctggaagtagcactgggccacctagccaaattcacctgtgagatccaaagtgctcccaatgtccggttccagtggtttaaagctggccgagaaatttatgagagtgacaagtgttctattcgatcttcaaagtatatctccagccttgaaatcctgagaacccaggtggttgactgcggcgagtatacatgcaaagcttccaatgagtatggcagtgtcagctgtacagccacactaactgtgacagtgcctggaggtgaaaagaaagttcgcaaattacttccggaacgtaaacctgaaccaaaggaagaagttgttctgaaaagcgttctaagaaaaagacctgaagaagaagaacctaaagtagaacctaaaaaactagaaaaagttaaaaaacctgcagtaccagaaccaccacctccaaaacctgttgaagaggttgaagtacctactgttacaaaaagggaaaggaagattcctgaaccaacaaaagtgcctgaaatcaagccagcaatacctctccctgcacctgaaccgaaaccaaagcccgaagcagaagtgaaaacaatcaaaccacctcctgtggaacctgaaccaacccccatcgctgccccagtaacagtgccagtggttggaaagaaagcagaagccaaagcacctaaggaagaggctgccaagccaaaaggtcctatcaaaggtgtacccaaaaagactccttcaccaatagaagccgaaaggagaaagttaaggccaggaagtggtggagagaaacctcctgatgaagccccgttcacctaccagctaaaggctgtgccactgaagtttgtgaaagaaatcaaagacatcatcttgacagaatcagagttcgttggctcttcagcaatctttgaatgtttggtctccccttccactgcaattacaacctggatgaaagacggtagcaatatccgtgagagtcccaagcacaggtttattgcagatggtaaagacagaaagctgcacatcattgatgttcaactttccgatgctggtgaatacacctgtgttttacgtttgggaaacaaagaaaagacctccacggctaaacttgttgtagaagaacttcctgtgcgttttgtaaaaacactggaagaggaagtcacagtggtcaaaggacagccattgtacttgagctgcgagttaaacaaagagcgtgacgtggtctggaggaaggatggcaagattgtggtggagaaacctggccgaattgtgccaggcgtcattggcttgatgcgggctctgaccatcaacgatgcagatgacacagatgctggaacatacacagttactgtggaaaacgccaacaacctggagtgttcatcttgcgtaaaagtagtagaagtcattagagattggctggtgaaacctatacgagaccagcatgtgaaacccaaggggacagctatttttgcctgtgatatagcaaaagatactccaaacattaagtggttcaaaggatatgatgaaatccctgcggaaccaaatgataagactgaaatactgagagatggaaatcatctgtacctcaaaattaagaatgctatgccagaagatattgctgagtatgcagtggaaattgaaggaaaaagataccctgcaaagctgacacttggagagcgtgaagttgaactgcttaaaccaatagaggacgttaccatttatgagaaagaaagtgcaagctttgatgcagaaatctcagaggcagacattcctggacaatggaaactgaaaggagaacttctaaggccctcacctacttgtgaaatcaaagcagaaggtggaaaacgcttcttaactttgcacaaagtcaaactggaccaagctggtgaagtcctctaccaggcccttaatgcaattacaactgccattttgacagtaaaagaaatcgaacttgactttgctgtgcccctgaaggatgtcactgttccagaaaggcgacaggctcgattcgaatgtgtcctcacccgagaggcaaatgttatatggtccaaaggacctgatataattaagtcatctgacaaatttgatatcatcgctgatggaaagaaacatattcttgttattaatgattctcaatttgatgatgaaggggtctatactgctgaggtggagggcaagaagacctcagctcggttgtttgtcacaggtataagactgaaattcatgtcacctcttgaagatcaaacagtaaaagaaggtgaaacagcaacttttgtttgtgaactttctcatgaaaaaatgcatgtagtctggttcaaaaatgatgccaaactccatacaagcagaacagtactcatctcttctgagggcaagactcacaaattggaaatgaaagaagtgacattggatgatatatctcagataaaagctcaagtcaaggagctgagctccacagcacagctgaaggtcttagaggccgatccctacttcactgtgaaattacatgacaaaactgcagtggagaaggatgagattactttgaagtgtgaagtgagcaaagatgtaccagtgaaatggttcaaagatggtgaagagattgtcccttcacccaaatattctatcaaggcagatggcctgcgccgcatcttaaaaatcaaaaaggcggaccttaaagataaaggcgaatatgtgtgtgactgtggcacagacaagaccaaggcaaatgttactgttgaggctcgactaataaaagtggaaaagcctctgtacggagtagaggtgtttgttggtgaaacagcccactttgaaattgaactttctgaacctgatgttcacggccagtggaagctgaaaggacagcctttgacagcttcccctgactgtgaaatcattgaggatggaaagaagcatattctgatccttcataactgtcagctgggtatgacaggagaggtttccttccaggctgctaatgccaaatctgcagccaatctgaaagtgaaagaattgcctcttatcttcatcacacctctcagtgatgttaaagtcttcgagaaagatgaggctaagtttgagtgtgaagtatccagggagcccaaaacattccgttggctaaaaggaacccaggaaatcacaggtgatgacagatttgagcttataaaggatggcactaagcattcaatggtgatcaagtcagctgcttttgaagatgaagcaaaatacatgtttgaagctgaagataagcacacaagtggcaaactgatcattgaaggaatccggctcaaattcctcacccctctcaaagatgtaactgccaaagagaaggaaagtgctgtatttactgtggagttatctcatgataacatccgagttaaatggttcaagaatgaccagcgcctacacaccaccaggtcggtctcaatgcaagacgaagggaaaactcattcgatcacattcaaagacctgtctattgatgacacctcccaaattagagtagaagctatggggatgagttcagaagctaaactcactgtgcttgagggagacccatattttacaggaaaacttcaagattatactggtgtagagaaagatgaagttattctacagtgtgaaattagcaaagcagatgcaccagtgaaatggtttaaggatgggaaggaaataaagccatccaaaaatgctgttattaaggcagatggcaagaaacgcatgctaatcctaaagaaagccttgaaatcagatattggacagtacacctgtgactgtgggacagataagacctcaggaaaacttgacattgaggatcgggaaattaaactggtgcgacccctgcacagtgtggaggtgatggagactgagacagcacgctttgaaaccgaaatctctgaagatgatatccacgccaactggaaactcaagggagaggccctactccaaacacctgattgtgaaattaaggaagaaggcaaaatacactcccttgttttgcacaactgtcgcctggaccagacgggtggggtggatttccaagctgccaatgttaaatctagtgcccacctccgagttaagccacgagtaattggtcttctgaggcctttaaaggatgtcaccgtgactgcaggggaaacagccaccttcgactgcgagctctcctacgaagatatcccagtggaatggtatctcaaagggaagaaactagagcccagcgataaggtggtcccacgttcagaaggaaaagttcatacacttactctgagggatgtaaagttagaagatgctggggaagtccaactaacagcaaaagatttcaaaactcacgccaacctctttgtgaaagaacccccagttgaattcactaagcctcttgaggaccagacggtcgaagagggagccactgcagtgctggagtgtgaagtctccagagaaaatgctaaggtgaaatggttcaaaaatgggacagaaatcctcaaaagcaagaagtatgaaattgttgctgatggcagggtcagaaaacttgttatacatgactgtaccccagaggatattaaaacatacacttgtgatgctaaggattttaagacttcctgtaacctgaatgtcgtgcctcctcatgtggaattcttaagaccactcaccgaccttcaagttagagaaaaagaaatggctcgatttgagtgtgaactttcccgagaaaatgctaaggttaagtggtttaaagatggtgctgaaattaaaaagggcaaaaaatatgacatcatatccaagggagcagtgcgcattcttgtcatcaacaaatgtctactggatgatgaagctgaatattcctgtgaagtaaggacagcgagaacttctggcatgctgacagttctggaagaagaagctgtctttaccaaaaatcttgccaacattgaagttagtgaaacagacactataaaactggtttgtgaagtctccaaacctggcgcagaagtgatttggtataaaggggatgaggagatcattgaaacaggaagatatgaaatactgactgaaggacggaagagaatcctggtcattcagaacgctcaccttgaggatgctggcaactacaactgtcgactcccaagctctcgaaccgatggcaaagtcaaagtacatgaactggctgctgaatttatctcaaagcctcaaaaccttgaaatacttgaaggagaaaaggctgaatttgtctgctctatatcaaaagaaagctttccagtccagtggaagagggatgataagacacttgaatctggagataaatatgacgttattgctgatggtaaaaagagggtcctagttgtgaaagatgccacattacaagatatgggcacttacgttgtcatggtaggggccgccagagcagcagctcacttgacagtcattgaaaaactcaggatcgtagttcctcttaaggacacccgggtgaaggaacaacaggaagttgtcttcaactgtgaagtcaatactgaaggtgccaaagccaaatggttcagaaatgaagaagctatatttgatagttcaaaatacatcattctccaaaaagacctagtctacaccctcagaattagagatgcacacttagatgaccaagccaactataatgtgtctttgaccaatcacagaggtgaaaatgttaaaagtgcagccaatctaatagtagaagaggaagaccttaggattgttgagcctcttaaagatattgaaacaatggagaagaaatctgtcacattctggtgcaaggtgaatcgtctcaatgtaacactgaagtggaccaaaaatggtgaagaagtgccttttgacaaccgtgtctcatacagagttgataagtacaagcacatgttaaccattaaagactgtggcttcccagatgaaggtgaatacattgtcactgctggacaagataaatctgttgctgagcttctcatcatagaagccccgacagaatttgtggaacacttggaagatcagacagtcactgagttcgatgacgctgtcttctcctgccagctctccagagagaaagccaatgtaaaatggtacagaaatgggagagaaatcaaagaaggcaaaaaatacaaatttgaaaaagatggaagtatacacagactcattataaaagattgcaggctggatgatgagtgtgaatatgcttgcggggtagaagacaggaagtctcgtgctagactttttgtggaagaaattcctgttgagatcatcaggcctccacaagatattcttgaagcccctggtgctgatgttgtctttttagcagaactcaataaagataaggtggaagtccaatggctaagaaataacatggttgttgtccagggtgataaacaccagatgatgagtgaaggaaagatacatcgactacagatttgtgatattaagccccgtgaccagggtgaatacagatttattgccaaagacaaagaagccagagctaagcttgaactggcagctgcaccaaaaatcaagacagctgaccaagaccttgtggttgatgttggcaagcctctgacaatggtggtgccatatgatgcctaccccaaagcagaagctgaatggtttaaagaaaatgaacctttatctacaaaaaccattgatactacggctgaacaaacttctttcagaattttagaagccaagaaaggagacaaagggaggtataaaattgtgcttcagaacaaacatggaaaagcagaaggattcatcaatttaaaagttattgatgttcctgggccagtacgtaacttagaagtgacagaaacatttgatggtgaagtgagccttgcttgggaagaacctttaactgatggtggaagcaaaatcataggttacgttgttgaaagacgtgacattaagagaaagacctgggttctggccacagaccgtgcagagagttgtgagtttactgtcactggtctacagaaaggaggagttgagtacctattccgtgtgagtgcaagaaacagagttggcactggtgagccagtagaaactgacaatcctgtagaagcaaggagtaaatatgatgttccaggccctcctttgaatgtaaccatcactgatgtgaatcgatttggtgtctcactgacatgggaaccaccagagtatgatggaggtgctgagatcacaaactacgtcattgaattaagagacaagacttctatcaggtgggatactgccatgactgtgagagctgaagacctgtctgcaactgttactgatgtggtagaaggacaggagtacagtttccgagtgagagcccaaaatcgaattggagttggaaaaccaagtgcagccacacccttcgtcaaagttgctgatccaattgagagaccaagtcctcctgtaaacctaacttcctcagatcagactcagtcatcagttcagctcaaatgggaacctcctctgaaagatggaggaagcccaatattaggctatataattgagcgatgcgaagaaggaaaagataattggattcgttgcaatatgaaacttgtccctgaactgacttacaaggttaccggattggaaaaaggaaataaatatttatatagagtatctgcagaaaataaagctggtgtttcagatccatctgaaattcttggtcctctcaccgctgacgatgcatttgttgaaccaacaatggatttaagtgcatttaaagatggtctggaagttattgtcccaaatcctatcacgatcctggttccaagtacaggctatccaaggccaactgcaacctggtgttttggagataaagtactagaaacaggggaccgggtgaaaatgaagaccttgtctgcctatgccgaacttgtcatttctccaagtgaacgttcagacaagggcatttatacactgaaattagaaaaccgtgtgaaaacaatttctggggaaattgatgtcaatgtaattgctcgcccaagtgcacccaaagaattgaaatttggtgatataaccaaggactcagtacatttgacttgggaaccacctgatgatgatggaggaagtccgttaactggatacgttgttgaaaaacgagaagtcagccggaaaacatggactaaagttatggactttgtgactgatctagaattcacagttcctgatcttgttcaaggaaaagagtacttatttaaagtttgtgctcgtaacaaatgtggccctggagaacctgcatatgttgatgaacctgtaaatatgtcaactcctgcaacggtacctgacccaccagagaatgttaaatggagagatcgaacagccaatagcatcttcttaacatgggatccacctaaaaatgatggtggttcacgcatcaaaggatatatagttgaaagatgtccacgtggttctgataaatgggttgcctgtggagaacctgttgcagaaacaaaaatggaagtgacaggtcttgaggaaggcaaatggtatgcctaccgcgtgaaggccttaaacaggcagggtgctagcaaaccaagcagacccacagaggaaatccaggctgtggacacacaagaggccccagaaatcttcctcgatgtgaagctccttgctggtctcactgtaaaagctgggaccaagattgaacttcctgccaccgtaaccggaaaacctgaacctaaaataacttggacaaaggctgatatgattctgaagcaggacaaaagaattaccattgaaaatgtccctaagaaatccacagtgactattgttgatagtaagagaagtgacactggcacatatatcattgaggctgtgaatgtgtgtggccgggccactgctgtggtggaagtgaacgtcttagataaacccggaccaccagctgcctttgacatcacagatgtaaccaatgagtcatgtcttctaacatggaacccaccacgcgatgatggtggatctaagatcacaaactatgttgtggagagacgagcaactgatagtgaagtgtggcacaagctctcatccaccgtcaaggatacaaacttcaaggccaccaaattaatccccaataaagagtacatcttcagagttgctgcagaaaacatgtatggtgttggtgaaccagttcaggcctctccaataacagccaaatatcagtttgatccacctggtcctccaactcgcctagaaccttctgatatcactaaagacgcagtgactctcacatggtgtgagccagatgatgatggtggcagcccaatcacaggatactgggttgaaagactggatcctgatacagataaatgggttagatgcaataagatgccagtaaaggacacaacatacagagtgaaaggtctcactaataagaaaaaatacagattccgtgtgttggctgaaaatcttgctggacctggaaaaccaagcaaatcaactgaaccaatcttaataaaggatcccatagatcctccatggccccctggaaaaccaactgtaaaagatgtaggcaaaacatcagtaaggttgaattggacaaaaccagaacatgatggaggtgcaaagattgagtcttatgtcattgaaatgctgaagactggaacagatgagtgggtcagagtggcggaaggggttcccaccactcagcacttgctcccagggctcatggaaggacaggaatactcattccgagttagagctgtgaataaggctggggaaagtgaacccagtgaacccagtgaccctgtgctttgccgggagaagctatatcctccatcaccaccacgctggcttgaagttattaatatcacaaaaaatacagcagacctaaaatggacagttcctgagaaagatggagggtcccccatcaccaactacattgtggaaaagagagacgtcaggcgaaaaggctggcaaacagtggataccactgtcaaggacaccaagtgcacagtcaccccactgactgagggctctttatatgtgttccgagttgctgcagaaaatgctataggacaaagcgactacaccgaaattgaggactctgtgctggccaaagacacctttaccactcctggaccaccctacgccctggcagtggttgatgtgacaaaacgacatgttgacctaaagtgggagccacctaaaaatgatggtggaagaccaatacagagatatgtcattgagaagaaagaaaggttaggtacccgttgggtgaaagctggaaagactgcaggacctgactgtaacttcagagtaactgatgtcatcgaaggaacagaggtccagtttcaggttcgggctgaaaatgaagctggagttggccacccaagtgaacccacagaaatcctatccattgaagatccaacaagtcctccctcaccaccccttgacctacatgtgactgatgctgggagaaaacacattgccattgcttggaagcctccagagaaaaatggtggaagtcctatcataggataccatgttgaaatgtgtccagtaggcactgagaaatggatgagagttaattctcgcccaataaaggacttgaaattcaaggttgaagaaggtgttgttcctgacaaagaatatgtcctgagagtgagagcagtcaatgctattggtgtcagcgagccatctgaaatctctgaaaatgtggttgccaaagacccagactgcaagccaacaattgacctggagactcatgacattattgttattgaaggtgaaaagttaagcattcctgttcccttcagagctgtcccagttccaactgttagttggcataaagatggcaaagaagttaaagcaagtgatagattaacaatgaagaatgatcacatctctgcacaccttgaagttcccaagagtgtccgtgcagatgccggaatttataccattacactggagaataagctcggctcagcaacagcctcaatcaatgtcaaagtcataggcctacctggaccatgcaaagatattaaagcaagtgacattaccaagagttcttgtaagttaacttgggaacctccagaatttgatggtggaaccccaattcttcattatgtcctggagcgcagagaagctgggaggagaacatatataccagtcatgtctggtgagaacaaactgtcatggactgtgaaggatctcataccaaatggtgaatacttcttccgtgttaaagcagtcaacaaggttggtggaggagaatatattgaactgaaaaatccagtcattgctcaagatccaaagcaaccccctgatccacctgtagatgtagaggttcataatcctacagcggaggcaatgactattacatggaagccacctttgtatgatggagggagcaagataatgggctacatcatagagaagattgctaagggtgaagaaaggtggaagagatgcaatgaacacctggtaccaatcctgacctatacagcaaaaggacttgaagaggggaaagagtaccaattccgtgtgcgagcagagaacgccgcgggtattagtgaaccttctcgggctactcctccaaccaaagctgtagatcccattgatgcccccaaagtcattctgagaacaagcctagaagtgaaacgaggtgatgaaatagcacttgatgcaagtatttctggatcaccttacccaactattacatggataaaggatgaaaatgttattgtaccagaggaaattaagaagcgtgcagcacccttggttaggagaaggaagggtgaagttcaagaagaagaaccatttgtcctgcctctgacacagcgtttgagtattgacaacagcaaaaagggagaatctcagctacgcgtccgagattctctccgacctgaccatggtctgtatatgatcaaagttgaaaatgaccacggtattgcaaaagctccttgtactgtcagtgtgttagatacaccgggaccaccaatcaactttgtatttgaagatatcagaaagacctcagtcctttgtaaatgggaaccaccccttgatgatggtggcagtgaaatcataaactacactttggaaaagaaagacaagacaaaacccgactcagaatggattgttgtcacttcaacacttagacattgcaaatattcagtaacaaaactgattgaaggaaaagagtacctcttccgtgtaagagctgaaaacagatttgggccaggtccaccatgtgtttcaaagccacttgtggctaaagatccatttggaccacctgatgcaccagataagcccattgtggaagatgttaccagcaacagtatgctagtgaaatggaatgaaccaaaagataatggaagccccattttgggttactggcttgaaaaacgtgaagttaacagtacacattggtctcgtgtcaacaaaagccttctgaatgccttgaaagccaatgtagatggcttattagaaggactcacctatgtcttcagagtatgtgctgaaaatgcagctggacctggaaagttcagtccaccttcagatcccaaaacagcacatgatccaatctctcctcctgggccacctatcccaagagtcactgacacaagctctacaactattgaactagaatgggaacccccagctttcaatggtggtggggaaattgttggctattttgttgataagcagttggttggcacaaatgaatggtcacgctgcacagagaagatgatcaaggtccgtcagtacaccgtcaaagaaatccgagagggtgctgattacaaacttcgggtgagtgctgtcaatgccgcaggggaaggaccgcctggagaaacacaacctgttactgtggctgaaccacaagagcctccagctgtggaactggatgtttctgtcaagggtggaatacaaataatggctgggaagactcttagaattccagctgtggtgactggtcgccctgtacctacaaaagtatggaccaaagaagaaggggagctggataaagaccgtgttgtaatagacaacgttggaaccaaatctgaactaattatcaaggatgcactgcgaaaagaccatggcagatatgtgattacagctacaaatagctgtggttccaaatttgcagcagccagggtagaagtttttgatgtccctggtccagttcttgacttaaaacctgttgtaacaaacagaaaaatgtgtctacttaactggtctgatccagaagatgatggaggaagtgaaataacaggctttatcattgaaagaaaagatgccaagatgcatacttggagacaaccaatagagactgagagatctaaatgtgacatcacaggtctgcttgagggacaagaatataagttccgtgttattgccaagaacaagtttggctgtggccctcctgttgaaataggaccaattcttgcagttgatccactaggtcctccaacatctccagagaggctcacatacactgaaaggacaaagtccactatcacacttgactggaaagagccccgcagtaatggtggcagtcccatccaaggatatatcattgaaaaacggcgtcatgacaaacctgactttgaaagagttaacaagcgactctgcccaaccacatcttttctggttgaaaatcttgatgaacaccaaatgtatgagttccgtgtcaaagctgtcaatgaaattggtgaaagtgaaccatccctacctcttaatgtagtcatacaagatgatgaagtgcctccaactattaagttgcgtctgagtgttcgaggagacactatcaaagttaaggcaggagagcctgtccacatccctgcagatgtgacaggccttccaatgcctaagattgaatggtccaaaaatgaaactgtaattgaaaaacccactgatgcacttcagataaccaaggaagaggtatcccgaagtgaggcaaaaactgagcttagcattcccaaagcggtccgggaggacaaaggcacttacacagttactgcttccaatcgccttggctcagtgttccgaaatgttcacgttgaagtatatgaccgcccatccccaccaagaaatcttgctgttactgacattaaagctgaatcttgctacttgacatgggatgcccctcttgataatggtggcagtgaaatcacccattatgttattgacaaacgtgatgcaagtaggaagaaagcagaatgggaggaagtcaccaacactgctgtagagaaaagatatgggatctggaaacttatccccaatggtcagtatgagttccgagtcagggcagtgaataaatatggaatcagtgatgagtgcaaatcagataaagtagtcattcaagatccttatcgccttcctggacctccaggaaaaccaaaagttttggcacgcaccaaaggatcaatgctagtgagctggactcctcctttggacaatggtggctctccaattactggctactggctggagaaaagagaagagggaagtccttattggtcacgtgttagccgagcaccaataaccaaagtgggattgaaaggcgtggaatttaatgttcctcgtttgcttgaaggcgttaaataccagttcagagccatggcaataaatgctgcaggaattggtcctcccagtgaaccatcagatccagaggttgcaggagatcccatatttccaccggggccaccttcttgcccagaagttaaagataaaacgaagtcaagcatctcactaggatggaaacctccagccaaagatggtggcagcccaatcaaaggatacattgtagaaatgcaagaagaaggtactactgactggaaaagagtaaatgaaccagacaaacttataactacctgtgaatgtgtggtgcctaatctgaaagagctcaggaagtacagattcagagtgaaagctgtcaatgaagctggtgaatctgaaccaagtgatacaactggggagatccctgccactgatattcaagaggaaccagaagttttcattgacattggagcacaggactgtctggtttgtaaagctggctcacagattaggattcctgctgtcatcaagggacgcccaacaccaaaatcatcttgggaatttgatggaaaggcaaagaaagcaatgaaggatggagttcatgacatacccgaagatgcacagctggagactgctgaaaactcctcagtaattattattccggagtgtaaacgatctcatacaggcaaatacagcatcacagccaagaataaagcaggacaaaagactgcaaattgcagagttaaagtcatggatgtaccaggcccacccaaagatctgaaagtcagtgatatcacaaggggtagttgcagactttcatggaagatgccagacgacgatggaggagacaggatcaaaggctatgttattgagaagaggactattgatggaaaagcctggaccaaagtcaatccagactgtggaagcaccacatttgtagtgcctgatctcctctctgaacagcaatatttcttccgtgtgcgagcagaaaaccgttttggtattggcccacctgtggaaaccattcagaggaccactgccagagatccgatatatcctcctgatcctcctattaaactcaagattggcctcatcacaaagaacacagtgcatctgtcatggaaacccccgaagaatgatgggggctcccctgttacccactatattgttgagtgccttgcatgggaccctactgggacaaagaaagaagcctggaggcagtgcaataagcgtgatgtggaagaactgcaatttactgttgaagacctagtagaaggtggggaatatgaattccgagtcaaagctgtcaatgctgcaggagtcagcaagccttcagccactgttgggccctgtgactgtcaaagaccagacatgccaccatcaattgatctaaaagaattcatggaggttgaagaaggaaccaatgttaacattgtggccaaaattaaaggtgtgccattcccgacactaacctggtttaaagctcctccaaagaagcctgataacaaagaacctgttctctatgacacccatgtcaacaaactggtggtagatgatacttgcactttagttattccgcagtctcgcaggagtgacactggcttatataccatcacagctgtaaataatctgggaacagcatcaaaggagatgagactgaatgtcctgggtcgtcctggccctccagtgggacccataaaatttgaatctgtttcagcagatcaaatgacactatcttggtttccacctaaagatgatggtgggtctaagattacaaactatgtaattgagaaaagagaagctaacaggaagacatgggtccatgtctccagtgaacctaaggagtgcacgtacacgattcccaaattgctagaaggccatgaatatgtattccgaatcatggcccagaataaatatggcattggagaacctcttgacagtgaacctgaaacagcaagaaacctcttctctgtccctggagcaccagataaaccaacagttagcagcgtgactcgtaactccatgactgtcaactgggaagagccagaatatgatggaggctctcctgtgacagggtactggctggaaatgaaagacaccacttcaaagagatggaagagagttaaccgagatcctatcaaagccatgactttgggtgtttcttataaagtgactggtcttattgaaggttccgactatcaattccgggtatatgcaatcaatgctgctggcgtgggtccagcaagtctgccatcagacccagcgactgctagagatccaattgcccctcctggtcctccatttcccaaagtgacagattggactaaatcatctgcagatctggagtggtctcccccactaaaagatggtggatccaaagtaactggatacatcgttgaatataaagaagaaggaaaagaagaatgggaaaagggtaaagataaagaagtgagaggaacaaagctcgttgtgacaggattaaaggaaggagcattctacaaatttagagttagtgcagtcaacattgctggcattggagaacctggagaggtcacagatgtcattgaaatgaaggacagacttgtttcacctgaccttcagctagatgccagtgtcagagatagaattgttgtccatgctggaggggtgatccgaatcattgcctatgtgtctggaaagcctcctccaaccgtcacctggaacatgaatgaaagaaccttacctcaagaagccaccattgagaccacagccattagctcatccatggtcatcaagaactgccagaggagccatcaaggcgtctattctcttcttgccaaaaatgaagccggagaaagaaagaagacaattattgttgatgtattagatgttccaggtcccgttggaacaccattcctagctcacaacctaaccaatgagtcctgcaaactgacatggttttctccagaagatgatggaggctctccaatcaccaattatgtcattgaaaagcgtgaatctgaccgcagagcatggaccccagtgacatatacagttacccgacaaaatgctactgtccagggtctcattcaaggaaaagcctactttttccgaattgcggctgaaaatagtattggcatgggtccatttgttgagacatcagaggcacttgttatcagagagccaataactgtaccagagcgtcctgaagacctggaagtcaaagaagttactaaaaatactgtaactttgacttggaatcctcctaagtatgatggtgggtcagaaattattaactatgtcctagaaagtcggctcattgggactgagaagttccacaaagttacaaatgacaacttgcttagcagaaaatacactgttaaaggcttaaaagaaggtgatacctatgagtaccgtgtcagtgctgtcaacattgttggacaaggcaaaccatcattttgcaccaaaccaattacttgcaaggatgagctggcacccccaacgcttcacctcgacttcagagataagctcacgattcgagttggtgaagcttttgccctcactggccgttactcaggcaaaccaaagcctaaggtttcctggttcaaagatgaagctgatgtgctggaagatgatcgcactcatataaagactacaccagcaacacttgctttagagaagatcaaggccaaacgttcagattccggcaaatactgtgtggttgtggagaacagtacaggctctaggaaaggtttctgtcaagttaatgttgttgaccgtcctggaccaccagtaggaccagttagttttgatgaggtgaccaaagattacatggttatctcttggaagcctcctttagatgatggaggcagtaaaatcaccaattatattattgagaagaaggaagtgggtaaagacgtctggatgccagtgacatctgcaagtgctaaaacaacatgcaaagtttctaaactacttgaaggaaaagattatattttccggatacatgctgaaaatctgtatggaataagtgatcctctggtgtctgattcaatgaaagccaaagatcgtttcagggttcctgatgcacctgatcagccaattgttacagaagttaccaaagactctgcattagtaacctggaataagccacatgatggaggaaaacccatcacaaactacatcctggaaaagagagaaactatgtctaaacgatgggctagagttaccaaagatcctattcatccatacactaaatttagggttcctgatcttctagaaggatgtcagtatgaattccgggtttctgcagaaaatgaaattggtattggagatccaagcccaccatccaaaccagtctttgctaaagatccaattgctaaaccaagtccacctgttaatcctgaagcaatagatacaacatgcaattcagtcgatctaacttggcagccaccacgtcatgatggtgggagcaagattctgggttatattgttgagtaccagaaagttggagatgaagagtggagaagagccaatcacacccctgagtcatgtcctgaaactaaatataaagtcaccggtcttcgggacggtcaaacctataagtttagagtgttagcagtcaatgcagctggtgaatcagatccagctcatgttccggagccagtcctagtaaaagacaggcttgaaccccctgagttgattcttgatgccaacatggcaagagaacaacacattaaagttggtgatactctaagacttagtgccatcatcaaaggagtgccattcccaaaagtaacttggaaaaaagaagacagagatgctccaactaaagcaagaattgatgtgactccagttggtagcaagcttgaaattcgtaatgctgcccatgaagatggtggaatttattctttaacagtggagaatccagctggttcaaaaactgtctcagtaaaagtacttgtattagataaacctgggccacctagagatctggaagtcagtgaaattaggaaagattcatgttaccttacttggaaagaaccactggatgatggtggttctgttattaccaattatgtggttgagaggagagatgttgccagcgcccagtggtcacctctctcagctacatcaaagaaaaagagtcacttcgctaagcatctgaatgaaggcaaccagtacctcttccgagtagctgcggagaaccagtatggacgtggtccttttgttgaaacaccaaaaccaatcaaggctttggatcctctccatcccccagggccacccaaggacctgcaccatgtagatgttgacaagactgaagtctccctagtctggaataagccggatcgtgatggtggttctccaatcactggatatttggtagaatatcaagaagaaggcacccaggactggattaaatttaagactgtgacaaacttagagtgtgtggttactggactacaacaaggaaagacctatagattccgtgtaaaagctgaaaacattgtgggtcttggtctccctgacacaactatcccgatagaatgtcaagaaaaactagtgcctccatccgtggagctagatgtgaaattaattgaaggtcttgtggtaaaggctggaaccacagtcagattccctgctattataagaggtgtgcctgttcctactgcaaagtggacaaccgatgggagtgagattaaaaccgatgagcactacacagttgaaacagacaacttctcatcagtacttaccattaagaactgcttaaggagagacactggggaatatcaaatcacagtttccaatgcagccggtagcaaaacagtagccgtacatcttactgttcttgatgttcctgggccaccaacaggtcctattaatattctggatgttactcctgaacacatgactatctcatggcagccacctaaggatgatggaggaagccctgtgataaattatattgttgagaaacaagatacaaggaaagacacgtggggtgttgtctcttccggaagcagtaagacaaagctgaaaatcccacatctgcagaagggctgtgaatatgttttccgagttagagcagagaataagataggtgttggtcctccccttgactccacacctactgttgctaagcataaatttagtcctccgtctcctcctggtaaaccagtggttactgacattactgaaaatgcagcaacagtgtcttggaccctgccaaaatctgatggtggcagtccaataactggctactatatggaacgtcgagaagtaactggcaaatgggtgagggtcaacaaaacacctatcgctgacctgaagttcagagtgactggactctatgaaggaaatacatatgagtttagagtttttgctgaaaatcttgcaggactaagcaaaccatccccaagttctgatccaataaaagcttgccggcccatcaaaccacctggaccacctattaatcctaaactgaaagacaagagcagagaaacagctgatttggtgtggacaaagcctctcagtgatggtggtagccccattctaggatatgtagtggaatgtcagaaacctggcacggcacaatggaacaggattaataaagatgaactcattaggcaatgtgcctttagggtacctggactaattgaaggaaatgagtacagattccgtataaaggcagctaatattgtaggagagggtgagccaagagaactagcagaatctgtgattgcaaaagatatccttcatcctccagaagtagaacttgatgttacttgtcgtgatgttattaccgtgagagtaggccaaactatccgcattctagctcgagtcaaaggcagacctgaaccagacataacttggactaaggaaggcaaagtattggtccgagaaaagagggtggaccttattcaggatctacctcgtgttgagttacaaattaaagaagctgttagagctgatcatggcaagtatatcatctcagctaagaacagcagtggacatgcccaaggttcagccatcgttaacgtccttgacagacctgggccttgccagaatttgaaggttaccaatgtaaccaaagagaactgtacaatttcttgggaaaacccactagataatggtggctcagaaataacaaacttcatagtagaatatcgcaaaccaaaccagaaaggctggtcaattgttgcatcagatgtcactaaacgattaatcaaggccaaccttttagccaacaatgaatactatttccgagtttgtgcagagaataaagtaggtgttgggccaaccatcgaaacaaaaactcccattctggctattaaccctattgacagaccaggtgagcctgaaaaccttcacattgcagataaaggaaagacatttgtctatctaaagtggcggaggcctgactatgatggtggcagtccaaatctgtcatatcatgttgagagaaggcttaagggctccgatgactgggaaagagtgcataaaggaagcattaaagaaactcactacatggttgacagatgtgttgaaaaccagatttatgagttcagagtgcaaacaaagaatgaaggtggggaaagtgactgggtgaagacagaggaagttgttgtgaaagaagacttacaaaaaccagtacttgatctgaaattaagtggggtcctaactgtcaaagcaggggacaccattaggcttgaggcaggggttagaggcaaaccattcccagaagttgcatggaccaaggacaaagacgctacagacttaacaagatcaccaagggtcaagattgatacccgtgctgattcatctaaattttctcttactaaagcaaagcgaagtgatgggggtaaatatgtagttacggcaactaacacggctggcagttttgtggcctatgccactgtcaatgttttagataagcctggtcctgtgagaaatctgaaaattgttgatgtgtccagtgataggtgtactgtttgctgggatccaccagaagatgatggtggctgtgaaatccaaaattatattctagaaaaatgtgagacaaagcgaatggtttggtctacctattctgctactgtcttgacacctggtactacagtaacacgtctcatagaaggaaatgaatatattttcagagtccgtgcagaaaataaaataggcacagggcctccaacagaaagtaaaccagtcatagccaaaaccaagtatgataaacctggtcgccctgatcccccagaagtcactaaagtaagcaaagaagagatgactgtggtttggaatccacctgaatatgatggtggaaagtctataactggatactttttggagaaaaaggaaaagcattcaacacgatgggtccctgtcaacaagagtgcaatccctgagagacgtatgaaagtacagaatctcctcccagaccatgaatatcagttccgtgtcaaggcagaaaatgaaattggaattggagaaccaagcttgccttcaagaccggtggtggcaaaagaccccatagagccacctggtccaccaaccaatttcagagtggttgatacaaccaaacattccataactcttgggtggggaaaaccagtctatgatggtggtgcaccgatcattggatatgttgtggaaatgagaccaaaaatagcagatgcgtctcctgatgaaggctggaaacggtgtaatgctgcagcacagcttgtacgcaaggaattcactgttaccagcttggatgaaaaccaggaatatgagttcagggtgtgtgcccaaaaccaagttggtattgggcgccctgcagagctaaaggaagctatcaaacctaaagaaatactagaacctccggagattgatttggatgccagcatgaggaaactggtcatagtgagagcaggatgccctattcgtctctttgctatagtgagaggacgaccagcccctaaagtcacttggcgaaaagttggcattgataatgtggtcagaaaaggacaagttgatctggttgacactatggccttccttgtcatccccaattctacccgtgatgactcaggaaaatattccttaacacttgtgaacccagcaggagaaaaggctgtattcgtaaatgtcagagtattagacactcctgggcctgtgtctgatttaaaagtttcagatgtcactaaaacatcatgccatgtgtcctgggcccctcctgaaaacgacggtgggagccaagtgacacattatatcgtggagaaacgtgaggcagacagaaagacatggtcgaccgttaccccagaagttaagaaaacaagcttccatgtaaccaatcttgtccctgggaatgagtattacttcagagtaactgctgtcaacgaatatggccctggcgtcccaacagatgtcccaaaaccagtgcttgcatcagatcctctaagtgagccggatcccccaaggaaattagaagtgactgaaatgaccaagaacagtgccaccttagcctggttacctcccctacgtgatggaggtgctaaaatcgatggctacatcactagttacagagaagaagagcagcctgcagatcgctggacagagtactcagtggtaaaagatctgagccttgttgtcactggcctaaaggaaggaaagaaatacaaatttagagtagcggccagaaatgctgttggagtcagtttgccaagagaagctgaaggagtgtatgaagccaaagaacaactgttgccaccaaagatccttatgccagagcaaataactatcaaagctgggaaaaaactccgaattgaagcccatgtgtatggaaagcctcatcccacctgtaaatggaaaaaaggagaagatgaagttgtcacatccagccacctggcagtgcataaagcagacagctcttcaattctgatcataaaagatgtgactaggaaagacagtggttactacagcctcacagcagagaacagttctgggacagacactcagaaaatcaaagttgtagtcatggatgcccccggcccccctcagcctccatttgacatttctgatatagacgctgatgcttgctccctgtcatggcacatccctctggaggacggaggcagtaacatcaccaattatatagtggagaagtgtgatgtaagccgaggtgactgggtcacggctctagcttcagtcacaaaaacttcctgcagggttggaaagctgatcccaggccaggagtacatcttccgggtccgtgctgaaaaccgatttggcatttcagagcctctcacatctccaaagatggttgcgcagttcccatttggtgttcctagtgaaccaaagaatgcacgagtcaccaaagtcaacaaggactgtatttttgttgcttgggacagaccagatagtgatggagggagccccattattggttatctgattgaacgcaaggaaagaaacagtttgctgtgggtgaaagccaatgatactcttgtccggtcaactgaatatccttgtgctggccttgtagaaggtcttgagtattcattcagaatctatgccctaaacaaagctggatccagcccacccagcaaacccacagaatatgtaactgcaagaatgccagttgatcctcctgggaaacctgaggttattgatgtcaccaagagtactgtatctctgatctgggctcgtccaaagcatgatggaggcagtaaaattattggctatttcgtagaagcttgcaaacttcctggtgataaatgggtacggtgcaatactgcacctcaccagattccccaggaagagtacacagctactggcctagaagagaaagctcagtatcaatttagagctattgccaggaccgcggtaaacattagcccaccttctgaaccttctgatccagtgactatcctcgcagaaaatgtccctcccaggatagacctgagtgtggctatgaaatctttgcttactgtgaaagctggaactaatgtctgcttggatgctactgtttttggtaaaccgatgccaacagtttcttggaaaaaagatggcacactgctaaaaccagcagaaggcataaagatggccatgcagcggaatctgtgcaccttggagctattcagcgtgaaccggaaggactcaggagactataccattactgctgaaaattcaagtggttctaaatcagccaccattaagcttaaagtgttagataaaccgggtcctccagcatctgttaaaatcaacaaaatgtattcagatcgtgctatgctttcttgggaaccgcctcttgaagatggaggctcagaaatcaccaactatattgttgacaaacgtgaaacaagcaggcccaactgggctcaagtctctgcaactgtgcctatcaccagctgcagcgtggagaaacttatagagggccatgagtatcagttccgtatttgtgctgaaaataaatatggagtaggcgatccagtcttcactgaaccagcaattgccaaaaacccatatgacccaccaggacgctgtgatcctcctgttattagcaacataaccaaagatcacatgacagtcagctggaagccaccagcagatgatgggggctcacccatcactggctatttgcttgaaaagcgggaaacccaggctgttaactggactaaggtcaacagaaaacctattatagaaagaacattaaaagcaacaggtcttcaagaaggtaccgaatatgagttccgtgttacagctataaataaagctggaccaggcaaacccagtgacgcatccaaggccgcttatgctcgggaccctcagtatcctcctgcgccaccggctttccctaaagtatatgatacaactcgcagctctgtgagtctatcttggggcaagccagcctatgacggcggcagccctatcattggttatctcgttgaagtaaaacgggctgactccgataactgggtgaggtgcaacttaccacagaatctacagaaaacccgctttgaggttactggcctgatggaagacacacaatatcaattccgtgtgtatgccgttaataagattggatacagtgaccccagtgatgtgccagataaacactatcccaaggacatcttaattccacctgagggagaacttgatgcggacttaaggaagacactcatattacgtgctggagttactatgagactatatgtaccagtaaaaggacgcccacctccaaagattacttggtctaaaccaaatgtcaatctaagagacaggattggactggacataaagtcaactgactttgacactttcttgcgctgtgaaaatgtgaacaaatatgatgcaggaaaatatatcttaaccctggagaacagctgtggtaaaaaggaatataccattgttgtgaaagtgcttgatactcctgggccacctgtcaatgtgactgttaaggaaatatccaaagactctgcttatgttacctgggagcctcccattattgatggcggaagccccatcataaactatgtggtacaaaaacgtgatgcagagaggaaatcctggtctacagtgacaactgagtgctccaaaacaagcttcagagtagctaatttggaggagggaaaatcctacttcttccgagtgtttgctgaaaatgagtatggcattggtgatcccggtgaaactcgtgatgctgtcaaagcttcccaaactcctggaccagttgtggacctgaaagtgaggtctgtatctaagtcatcctgtagcattggctggaaaaagcctcacagtgatggtggaagtcggattattggatatgtagttgatttcctgactgaagaaaataagtggcaacgagttatgaaatccttaagcctacagtactctgcaaaagatttgactgaagggaaggaatataccttcagagtgagtgctgagaatgaaaatggagaaggaaccccaagcgaaatcactgttgtggcaagggatgatgttgtggctcctgatcttgacttaaagggtctacctgatttgtgctacttggctaaagaaaacagcaacttccggcttaagatccccataaaaggcaagccagctccatcagtctcctggaagaaaggggaagatcctctagcaactgacactagagtcagtgttgagtcatctgcggttaacacaactcttatagtgtacgattgccaaaaatctgatgctggaaaatacacaatcacacttaagaatgttgctggcaccaaggaaggaactatctccataaaggttgttggcaagcctggcatccccactggaccaatcaaatttgatgaagtcacagcagaagccatgaccttaaagtgggctcctccaaaggatgatggaggttctgaaatcaccaactatatcctagagaagagggattctgtgaacaacaagtgggtgacgtgcgcctcagctgtccagaaaaccacctttagagtaaccagacttcatgagggcatggaatataccttcagggtcagtgccgaaaataaatatggtgtaggggaaggcctgaaatcggagccaattgttgcgagacatccatttgatgtgcctgatgctcccccacctcccaatattgtggatgtcagacacgattcagtatctctaacttggactgaccccaagaaaactggtggttctccaattacagggtatcatctcgagttcaaggaaagaaacagccttttgtggaagagagctaacaagactccgataaggatgagagactttaaagtgacaggattaactgaaggtcttgaatatgaattccgagttatggcaatcaatttagcaggtgtgggcaagccaagcctaccatcagagcctgttgtggcactggacccaattgatcctcctggaaaacctgaggttattaacataacaaggaattcagtgactctcatttggactgaacctaaatatgacggtggtcataagttaactggatatatagtggagaagcgagatctaccttcgaagtcttggatgaaagccaaccatgttaatgtcccagaatgtgcctttactgtaactgaccttgttgagggtggaaaatatgaattcagaattagagcaaagaatacagcaggtgctatcagtgctccatcagaaagtacagaaaccattatttgcaaggatgaatacgaggcaccaacaattgtccttgatcccacaataaaagatgggctaacaattaaagcaggggataccattgttttgaatgccattagcattcttggcaaaccccttccaaaatcaagttggtccaaggcaggaaaagacattagaccatcagatatcactcagataacttcaaccccaacatcttccatgcttactatcaagtatgccactagaaaagatgcgggtgaatataccatcactgctaccaatccttttggcacgaaggtggaacatgtgaaggtaacagtccttgatgtacctggtcccccaggtcctgttgaaatcagtaatgtttctgctgaaaaagcaacacttacatggacacctcccttggaagatggcggctcaccaattaagtcctatatacttgaaaagagagaaaccagccgacttttgtggacagtggtttctgaagatattcagtcttgcaggcatgtggcaaccaaacttatccaaggaaatgagtacatcttccgggtctcagctgtaaaccactatggcaaaggagaacctgtacagtctgaacctgtcaaaatggtagacagatttggtccccctggccctcctgaaaaaccagaggtatcaaatgtcactaagaacactgccactgtcagctggaaaaggccagtggatgatggtggcagcgaaattacaggatatcatgtagaaaggagagaaaagaaaagcctgcgatgggtgagagcaataaaaacaccagtttccgatctcaggtgcaaagtaacaggactgcaagaaggaagcacctacgaattccgtgtcagtgcagaaaacagagcaggaattggtccacccagtgaggcttcagattctgttctgatgaaagatgcagcatatcctccaggaccaccttcaaatccgcatgtcactgatactaccaagaaatctgcttctttggcatggggcaagcctcattatgatggtggacttgaaatcactggctatgtcgtggagcatcaaaaagtaggagacgaggcctggataaaagataccacaggaaccgccctcagaatcactcagttcgttgttcctgatcttcagactaaagaaaaatacaacttcagaatcagtgccatcaacgatgcaggtgttggggagccagcggtgattccagatgttgaaatcgtagaacgggagatggctcctgattttgaactagatgccgagcttcgaagaacacttgttgttagagcaggactcagtattaggatatttgtgccaattaaaggtcgtcctgctcctgaagtgacatggaccaaagataacatcaacctgaaaaaccgagccaacattgaaaatacggaatcatttactcttctgattatcccagaatgtaacagatatgataccggtaaatttgtcatgaccattgaaaacccggctgggaagaaaagtggctttgtgaacgtcagagtcttggacacgccaggcccagtcctcaacctgcggcctacagacatcacaaaggacagtgtcaccctgcactgggacctccctctgatagatggaggctcacgtataacaaactacattgtagagaaacgtgaagcaacacggaaatcttattccacagccaccactaagtgccataaatgcacatataaagttaccggcttgtctgaagggtgtgaatatttcttcagagtgatggcagagaatgaatatggaattggtgagccaacagaaactacagagcccgtaaaagcctctgaagcaccatctccaccagacagccttaacatcatggacataactaagagcaccgtcagcctggcatggcctaagcccaaacacgatggtggcagcaagatcactggctatgtgattgaagcccaaagaaaaggctctgaccagtggacccacatcacaaccgtgaaagggttagaatgtgttgtgaggaatctaactgaaggagaggaatataccttccaagtgatggcagtgaacagcgcggggagaagtgcccctagagaaagcagacccgtcattgtcaaggagcagacaatgcttccagagctggatctccgtggcatctatcagaaactggtcattgccaaagctggtgacaacatcaaagttgaaattccagtgctcggtcgaccgaagcccacagtgacatggaaaaaaggagaccaaattcttaaacagacacagagagttaattttgaaaccacagcgacttcaaccattttaaatatcaatgagtgtgtcagaagtgatagtgggccctatccattaacagcaaggaacattgtaggagaggttggtgatgtcatcaccattcaagtccatgatatcccagggccacctactggaccaatcaaatttgatgaagtttcatctgattttgtaaccttctcttgggacccacctgagaacgatggtggtgtaccaataagcaactatgtagtggaaatgcggcagactgacagtactacctgggttgagttagcaaccaccgttatacgtactacctataaagccacccgccttactactggattagagtatcagttccgtgtaaaagctcagaatagatatggagttggaccaggcatcacatcagcatgcatagttgccaactatccatttaaggttcctggacctcctggtacccctcaggtaactgcagttaccaaggattcaatgacaattagctggcatgagccactttctgatggtggaagccccattttaggatatcatgttgaaagaaaagaacgaaatggtattctctggcagactgtgagcaaagctttagtaccaggcaacattttcaaatcaagtggacttacagatggtattgcttatgagttccgggtgattgcagaaaacatggcaggcaaaagtaagccaagcaagccatcagaacctatgttggctctggatcccattgacccacctggaaaaccagtacctctaaatattacaagacacacagtaacacttaaatgggctaagcctgaatatactgggggctttaaaattaccagttatatcgttgaaaagagagaccttcctaatggacggtggctgaaggccaacttcagcaacattttggagaatgaatttacagtcagtggcctaacagaagatgctgcatatgaattccgtgtgatcgccaaaaatgctgcaggtgccatcagtccaccatctgagccatctgatgctatcacttgcagggatgatgttgaggcaccaaagataaaggtggatgttaaatttaaggacacggttatattaaaagcaggtgaagcattcagactggaagctgatgtttcaggccgcccacctccaacaatggaatggagcaaagatggaaaagagctggaaggcacagcaaagttagaaataaaaattgcagatttctctactaatctggtaaacaaagattcaacaagaagggatagtggtgcctatacccttacagcgactaatcctggtggctttgctaaacacattttcaatgtcaaagttcttgacagaccaggcccacctgaaggacctttggctgtaactgaagtgacatcagaaaagtgtgtactatcatggttccctccactggatgatggaggtgccaaaattgatcattacatagtacagaaacgtgaaaccagcagattggcatggacaaatgtagcctcagaagtccaagtaacaaagctaaaggtcactaaactcttgaaaggcaatgaatacatattccgtgtcatggctgtaaataaatatggagtgggagagccactggaatcagagcctgtgcttgcagtgaatccttatggaccccctgatccgcccaaaaaccctgaagtgacaactattactaaagattcgatggttgtctgctggggacatcctgattctgatggtggaagtgaaatcatcaattatattgtggaacggcgtgataaagctggccaacgctggattaaatgcaacaaaaaaactcttactgatttaagatataaagtgtctggactgacagaaggacatgaatatgagttcaggattatggctgaaaatgctgctggaattagtgcaccaagtcctaccagtccattttacaaggcttgtgacactgtgtttaaacctggaccaccaggtaacccacgtgttctggatacaagcagatcatccatttcaatcgcttggaataaacctatctatgatggtggttcagaaatcactgggtatatggttgagattgccctgccagaggaagatgaatggcagattgtcactccaccagcaggactcaaggcaacttcgtatactatcactggcctcacagagaatcaggaatataagatccgcatctatgccatgaattccgaaggacttggggaacctgcccttgttcctggaactccaaaggctgaagacagaatgctgcctccagaaattgaactggatgctgacctgcgcaaagttgttactataagggcctgctgcaccctgagactttttgttcccatcaaaggaaggcctgcacctgaggtgaagtgggcccgggaccatggagaatctttagataaagctagcatcgaatccacaagctcttacaccctgcttattgttggaaatgtaaacagatttgacagtggcaaatatatactaactgtagaaaatagttcaggcagcaagtctgcatttgtcaatgttagagttctcgatacaccaggccccccacaggatctgaaggtaaaagaggtcactaagacatctgtcacactcacatgggacccacctctccttgatggaggttcaaaaatcaagaactatattgttgaaaagcgggaatcaacaagaaaagcatattcaactgttgcaacaaactgccacaagacttcctggaaggtagaccagcttcaagaaggctgtagctactatttcagggttctcgcagaaaatgaatatggcattgggctgcctgctgaaaccgcagaatctgtgaaagcatcagaacgacctcttcctccaggaaaaataactttgatggatgtcacaagaaatagtgtgtcactctcttgggagaaaccagagcatgatggaggcagccgaattctaggctacattgtggagatgcagaccaaaggcagtgacaaatgggccacgtgtgccacagtcaaggtcactgaagccactatcactggattaattcagggtgaagaatactctttccgtgtttcagctcagaatgaaaagggcatcagtgatcctagacaactgagtgtgccagtgatcgccaaagatcttgtcattccaccagccttcaaactcctgttcaatactttcactgtactggcaggtgaagacctaaaagttgatgttccattcattggccgccctaccccagctgtaacctggcataaagataatgtaccactgaagcagacaactagagtaaatgcagagagcacagaaaataattcactactgacaataaaggacgcctgccgagaagatgttggccattatgtggttaaactgactaactcagctggtgaagctattgaaacccttaatgttatcgttcttgacaaaccagggcctccaactggaccagttaaaatggatgaagtgacagctgatagtattactctttcctggggcccacccaagtatgatggtggaagttctatcaataattacattgttgagaaacgggacacttccacaaccacctggcaaattgtatcagctacagttgcaaggacaacaataaaggcttgcagactgaagactggatgtgaatatcagtttagaattgcagctgaaaacagatatgggaagagtacctacctcaattcagagcctactgtagcccaatatccattcaaagttcctggtcctcctggcactccagttgtcacactgtcctccagggacagcatggaagtacaatggaatgagccaatcagtgatggaggaagtagagtcattggctatcatctagaacgcaaggaaagaaatagcatcctctgggttaagttgaataaaacacctattcctcaaaccaagtttaagacaactggccttgaagaaggtgttgaatatgaatttagagtctctgcagagaacatcgtgggcattggcaagccgagtaaagtatcagaatgttatgtggctcgtgacccatgtgatccaccaggacggccagaggcaatcattgtcacaaggaattctgtgactcttcagtggaagaaacccacctatgacggtggaagcaagatcactggttatattgttgagaagaaagaattacctgagggccgttggatgaaagccagttttacaaatattattgacactcattttgaagtaactggcctagttgaagatcacagatatgagttccgggttatagcccgaaatgccgcaggagtgtttagtgagccttcagaaagcacaggagcaataacagctagagatgaggtagatccaccacgaataagtatggatccaaaatacaaagacacaatcgtggttcatgctggtgaatcattcaaggttgatgcagatatttatggcaaaccaataccaaccattcagtggataaaaggtgatcaggagctttcaaacacagctcgattagaaataaagagcaccgactttgccaccagtctcagtgtaaaagatgcagtacgtgtcgacagtggaaattacatactgaaggccaaaaatgttgcaggagaaagatcagttactgtgaatgtcaaggttcttgacagaccagggccacctgaaggacctgttgttatctcaggagttacagcagaaaaatgcacactagcttggaaacccccacttcaggatggtgggagtgacatcataaattatattgtggaaaggagagaaaccagccgcttagtttggactgtggttgatgccaatgtgcagactctcagctgcaaggttactaagcttcttgaaggcaatgaatatactttccgtataatggcagtaaacaaatatggtgttggtgaacctcttgaatctgagccagtagttgccaagaatccatttgtagtaccagatgcaccaaaagctccagaagtcacaacagtgaccaaggactcaatgattgttgtatgggaaagaccagcatctgatggtggtagtgaaattcttggatatgttcttgagaaacgggataaagaaggcattagatggacaagatgccataagcgtctgattggagagttgcgcctgagagtaactggactcatagaaaatcacgattatgagttcagagtttctgctgagaatgctgctggacttagtgaaccaagccctccttctgcttaccaaaaggcttgtgatcctatttataaaccaggacccccaaacaaccccaaagtcatagacataaccagatcttcagtattcctttcttggagcaaaccaatatatgatggtggctgtgaaattcaaggatacattgttgaaaaatgtgatgtgagtgttggtgaatggacaatgtgcactccaccaacaggaattaataaaacaaacatagaagtagagaagctgttggaaaagcatgaatacaacttccgtatctgtgctattaataaagctggagttggagaacatgctgacgtccctggacctattatagttgaagaaaaattagaagcaccagacattgatcttgacctagaactaaggaaaatcataaatataagggcaggtggctccttaaggttatttgttcctataaaaggtcgtcctacaccagaagttaaatggggaaaggtggatggtgaaatccgagatgcagctataattgatgtcactagcagtttcacctctcttgttcttgacaatgtcaaccgatatgatagtggaaaatatacgcttacattagaaaacagcagtggaacaaagtctgcctttgttactgtgagagttctggacacgccaagtccacctgttaacctgaaagtcacagaaatcaccaaagactcagtatcaattacatgggaacctcctttgttggatgggggatccaaaataaaaaattacattgttgagaaacgtgaagccacaagaaaatcatatgctgctgttgtaactaactgccataagaattcttggaaaatcgatcagctccaagaaggttgcagttattactttagagtcacagctgagaatgagtatggtattggccttcctgcccagactgctgatccaattaaggttgcagaagtgccacaacctcctggaaaaataactgtggatgatgtcaccagaaacagtgtctctctgagttggacaaaacctgaacatgatggtggcagtaaaatcattcagtatattgtggaaatgcaagctaaacacagtgagaaatggtcagagtgtgctcgagtaaagtctcttcaggcagtaattaccaacctaactcaaggggaagaatatctttttagagttgttgctgtaaatgaaaaggggagaagtgatcctcggtcccttgcagttccaatagttgccaaagatctggtaattgagccagatgtaaaacctgcattcagtagttacagtgtacaggttggccaagatttgaaaatagaagtgccaatttctggacgtcctaagccaaccattacctggactaaagatggtctcccactgaagcagaccacaagaatcaatgttaccgattcactggatctcaccacactcagtattaaagaaactcataaggatgatggtggacaatatggaatcacagttgccaatgttgttggtcagaagacagcatccatcgaaattgtaactctagataaacctgatcctccaaaaggacctgttaaatttgatgacgtcagtgctgaaagtattacattatcttggaaccctccattatatacagggggctgccaaatcaccaactacattgttcagaaaagagatacaaccaccacagtatgggatgttgtttctgctactgttgctagaactacactcaaagtgaccaaactgaaaactggtacagaataccaatttagaatatttgccgaaaacagatatggacaaagctttgccttagagtctgatccaattgtagctcaatatccctacaaagaaccaggccctccaggtacaccatttgccacagccatttccaaagactccatggtcatacagtggcatgaaccagtcaacaatggtggaagccccgtcataggttaccacctggagagaaaagaaagaaacagtattttgtggacaaaggtcaacaaaactattattcatgacacccaattcaaagcacagaatcttgaagaaggcattgaatatgaattcagagtgtatgctgaaaatattgttggtgtaggcaaagcaagcaagaattctgaatgctatgtagccagagatccctgtgacccaccaggaaccccagaaccaataatggttaaaagaaatgaaatcactttacagtggaccaaacctgtgtatgatggtggaagtatgattacaggctacattgtagagaaacgtgatttgcctgatggtcgttggatgaaagctagctttacaaatgtcattgaaactcaatttactgtgtcaggtcttactgaagatcaaagatatgaattcagagtcattgcaaagaatgcagctggtgcaataagtaaaccctctgacagtactggaccaataactgccaaggatgaggttgaactcccaagaatttcaatggatccaaaattcagagacacaattgtggtaaatgctggagaaacattcagacttgaggctgatgtccatggaaagcccctacctaccattgagtggttaagaggagataaggaaattgaagaatctgctagatgtgaaataaagaacacagatttcaaggctttacttattgtaaaagatgcaattagaattgatggtgggcagtatattttaagagcttccaatgttgcaggttctaagtcattcccagtaaatgtaaaagtattagatagaccaggacctccagaagggccagtccaggttactggagtcacttctgaaaaatgctctttaacatggtctccaccacttcaagatggtggcagtgacatttctcactatgttgttgaaaagcgagaaaccagtcgacttgcctggactgttgttgcttcagaagttgtgaccaattctctgaaagttaccaaactcttagaaggtaatgaatatgttttccgtataatggctgtcaacaaatatggtgttggagagcctttggaatctgcaccagtactaatgaaaaatccatttgtgcttcctggaccaccaaaaagcttggaagtcacaaatattgccaaagactccatgaccgtctgttggaaccgtccagatagtgatggtggaagtgagattattggttacattgtagagaaaagagacagaagtggcattcgatggataaaatgtaataaacgccgcattacagatttgcgtctaagagtgacaggattaacagaagatcatgagtatgaattcagggtctctgcagaaaatgctgctggagttggggaaccaagtccagctacagtttattataaagcctgtgatcctgtgttcaaacctggcccacctaccaatgcacacattgtagacaccactaaaaattcaatcacacttgcctggggtaaacccatctatgatggcggcagtgagatcttgggatatgtagtagaaatctgtaaagcagatgaagaagaatggcaaatagttactccacagactggcctgagagtcactcgatttgaaatttcaaaactcactgaacaccaagagtataaaatacgagtctgtgccctcaacaaagttggtttaggtgaggctacatcagttcctggtactgtgaaaccagaagataaacttgaagcacctgaacttgaccttgactccgaattaagaaaaggaattgttgtaagagctggtggatctgccagaattcacattccattcaaaggtcgtccaacgcctgagatcacttggtctcgagaggaaggtgaattcacagataaggtccaaattgaaaagggagtaaactatacccaactatcaatagataactgtgatagaaatgatgctggaaaatacattcttaagttggaaaacagcagtggatcaaagtctgcttttgtaactgtgaaagttcttgacactccaggaccaccacagaatttggcagtcaaagaagtgagaaaagattctgccttcctggtatgggagccacccatcattgatggaggggcaaaggtcaagaactatgtgattgacaaacgtgagtcaaccagaaaagcgtatgctaatgtgagtagtaaatgcagcaaaacaagttttaaagtggaaaaccttacagaaggagccatttattacttcagagtcatggctgaaaatgaatttggagttggtgttccagtggaaactgttgatgccgtgaaagctgctgaacctccttccccaccaggaaaggttacactcactgatgtgtcccagaccagtgcatcacttatgtgggagaaacctgaacatgatggcggtagcagagtcctggggtacgttgttgaaatgcagcccaaaggaactgaaaaatggagcattgtggctgaatccaaagtctgtaatgcagttgttactggtttgagttctggacaagaatatcagttccgtgtcaaggcttataatgagaaaggaaaaagcgatccaagagtgttgggtgttcctgtcatagccaaggacttgactatacagcctagtttaaagttaccatttaacacatatagtatccaagctggagaagatcttaaaatagaaattccagttataggccgaccaagacctaacatttcttgggtcaaagatggtgagcctcttaaacagacaacaagagtaaacgttgaagaaacagctacctcaactgttttgcacattaaagaaggtaacaaagatgactttggaaaatacaccgtaacggcaacaaatagtgcaggcacagcaacagaaaatctcagtgttatcgttttagaaaagcctggacctccagttggcccagttcggtttgatgaagttagtgcagactttgtagtcatatcttgggaacctccagcctatactggtggctgccaaataagcaactacattgtagagaagcgagatacaaccaccaccacttggcacatggtatcagcaacagttgcaagaacaacaattaaaataaccaaactgaaaacaggcacggagtaccagtttagaatttttgctgaaaacaggtatggaaaaagtgccccactggattctaaggcagttattgtacaatatccatttaaagaacctggaccacctggaactccttttgtgacatcaatctcaaaagatcagatgcttgtgcaatggcatgagccagtgaatgatggaggcaccaaaattattggctaccatcttgaacagaaagaaaagaacagtattttatgggtcaagttaaataagacccccattcaggacaccaaattcaaaacaactgggcttgatgagggccttgagtatgagttcaaagtttctgctgaaaatattgttggcattggcaagcctagcaaagtgtcagaatgctttgttgctcgtgatccatgtgacccacctggtcgccctgaagccattgttattacaagaaacaatgtcacactgaaatggaagaaacctgcctatgatggtggtagcaaaataacaggttatattgtagaaaagaaagatctacctgatggccgctggatgaaagccagctttaccaacgtattagaaactgaatttacagtgagtggacttgtagaagaccaaagatatgaatttagagtaattgcaagaaatgcagctggaaactttagtgaaccatctgatagtagtggtgccattactgcaagagatgaaattgatgcaccaaatgcctctctggatccaaaatataaagatgtcatcgttgttcatgcaggagagacttttgttcttgaagccgacatccgtggcaaacctatacctgatgttgtttggtcaaaagatggaaaagaacttgaagaaacagctgctagaatggaaattaaatctactattcagaaaacaactcttgttgtcaaagactgtatacggactgatggaggacaatatattctgaaactcagcaatgttggtggtacaaagtctatacccatcactgtaaaggtacttgacaggccagggcctcctgaagggcctctgaaagttactggagttactgcggaaaaatgttacctggcatggaacccacctttgcaagatggtggtgctaatatttcacattacatcattgaaaagagggagacaagccgactctcttggacccaggtttcaactgaggtacaggcccttaactacaaagttactaaacttcttcctggtaatgagtacattttccgtgtcatggctgtgaataaatatggaattggagagcccttggaatctgggcctgttacggcctgtaatccttataagccaccaggtcctccctcaacacctgaagtctcagcaatcaccaaagattctatggtagtaacatgggcacgcccagtagacgacggaggtaccgaaattgagggctacattcttgaaaaacgagataaggaaggcgttagatggaccaagtgcaacaagaaaacattaacggatctgcggctcagggtaactggtcttaccgaaggccattcctatgaattcagagttgctgctgaaaatgcagctggtgtgggagaacctagtgagccatctgttttctaccgtgcgtgtgatgccttgtatccaccaggtcccccaagcaatccaaaagtgacggacacttccagatcttctgtctccctggcatggagtaagccaatttatgatggtggcgcacctgttaaaggctatgttgtagaggtcaaagaagctgctgcggatgaatggacaacctgcactccaccaacaggattacaaggaaagcagttcacagtgaccaagcttaaagaaaacactgaatataacttccgtatttgtgccatcaattctgaaggtgtaggtgaacctgcaactctacctggctcagtggttgctcaggagaggatagagccaccagaaatagaactcgatgctgatctcagaaaggtggtcgttctgcgtgcaagtgctactttacgcttatttgtcactatcaaaggtcgaccagaacccgaagttaaatgggaaaaggcagaaggcattctcactgacagggctcagatagaggtgaccagctcatttacaatgttggtgattgataatgttaccagatttgacagtggtcggtataatctgacattagaaaataatagtggctccaaaacagcttttgttaacgtcagagttcttgactcaccaagtgcccctgtgaatttgaccataagagaagtgaagaaagactcagtgacgttgtcctgggaaccaccacttattgatggtggagctaagattacaaactacattgtcgaaaaacgagaaactacaagaaaagcctatgctaccattacaaataattgcactaaaactactttcagaattgaaaatctacaagaaggatgttcttactacttccgagtcttggcttccaatgaatatgggattggtttgccagctgaaacaacagaacccgttaaagtgtctgaaccacccctcccacctggaagagtaactcttgttgatgtgacccgtaatacagctacaattaagtgggagaaaccagaaagtgatggtggcagcaaaattactggttatgtggttgaaatgcagactaaagggagtgaaaagtggagcacctgcacacaagttaagactctagaagcaactatatctggcttaactgcaggagaagagtatgtcttcagggtagctgcagttaacgaaaagggaagaagtgatccaagacaacttggagtgccagtaattgcaagggatattgaaataaagccttcagttgagcttcctttccatactttcaatgtaaaggctagagaacaacttaagattgatgtgccattcaaaggaagacctcaagctactgtgaactggagaaaagatggtcagactcttaaagagacaactagagtcaatgtttcttcttcaaagactgtaacatcactatctattaaggaagcttcaaaggaagatgttggaacttatgaattatgtgtttcaaacagtgctggatccataacagttcctattactataattgtccttgacagaccaggacctccaggtcctatacgtattgatgaggttagttgtgacagcataaccatttcttggaatcctccagaatatgatggtggctgccaaattagcaattacattgttgaaaagaaagaaaccacctctacaacatggcacatagtttcacaagcagttgcaagaacatccattaaaatagttcgcctgacaacaggaagtgagtatcagttccgtgtttgtgcagaaaaccgctatggaaagagctcctacagtgaatcttcagctgttgttgcagagtatccattcagtcccccaggtcctcctggtactcctaaagttgtgcatgccacaaaatctaccatgcttgtaacctggcaagtgccagttaatgatggaggaagtcgagtaattggctatcatcttgagtataaagaaagaagcagcattctttggtcaaaagcaaataaaatcctcattgctgatactcaaatgaaagtctccggccttgatgaaggactgatgtatgagtatcgtgtatatgctgaaaatattgctggaattggtaaatgcagtaaatcttgtgaaccagtccctgcaagagatccttgtgaccctcctggacaacctgaagtcacaaatatcacaagaaaatcagtgtcacttaaatggtctaaaccacattatgatggtggagctaagatcacaggatacattgttgaacgcagagaactaccagatggccggtggctgaagtgcaattatactaatatacaagaaacatactttgaagtaactgaacttactgaagatcagcgttatgaattccgggtttttgcaaggaatgctgctgactcagttagtgagccatctgaatccactgggcctattatagttaaagatgatgttgagcctccaagagttatgatggatgtcaagttccgagacgttattgttgtcaaagctggagaggtccttaagataaatgcagacattgcagggcgacctctgccagtaatttcctgggccaaggatggtatagaaattgaagaaagagcaagaacagaaatcatctcaacagacaatcatactttgttaacagttaaagactgtataagacgagacactgggcaatatgtactaacactgaagaatgttgccggcactcggtctgtggccgttaattgcaaagtacttgataagcctggtccaccagcaggaccacttgaaataaatggcctcactgctgagaaatgctctctttcctggggacgtccccaagaagatggtggtgcagatatcgactattacatcgtagaaaaacgtgaaacaagccaccttgcatggacaatatgtgaaggagagttacagatgacatcctgtaaagtaaccaagttactcaaaggcaatgaatatatatttagagtaactggtgttaataaatatggtgttggtgagcccctagagagtgtagctataaaggcactagatccatttacagttccaagtccacccacgtctttggaaattacttctgtgaccaaagaatctatgacactttgctggtcaagacccgagagtgatggaggtagtgaaatatctggatatataattgaaaggcgagagaaaaatagcctaagatgggtgcgtgtaaacaaaaaaccagtttatgatctaagagtgaaatcaacaggacttcgggaaggatgtgaatatgaatatcgtgtttatgcagaaaatgctgctggcctaagtcttccaagtgaaacctctcccttaattagggcagaagatccagtgttcctaccatctcctccatccaaacccaaaattgtggactcaggcaagacaactataactattgcctgggttaagccgctgtttgatggtggggccccgataactggatatactgtagaatacaaaaaatctgatgacactgactggaaaacttccattcagagcttacgagggacagaatatacaataagcggactaacaacaggagctgaatatgttttcagagtaaaatctgtcaataaggttggtgctagtgaccccagtgatagctctgaccctcagatagcaaaggaaagagaagaagaacctttatttgatattgacagtgaaatgaggaagaccttgattgtcaaggctggtgcctcatttaccatgactgtgcctttccgaggaagaccagtacccaatgtcttgtggagtaagccagacactgacctccgtactagagcttatgttgataccacagactcccgtacatcactgaccattgaaaatgccaacagaaatgactctggaaagtacacattaacaattcagaatgttttgagtgctgcttcactgaccttagttgtcaaagttttagataccccaggtcctccaaccaacattactgtgcaagatgtaaccaaagagtctgcagtgttatcctgggatgttcctgaaaacgatggtggagcaccagtgaagaattaccacatagaaaaacgtgaggccagcaagaaagcatgggtctctgtgaccaacaactgtaaccgcctctcctacaaagttaccaatttacaagaaggagctatctattacttcagagtctctggagaaaatgagtttggtgttggtataccagctgaaacaaaggaaggagtaaaaataacagaaaaaccaagcccacctgaaaaacttggagtaacaagtatatccaaagacagtgtttccctgacctggctgaagcctgaacatgatggcggaagcagaattgtacactatgtcgttgaagcactagaaaaaggacagaaaaactgggttaaatgtgcagtggcaaagtcaacccatcacgttgtttccggtctgagagagaattctgaatactttttccgagtgtttgctgaaaatcaagctggcctgagtgacccgagagagcttctgcttcctgttcttattaaggagcaactagaaccacctgaaattgatatgaagaatttcccaagtcacactgtatatgttagagctggttcaaaccttaaagttgacattccaatctctggaaaaccacttcccaaagtgaccttatcaagagatggtgtcccccttaaggcaaccatgagatttaataccgaaattactgctgagaacctgaccatcaatctcaaagaaagtgttacagctgacgctgggagatatgaaatcactgctgccaactccagtggtacaaccaaagctttcattaacattgttgtgctagacaggcctggtcctccaactggccctgttgttattagtgatataactgaagaaagtgtgactctcaaatgggagccacctaagtatgacggtggaagtcaagttaccaactacattctactcaaaagagaaacaagtactgcagtgtggactgaagtgtctgcaacagttgcaagaaccatgatgaaagtcatgaaactgaccacaggagaagaataccaattccgcatcaaggcagaaaaccgctttggcatcagtgatcatatagattcagcttgtgtgactgtcaaactaccatacacaacacctggaccaccatctacaccatgggtcactaatgttactcgagaaagcatcactgtgggctggcatgaaccagtgtcaaatggaggcagtgcagtcgtaggctatcacctggaaatgaaagacagaaacagtattttatggcaaaaagccaacaaactggtcatccgcacaactcacttcaaagtcacaacaatcagtgctggacttatttatgaattcagggtgtatgcagaaaatgctgctggagttggaaaacctagccatccttctgaaccagtcttggcaattgatgcttgtgaacccccaagaaatgttcgtatcactgatatttcaaagaactctgtcagcctttcatggcaacaaccagctttcgatggaggtagcaagattacaggctacattgttgagagacgtgaccttccagatggcagatggaccaaggccagcttcaccaatgttactgaaactcaattcatcatctctggcttgactcagaattcccagtatgaattccgtgtctttgctaggaatgctgttggttccattagcaatccatctgaggttgtagggcccattacttgcatcgattcttatggtggtcctgtaattgatttgcctctagaatatacagaagttgtcaaatacagagcaggtacatctgtgaagctcagagctggcatttctggcaaacctgcgcctactattgagtggtataaagatgataaagaattacaaaccaatgcactggtgtgtgttgaaaataccacggacctcgcatctatactcatcaaagatgccgatcgccttaatagtggatgctatgaattaaaactaaggaatgccatgggctcagcctcagccaccatcagagtacagatccttgacaaaccaggcccacctggtggaccaattgaatttaagactgtaactgctgagaagatcacccttctctggcggcctccagctgatgatggtggtgcaaaaatcactcactacattgtggaaaagcgtgagacaagccgcgttgtgtggtctatggtgtctgaacatttggaagagtgcatcattacaaccaccaaaattatcaaaggaaatgaatacatcttccgggtccgagccgtgaacaaatatggaattggcgagccactggaatctgattccgttgtagccaagaacgcatttgttacacctgggccaccaggcataccagaagtgacaaagattaccaagaattcgatgactgttgtatggagcaggccaattgcagatggcggtagtgatataagtggctatttccttgaaaaacgagacaagaagagcctaggatggtttaaagtactaaaagagactatccgtgacaccagacaaaaagtaacaggactcacagaaaacagtgactatcaatacagagtttgtgctgtaaacgctgctggacagggtccattttctgaaccatctgaattctacaaagctgctgatcctattgatcctccaggtccacctgctaagataagaatcgcagattcaaccaagtcatccatcacccttggctggagtaagcctgtctatgatgggggcagtgctgttactgggtatgttgtcgagataagacaaggagaggaagaggaatggactactgtctctaccaaaggagaggtcagaactacagaatatgtggtatccaacctgaaacctggagtcaattactacttccgggtatctgctgtaaactgtgctggacaaggagaacctatagaaatgaatgaacctgtacaagctaaagatatacttgaggcaccagagattgacctggatgtggctctcagaacttctgttattgccaaagctggtgaagatgtacaagtgttgattccctttaaaggcagacctccacctactgtcacatggagaaaagatgagaagaatcttggcagtgatgccagatacagcattgaaaacactgattcatcctcattactcaccattcctcaagttactcgcaatgatacaggaaaatatattctcacaatagaaaatggagttggtgaacctaagtcttcaactgtgagtgttaaagtgcttgacacaccagctgcctgccagaaactacaggttaaacatgtttctcgaggcacagtcactttgctctgggatcctcctctcattgatggaggatctccaataattaattatgtcattgaaaagagagatgccaccaagagaacatggtctgtcgtgtcacacaaatgttctagcacatccttcaagctaatagatttgtcggagaagactccattcttcttcagagttcttgcagaaaatgaaattggaattggggaaccctgtgaaactacagagccagtgaaggctgctgaagtaccagctcctatacgtgatctctcaatgaaagactcaacaaagacatctgtcatcctcagctggaccaaacctgactttgatggtggtagcgtcatcacagaatatgttgtagaaaggaaaggtaaaggtgaacagacgtggtcccacgctggcataagtaagacatgtgaaattgaggttagccaacttaaggagcagtcagtcctggagttcagagtgtttgccaaaaatgagaaaggactgagtgatcctgtcactattgggccaattacagtgaaagaacttattattacacctgaagttgacctgtcagatatccctggggcacaagtcactgtgagaattgggcacaatgtgcaccttgaattaccttataagggaaaacccaaaccatccatcagttggctgaaagatggcttgccactgaaagaaagtgaatttgttcgcttcagtaaaactgaaaacaaaattactttgagtattaagaatgccaagaaggagcatggaggaaaatacactgttattcttgataatgcagtgtgtagaattgcagtccccattacagtcatcacccttggcccaccatcaaagcccaaaggacccattcgatttgatgaaatcaaggctgatagtgtcatcctgtcatgggatgtacctgaagataatggaggaggagaaattacttgttacagcatcgagaagcgggaaacttcacaaactaactggaggatggtgtgttcaagtgttgccagaacgactttcaaagttcctaatctagtcaaagatgctgagtaccagtttagagtgagagcagaaaacagatacggagtcagccaaccacttgtctcaagcattattgtggcaaaacaccagttcaggattcctggtcccccaggaaagccagttatatacaatgtgacttctgatggcatgtcactaacttgggatgctccagtttatgatggtggttcagaagttactggattccatgttgaaaagaaagaaagaaatagcatcctctggcaaaaagttaatacatcaccaatctctggaagagaatatagagccactggactggtagaaggtctggattaccaattccgtgtatatgctgaaaattctgctggcctaagctcacctagtgacccaagcaaatttaccttagctgtttctccagtagacccacctggcactcctgactacattgatgtcacccgggaaaccatcacacttaaatggaacccaccattgcgtgatggaggcagtaagattgtgggctatagcattgagaaacggcaaggaaatgaacgctgggtgagatgcaactttactgacgtcagtgaatgtcagtacacagttacaggactcagtcctggggatcgctatgagttcagaataattgcaagaaatgctgttggaactataagcccgccctcacagtcttctggcattattatgacaagagatgaaaatgttccaccaatagtagagtttggccctgaatactttgatggtctcattattaagtccggagagagccttagaattaaagctttggtacaaggaagaccagtgcctcgagtaacttggttcaaagatggagtggaaatcgaaaagaggatgaatatggaaataaccgacgtacttggatccaccagcctatttgttagagatgctactcgggaccatcgtggtgtatacacagtggaagccaaaaatgcatctggttctgcaaaagcagaaattaaagtgaaagtacaagatacaccaggaaaagtagttgggccaataagattcaccaatattactggggagaagatgactctgtggtgggatgccccactcaatgacggttgtgctcccataacccactacatcattgaaaaacgggaaaccagcagacttgcctgggcactaattgaggataaatgtgaagcccaaagttacactgccattaaactaataaacggcaatgaataccaattccgtgtttctgcagttaacaagtttggtgttggcaggccacttgattctgatccagtggttgctcaaatacaatatactgttcctgatgcccctggcattccagaacctagcaacataacaggcaacagcattaccctgacatgggcaaggccagaatcagatggtggcagtgaaattcaacagtatatccttgaaagaagagaaaagaaaagcacaagatgggtaaaagtgatcagcaaacgaccaatctctgaaacaagattcaaagtcactggtctgacagaaggcaatgagtatgaattccatgtcatggctgaaaatgctgcaggagttggacctgcaagtggcatctcaagactcattaaatgtagagagcccgtcaacccaccaggtcctcccacagtggtcaaagtaacagacacatcaaagacaactgtgagcttagaatggtccaaaccagtgtttgatggtggcatggaaataattgggtatattattgaaatgtgtaaggccgacttaggagactggcacaaggtgaatgcagaggcatgtgtgaaaacaagatatacagtcactgatctacaagcaggtgaagaatacaaattccgagttagtgctatcaatggtgctggaaaaggcgacagctgtgaagtgactggcacaattaaagcagttgaccggttaacagctcctgagttagacatagatgcaaacttcaaacagactcatgttgttagagctggggccagtattcgcctcttcattgcctaccaaggtagacctactcctacagctgtgtggagcaaaccagactctaaccttagccttcgggctgatatccatacaacagattccttcagcaccctcactgtggaaaactgcaacagaaatgatgcagggaaatatacccttactgtggaaaacaacagtggtagtaagtcaatcacattcaccgtgaaagtgctagacactccaggcccacctggcccaattaccttcaaagatgtgacccggggatctgctacattgatgtgggatgcccctcttcttgacggtggtgcccgaatccatcattatgtggtagagaaacgagaggcaagtcgccgtagttggcaggttatcagtgaaaaatgcactcgtcagatcttcaaggtcaatgacctggccgaaggtgttccgtactatttccgtgtttctgcagtaaatgagtatggtgttggtgagccctatgaaatgccagaaccaattgtagccacagaacagcctgctccacctaggagacttgatgttgttgatactagcaaatcctccgcagtcttagcttggcttaaacctgaccacgatggaggcagccggatcactggctacctgcttgaaatgagacaaaagggatctgacttctgggttgaagctggtcacaccaaacagctaactttcacagtagagcgtcttgttgagaaaactgaatatgaattccgtgtgaaggccaagaatgatgctggctatagtgaacccagagaagccttctcttctgtcatcattaaggagcctcaaatcgagcccactgctgacctcactggaattaccaatcagcttataacttgcaaagcaggaagcccatttaccattgacgtaccaatcagtggtcgtcctgcccccaaagtaacatggaaactggaagaaatgagacttaaagagacagatcgagtgagcattacaacaacaaaagacagaaccacactgactgtaaaggacagcatgagaggtgactctggaagatacttcttgaccctggaaaatacagctggtgttaaaacatttagcgtcacagttgtggtcattggaaggccaggtccagtaaccggccccattgaggtctcatctgtctcagctgaatcgtgtgtcctgtcatggggagaacctaaagatggaggaggcactgaaattactaattacatagttgaaaagcgtgaatcgggtacaacagcttggcagcttgtcaattccagtgtcaagcgcactcaaattaaagtcactcatctcacaaaatacatggaatattctttccgtgtcagttcagagaacagatttggtgtcagcaaacctctagaatcagcaccaataattgctgaacatccatttgtcccaccaagcgctcctaccagacctgaggtctaccatgtgtctgccaatgccatgtctattcgttgggaagaaccctaccacgatggtggcagtaaaatcattggctactgggttgagaagaaagaacgtaatacaattctttgggtgaaagaaaacaaagtgccatgcttagagtgcaactacaaagtaactggtttagtagaaggactggaatatcagttcagaacttatgcactcaatgctgcaggtgttagcaaggccagcgaagcttcaagacctataatggctcaaaatccagttgatgcaccaggcagaccagaggtgacagatgtcacaagatcaacagtatcactgatttggtctgccccagcgtatgatggaggcagcaaggttgtgggctacatcatagagcgtaagccagtcagtgaggtaggagatggtcgctggctgaagtgcaactacaccattgtatctgacaatttcttcaccgtgactgctctcagtgaaggagacacttatgagttccgtgtgttagccaagaatgcagcaggcgtaattagcaaagggtctgaatctacaggccctgtcacttgccgagatgaatacgctccacccaaagccgaactggatgcccgattacacggtgatctggttaccatcagagcaggttctgatcttgttctggatgctgcagttggtggcaaacctgaacccaaaattatctggaccaaaggagacaaggagctagatctctgtgaaaaagtctctttgcagtatactggcaaacgagcaactgctgtgatcaagttctgtgacagaagtgacagtggaaaatacactttaacagtgaaaaatgccagcgggaccaaggccgtgtctgtcatggtcaaagtgcttgattcccctggcccatgtggaaagctcaccgtcagcagagtaacacaggagaagtgcactttagcctggagccttccgcaggaagacggaggagcagaaatcactcactacatcgtggaaagacgcgagactagcaggctcaactgggtgattgttgaaggcgaatgcccaaccctatcctatgtcgttaccaggctcatcaagaacaatgagtacatattccgagtgagggcagtaaacaaatatggccctggtgtgcctgttgaatcagagccaattgtagccagaaactcattcactattccatcaccacccggcatacctgaagaagttgggactggcaaagagcatatcatcattcagtggacaaaacctgaatctgatggtggcaatgaaatcagcaactacctagtagacaaacgtgagaagaagagcctgcgctggacacgtgtcaacaaagactatgtggtgtatgataccaggctgaaggtgaccagcctgatggagggttgtgattaccagttccgggtgaccgcagtgaatgcagctggtaacagtgagcccagcgaagcttccaacttcatctcatgcagagaaccatcatatacccctggaccaccttctgctccaagagttgtggataccaccaaacacagcattagtttggcatggaccaaacccatgtacgatggtggtactgacattgtaggatatgttctggaaatgcaagagaaggacactgatcagtggtaccgagtgcataccaatgccacaataagaaatactgaattcactgtgccagaccttaaaatgggccagaaatattccttcagagttgctgccgtgaacgtgaagggtatgagcgaatacagcgaatcaattgctgaaattgagcccgtggaaagaatagaaataccagatcttgagcttgcagatgatctaaagaagactgtgaccatcagggctggggcctccttgcgcttgatggtgtctgtatctggaagaccacctcctgtcataacgtggagcaagcagggcattgaccttgcaagccgggcaattattgacaccactgagagctactcattgctaatagtggacaaagttaatcggtacgatgctggaaaatacacaattgaagctgaaaaccaatctggcaagaaatcagcaacagtccttgttaaagtctatgatactcctggtccctgtccttcagtgaaagttaaggaagtatcaagagattctgtgactataacttgggaaattcccacgattgatggtggagctccagtcaacaattacatcgttgagaagcgtgaagctgctatgagagcattcaaaacagtaactaccaaatgcagcaagacactttacagaatttctggacttgtagaaggaaccatgtactatttcagagtgctgccagaaaatatttatggcattggagaaccttgtgaaacatctgatgcagtactggtctcagaagtgcctttggtgcctgcaaagctagaagtggtcgatgtcaccaaatccactgttacccttgcctgggaaaaaccactctacgatggtggtagccgactcactggatatgttctcgaggcctgcaaagctggcacagagagatggatgaaggttgtcaccttaaaacccacagtcctagagcacactgttacttccttaaatgaaggtgaacaatacttatttagaataagggcacaaaatgagaaaggtgtgtcagaaccaagagagactgtcacagccgtgactgtacaagacctcagagtgttgccaacaatcgatctttctacaatgcctcagaagaccatccatgtcccagctggcagaccagtagagctggtgatacctattgctggccgtccacctcctgctgcttcctggttctttgctggttctaaactgagagaatcagagcgtgtcacagttgaaactcacactaaagtagctaaattaaccatccgtgaaaccactatcagagatactggagaatacacacttgaattgaagaatgttaccggaactacttcagaaaccattaaagttatcattcttgacaagcctggtccaccaacaggacctattaagattgatgaaattgatgctacatcaattaccatttcctgggaaccacctgaattggacggtggtgctccactgagtggttatgtggtagaacaacgtgacgctcatcgtccaggatggctgcccgtttctgaatcagtgactaggtccacgtttaagtttaccagactcaccgaaggaaatgagtatgtgttccgtgtggctgcaacaaaccgcttcgggattggctcttacttgcagtctgaggtcatagagtgtcgcagcagcatccgtattcctggacccccagaaacattacagatatttgatgtttcccgtgatggcatgacacttacttggtacccaccagaggatgacggtggctcccaagtgactggatatattgtggagcgcaaagaagtgagagcagatcgatgggtccgtgtaaataaagtacctgtgacaatgacacggtaccgctccactggccttactgaaggcttagaatatgaacaccgtgtcacagccattaatgcaagagggtctgggaaaccaagtcgtccttccaaacccatcgttgccatggatccaattgctcctccaggaaagccacaaaacccaagagttactgatacaacaaggacatcagtctccctggcctggagtgttccagaagatgaaggaggatctaaagtcacaggctacttgattgaaatgcaaaaagtagatcaacatgaatggaccaagtgtaacaccactccaaccaagattcgagagtatactctaacacacctacctcagggtgcagaatacaggttccgcgtcctagcttgtaatgctggtggacctggtgagcctgctgaggtaccaggaacagtcaaagtcactgaaatgcttgaatatcctgattatgaacttgatgaaagataccaagaaggtatctttgtaaggcaaggtggcgtcatcagacttaccataccaatcaaaggaaaaccattcccaatatgtaaatggaccaaggaaggccaggatattagtaagcgtgccatgattgcaacatctgaaacacacactgagcttgtgatcaaagaagcagacaggggtgattctggcacttatgacctggttctggaaaataaatgtggcaagaaggctgtctacatcaaggtcagggtgataggaagtcccaacagtccagaagggccactggaatatgatgacatccaagtccgctctgtgagggtcagctggagacctcctgctgatgatggtggtgctgacatcttaggctacatcctcgagagacgagaagtgcctaaagccgcctggtataccattgattccagagtccgaggtacatctctggtggtaaaaggcctcaaagagaatgtagaataccatttccgtgtttcagcagaaaaccagtttggcataagcaaacccttgaaatctgaggaaccagtcacaccaaaaacaccattgaatcctccagaacctccaagcaatcctccagaagtactcgatgtaaccaagagttctgttagcttgtcctggtcccggcccaaagatgatggtggttctagagtcacaggctactacatcgaacgcaaagagacatccactgacaagtgggtcagacacaacaagactcagatcaccaccacaatgtacactgtcacagggcttgttcccgatgctgagtatcagttccgcatcatcgcacagaatgatgttggcctgagtgagaccagccctgcttctgaaccagttgtttgcaaagatccatttgataaaccaagccaaccaggagaacttgagattctttcaatatccaaagatagtgtcactctacagtgggagaaacctgaatgtgatggtggtaaagaaattcttggatactgggttgaatatagacagtctggagacagtgcctggaagaagagcaataaggaacgtattaaggacaagcaattcacaataggaggtttgctggaagctactgagtatgaattcagggtttttgctgagaatgagactgggctgagcagacctcgcagaactgctatgtctataaagactaaactcacatctggagaggccccaggaatacgcaaagaaatgaaggatgttaccacaaaattgggtgaagctgctcaactctcatgccagattgttggaaggcctcttcctgacattaaatggtacagatttggtaaagagctcatacaaagccggaaatacaaaatgtcttcagatggacgcacacacactcttacagtaatgacagaggaacaggaagatgaaggtgtttatacctgcatagccaccaatgaggttggagaagtagaaaccagtagtaagcttctcctgcaagcaacaccgcagttccatcctggttacccactgaaagagaaatattatggagctgtgggttccacacttcggcttcatgttatgtacattggtcgtccagtacctgccatgacttggttccatggtcagaaacttttgcaaaactcagaaaacattactattgaaaacactgagcactatactcatcttgtcatgaagaatgtccaacgtaagactcatgctgggaaatacaaagtccagctcagcaatgtttttggaacagttgatgccatccttgatgtggaaatacaagataaaccagacaaacctacaggaccaattgtgatcgaagctctattgaagaactccgcagtgatcagctggaaaccacccgcagatgacggaggctcctggatcaccaactatgtggtggaaaaatgtgaggccaaggagggggctgaatggcaattggtgtcttcagccatctcagtgacaacctgtagaattgtgaacctcacagaaaatgctggctattacttccgggtttcagctcagaacactttcggcatcagtgaccctctagaagtgtcctcagttgtgatcattaagagtccatttgaaaagccaggtgctcctggcaaaccaactattactgctgtcacaaaagattcttgtgttgtggcctggaagccacctgccagtgatggaggtgcaaagattagaaattactaccttgagaagcgtgagaagaagcagaataaatggatttctgtgacaacagaagaaattcgagaaactgtcttttcagtgaaaaaccttattgaaggtcttgaatacgagtttcgtgtgaaatgtgaaaatctaggtggggaaagtgaatggagtgaaatatcagaacccatcactcccaaatctgatgtcccaattcaggcaccacactttaaagaggaactgagaaatctaaatgtcagatatcagagcaatgctaccttggtctgcaaagtgactggtcatccaaaacctatcgtcaaatggtacagacaaggcaaagaaatcattgcagatggattaaaatataggattcaagaatttaagggtggctaccaccagctcatcattgcaagtgtcacagatgatgatgccacagtttaccaagtcagagctaccaaccaagggggatctgtgtctggcactgcctccttggaagtggaagttccagctaagatacacttacctaaaactcttgaaggcatgggagcagttcatgctctccgaggtgaagtggtcagcatcaagattcctttcagtggcaaaccagatcctgtgatcacctggcagaaaggacaagatctcattgacaataatggccactaccaagttattgtcacaagatccttcacatcacttgttttccccaatggggtagagagaaaagatgctggtttctatgtggtctgtgctaaaaacagatttggaattgatcagaagacagttgaactggatgtggctgatgttcctgacccacccagaggagtcaaagttagtgatgtctcacgagattctgtcaacttaacatggactgagccagcctctgatggtggcagcaaaatcaccaactacattgttgaaaaatgtgcaactactgcagaaagatggctccgtgtaggacaggcccgagaaacacgttataccgtgatcaacttatttggaaaaacaagttaccagttccgggtaatagctgaaaataaatttggtctgagcaagccttcagagccttcagaaccaaccataaccaaagaagataagaccagagctatgaactatgatgaagaggtagatgaaaccagggaagtctccatgactaaagcatctcactcttcaaccaaggaactctatgagaaatatatgattgctgaagatcttgggcgtggtgagtttggaattgtccatcgttgtgttgaaacatcctcaaagaagacatacatggccaaatttgttaaagtcaaagggactgatcaggttttggtaaagaaggaaatttccattctgaatattgctaggcatagaaacatcttacacctccatgaatcatttgaaagcatggaagaattagttatgatctttgagtttatatcaggacttgacatatttgagcgcattaacacaagtgcttttgaacttaatgaaagagaaattgtaagttatgttcaccaggtctgtgaagcacttcagtttttacacagtcataatattggacactttgacattagaccagaaaatatcatttaccaaaccagaagaagctctaccattaaaatcatagaatttggtcaagcccgtcagctgaaaccaggggacaacttcaggcttctattcactgccccagaatactatgcacctgaagtccaccagcatgatgttgtcagcacagccacagacatgtggtcacttggaacactggtatatgtgctattgagtggtatcaacccattcctggctgaaactaaccaacagatcattgagaatatcatgaatgctgaatatactttcgatgaggaagcattcaaagagattagcattgaagccatggattttgttgaccggttgttagtgaaagagaggaaatctcgcatgacagcatcggaggctctccagcacccatggttgaagcagaagatagaaagagtcagtactaaagttatcagaacattaaaacaccggcgttattaccacaccctgatcaagaaagacctcaacatggttgtgtcagcagcccggatctcctgtggtggtgcaattcgatctcagaagggagtgagtgttgctaaagttaaagtggcatccattgaaattggcccagtttctgggcagataatgcatgcagttggtgaagaaggaggacatgtcaaatatgtatgcaaaattgaaaattatgatcagtctacccaagtgacttggtactttggcgtccgacagctggagaacagtgagaaatacgaaatcacctacgaagatggagtggccatcctctatgtcaaagacattaccaaattagatgatggtacctacagatgcaaagtagtcaatgactatggtgaagacagttcttatgcagagctatttgttaaaggtgtgagagaagtctatgactattactgccgtagaaccatgaagaaaattaagcgcagaacagacacaatgagactcctggaaaggccaccagaatttaccctgcctctctataataagacagcttatgtaggtgaaaatgtccggtttggagtaactataactgtccacccagagcctcatgtaacatggtataaatcaggtcagaaaatcaaaccaggtgacaatgacaagaagtacacatttgagtcagacaagggtctttaccaattaacaatcaacagtgtcactacagatgatgacgctgaatatactgttgtggcaaggaacaaatatggtgaagacagctgtaaagcaaagctgacagtaaccctacacccacctccaacagatagtaccttaagacccatgttcaaaaggttactggcaaatgcagaatgccaagaaggccaaagtgtctgctttgagatcagagtgtctggcatccccccaccaacattaaaatgggagaaagatggtcagccactgtccctcgggcctaacattgaaattatccatgaaggcttggattattatgctctgcacatcagggacactttgcctgaagacacgggttattatagagtcacagccactaacacagctgggtccaccagctgccaggctcacctacaagtggaacgcctgaggtacaagaaacaggaattcaagagtaaggaggagcatgagcgacacgtacaaaaacaaattgacaaaaccctcagaatggctgaaattctttctggaactgaaagtgtaccactgacacaggtagctaaagaggctctgagagaagctgctgtcctttataaaccggctgtaagcaccaagactgtaaaaggggaattcagacttgagatagaagaaaagaaggaggagagaaaactccggatgccttatgatgtaccagagccacgcaagtataagcagactaccatagaagaagaccaacgcatcaagcagttcgtgcccatgtctgacatgaagtggtataaaaagatacgtgatcagtatgaaatgcctgggaaacttgacagagttgtacagaaacgacccaagcgcatccgcctttcaagatgggaacagttctatgtgatgcctcttccacgcattacagatcaatacagacctaaatggcgtattcctaaactgtcccaagatgatcttgagatagtgagaccagcccgccggcgtacaccttctcctgattatgacttttactaccgacctagaagacgttctcttggggacatctctgatgaagaattactcctccccattgatgactacttagcaatgaaaagaacagaggaagagaggctgcgtcttgaagaagagcttgagttaggtttttcagcttcacccccaagtcgaagccctccacactttgagctttctagcctacgttactcttcaccacaagctcatgtcaaggtggaggaaacaagaaaagacttcaggtattcaacctatcacatcccaacgaaggctgaagctagtacaagttatgcagaactgagggaacggcatgcccaggctgcgtacagacagccaaagcaacggcaaagaatcatggctgagagggaggatgaagagttgcttcgcccagttacgaccacccagcatctctcagaatacaaaagcgaacttgacttcatgtcaaaggaggaaaagtctagaaagaaatcaaggcgacaaagagaagtgacagaaataacagaaattgaggaagaatacgaaatctcaaaacatgctcaaagagaatcatcctcatctgcgtctagactactgagacgacggcgctccctgtctccaacttatattgagttaatgaggccagtgtctgagctgatccggtcacgtccacaaccggctgaggaatacgaagatgacacagaaagaaggtcacctactccagagagaactcgcccacgatcccccagccctgtgtctagtgagagatcactctcgagatttgagaggtctgcaagatttgatatcttttccaggtatgagtccatgaaagctgctttaaaaactcagaagacatcagaaaggaagtatgaagttttgagtcagcagcctttcacactggaccatgcccctcgaatcacactgagaatgcgctcgcacagggtaccatgtggccaaaatacacgttttattttaaatgttcagtctaagccaactgccgaggttaaatggtaccacaatggtgtggaactccaagaaagcagtaagattcattacaccaacacgagtggagtcctcaccctggaaattctggactgtcatactgatgacagtggaacctaccgtgctgtgtgcaccaactacaagggcgaagcttctgactatgcaacgttggacgtgacaggaggggattataccacctatgcttcccaacgcagagatgaagaggtccccagatctgttttccctgagctgacaagaacagaggcgtatgctgtttcatcatttaagaaaacatctgagatggaagcttcgtcttctgtcagggaagtgaaatcacagatgacggagacaagggaaagtctctcctcatatgaacactctgcatctgcagaaatgaaaagtgctgcattagaagaaaagtcactggaagaaaaatccacaaccagaaagatcaagacgactttggcagcaagaattctaacaaagccacggtccatgaccgtctacgagggcgagtctgcaaggttttcttgtgacaccgatggtgagccggtaccaactgtgacctggctgcgtaaaggacaagtgctaagtacttctgcccgccaccaagtgaccaccacaaagtacaaatcaacctttgagatctcttcagtccaggcttccgatgagggcaattacagcgtggtggtagaaaacagtgaagggaaacaagaagcagagttcactctgactattcaaaaggccagggtaactgaaaaggctgtgacatcaccaccaagagtcaaatccccagagcctcgggtgaaatccccagaagcagttaagtctccaaaacgagtgaaatctccagaaccttctcacccgaaagccgtatcacccacagagacaaaaccaacaccaacagagaaagttcagcacctcccagtctctgccccaccaaagattactcagttcctgaaagcagaagcttctaaagagattgcaaaactgacctgtgtggttgaaagcagtgtattaagggcaaaagaggtcacctggtataaagatggcaagaaactgaaggaaaatgggcatttccagtttcattattcagcagatggtacctatgagctcaaaatcaataacctcactgaatctgatcaaggagaatatgtttgtgagatttctggtgaaggtggaacgtctaaaaccaacttacaatttatggggcaagcctttaagagtatccatgagaaggtatcaaaaatatcagaaactaagaaatcagatcagaaaaccactgagtcaacagtaaccagaaaaactgaaccaaaagctcctgaaccaatttcctcaaaaccagtaattgttactgggttgcaggatacaactgtttcttcagacagtgttgctaaatttgcagttaaggctactggagaaccccggccaactgccatctggacaaaagatggaaaggccattacacaaggaggtaaatataaactctctgaagacaagggagggttcttcttagaaattcataagactgatacttctgacagtggactttatacttgtacagtaaaaaattcagctggatctgtgtcctctagctgcaaattaacaataaaagctataaaagatactgaggcacagaaagtctctacacaaaagacttctgaaattacacctcagaagaaagctgttgtccaagaggaaatttcccaaaaagccctaaggtctgaagaaattaagatgtcagaggcaaaatctcaagaaaagttagccctcaaagaggaagcttcaaaggttctgatttctgaagaagtcaagaaatcagcagcaacctccctggaaaaatccattgtccatgaggaaatcactaaaacatcacaggcatcagaagaagtcagaactcatgctgagattaaagcattttctactcagatgagcataaacgaaggtcaaagactggttttaaaagccaacattgctggtgccactgatgtgaaatgggtactgaatggcgtagagcttaccaactctgaggagtaccgatatggtgtctcaggcagcgatcagaccctaaccatcaagcaagccagtcacagagatgaaggaatcctcacctgcataagcaaaaccaaggaaggaatcgtcaagtgtcagtatgatttgacactgagcaaagaactctcagatgctccagccttcatctcacagcctagatctcaaaatattaatgaaggacaaaatgttctctttacttgtgaaatcagtggcgagccatcccctgaaatcgaatggtttaaaaacaacctgccaatttctatttcttcaaatgtcagcataagccgctccagaaatgtatactcccttgaaatccgaaatgcatcagtcagcgacagtggaaagtacacaattaaggccaaaaatttccgtggccagtgttcagctacagcttccttaatggtccttcctctagttgaagaaccttccagagaggtagtattgagaacaagtggtgacacaagcttgcaaggaagcttctcgtctcagtcagtccaaatgtctgcctccaagcaggaggcctccttcagcagtttcagcagcagcagtgctagcagcatgactgagatgaaatttgcaagcatgtctgcccaaagcatgtcctccatgcaagagtcctttgtagaaatgagttccagcagctttatgggaatatctaatatgacacaactggaaagctcaactagtaaaatgcttaaagcaggcataagaggaattccgcctaaaattgaagctcttccatctgatatcagcattgatgaaggcaaagttctaacagtagcctgtgctttcacgggtgagcctaccccagaagtaacatggtcctgtggtggaagaaaaatccacagtcaagaacaggggaggttccacattgaaaacacagatgacctgacaaccctgatcatcatggacgtacagaaacaagatggtggactttataccctgagtttagggaatgaatttggatctgactctgccactgtgaatatacatattcgatccatttaagagggcctgtgcccttatactctacactcattcttaacttttcgcaaacgtttcacacggactaatctttctgaactgtaaatatttaaagaaaaaaaagtagttttgtatcaacctaaatgagtcaaagttcaaaaatattcatttcaatcttttcataattgttgacctaagaatataatacatttgctagtgacatgtacatactgtatatagccggattaacggttataaagttttgtaccatttattttatgacattttacaatgtaagttttgaaactaactgttggtaggagaaagtttcttatggaacgaataccctgctcaacatttaatcaatctttgtgcctcaacatactgttgatgtctaagtatgcctcagtgggttgagaaaatccccattgaagatgtcctgtccacctaaaagagaatgatgctgtgcatatcacttgatatgtgcaccaatacctactgaatcagaaatgtaaggcattggtgatgtttgcatttaccctcctgtaagcaacactttaacgtcttacattttctctgatgatgtcacacaaaattatcatgacaaatattaccagagcaaagtgtaacggccaacactttgttcgctcattttacgctgtctctgacataaggagtgcctgaatagcttggaaaagtaacatctcctggccatcccttcatttaaccaagctattcaagtattcctatgccagagcagtgccaactcttggaggtcccagagtgcagccaatgcctttgtgtggtagttctaaattttaattgcacctgaaaaacctgggcacctaagcaatgagccacagcaaaaagtaaagaacaacaacaaaataaagctgttgttaaattttaaacaatattactaattgcccaaaatgtcaatttgatgtagttcttttcatgcaagtataaattcaattgttagttataattgttggacctccttgagatagtaacaacaaaataaagcaagctatctgcacctcaaaa

SEQ ID NO: 12699 - DNA, 82603 bp, Homo sapiens
agcagtcgtgcattcccagcctcgcctcgggtgtagggattgcatagaaaagcaaaactacacagtcttgactgtgtagttttgtttttaggattagaggctcaccgattcatgtcggagatggtcagaaaaaccaactctccataggacgtcgtttcagaagcaaccttgggcttagtcccaccctttttaggcactcttgagaaatcaagtgcctagaaagatgacaactcaagcaccgacgtttacgcagccgttacaaagcgttgtggtactggagggtagtaccgcaacctttgaggctcacattagtggttttccagttcctgaggtgagctggtttagggatggccaggtgatttccacttccactctgcccggcgtgcagatctcctttagcgatggccgcgctaaactgacgatccccgccgtgactaaagccaacagtggacgatattccctgaaagccaccaatggatctggacaagcgactagtactgctgagcttctcgtgaaagctgagacagcaccacccaacttcgttcaacgactgcagagcatgaccgtgagacaaggaagccaagtgagactccaagtgagagtgactggaatccctacacctgtggtgaagttctaccgggatggagccgaaatccagagctcccttgatttccaaatttcacaagaaggcgacctctacagcttactgattgcagaagcataccctgaggactcagggacctattcagtaaatgccaccaatagcgttggaagagctacttcgactgctgaattactggttcaaggtgaagaagaagtacctgctaaaaagacaaagacaattgtttcgactgctcagatctcagaatcaagacaaacccgaattgaaaagaagattgaagcccactttgatgccagatcaattgcaacagttgagatggtcatagatggtgccgctgggcaacagctgccacataaaacacctcccaggattcctccgaagccaaagtcaagatccccaacaccaccgtctattgctgccaaagcacagctggctcggcagcagtccccatcgcccataagacactccccttccccggtcagacacgtgcgggcaccgaccccatctccggtcaggtccgtgtctccagcagcaagaatctccacatcccccatcaggtctgttaggtctccattgctcatgcgtaagactcaggcatccaccgtggccacaggtcctgaagtgcctcccccttggaagcaagagggctacgtggcctcctcatctgaggctgagatgagagagacaacgctgacaacctctactcagatcaggacagaagagagatgggaagggagatacggtgtccaggagcaagtgaccatcagtggtgctgcgggtgctgccgccagtgtgtcggccagtgctagctacgcagcagaggctgttgccactggtgctaaagaggtgaaacaagatgctgacaaaagtgcagctgttgcgactgttgttgctgccgttgatatggccagagtgagagaaccagtgatcagcgctgtagagcagactgctcagaggacaaccacgactgctgtgcacatccaacctgctcaagaacaggtaagaaaggaagcggagaagactgctgtaactaaggtagtagtggccgccgataaagccaaggaacaagaattaaaatcaagaaccaaagaagtaattaccacaaagcaagagcagatgcacgtaactcatgagcagataagaaaagaaactgaaaaaacatttgtaccaaaggtagtaatttccgcagctaaagccaaagaacaagaaactagaatttctgaagaaattactaagaaacagaaacaagtaactcaagaagcaataatgaaggaaactaggaaaacagttgtacctaaagtcatagttgccacacccaaagtcaaagaacaagatttagtatcaagaggtagagaaggcattactaccaaaagagaacaagtgcaaataactcaggagaagatgagaaaggaagccgagaaaactgccttgtctacaatagcagttgctactgctaaagccaaagaacaagaaacaatactgagaactagagaaactatggctactagacaagaacaaatccaagttacccatggaaaggtggacgttggaaaaaaggctgaagctgtagcaacagttgttgctgcagtagaccaggcccgagtcagagagcccagagagcctgggcatcttgaagaatcctatgctcagcagaccactttggagtacggatataaggaacgcatttccgccgcaaaggtagctgagcctccccaacgtccagcctcagaaccccacgttgtccctaaagcagtcaagcctagagtaatccaggctccttctgagactcatatcaaaactactgatcaaaagggaatgcacatatcatcacagatcaagaaaactacagatctaacaacggaaagattagtccatgtggataaacgcccccgcacagctagccctcactttactgtttcaaaaatttctgttcctaagacagaacatggatatgaggcatcaatagccggtagtgctattgccacattacaaaaagagttgtcagccacatcttctgctcagaagatcaccaaatcggtgaaggctcctactgtgaagcccagtgagactagagtaagggcagagcccacacccttgccacagttccccttcgctgacacaccagatacttacaagagtgaagctggcgttgaggtgaaaaaggaagtaggggtgagcatcactggcaccaccgtccgtgaagagcgctttgaagtactgcacggacgcgaagccaaggtaacagaaacagcaagagtaccagcacctgttgaaattcctgttactccaccaactttggtctcgggcttaaaaaatgtgactgtcatagaaggtgaatctgtcaccttggagtgccacatctctggatacccatccccgacagtgacatggtacagggaagactaccaaatcgaaagttccattgacttccagataaccttccagagtggaattgctcgtcttatgattcgcgaagcatttgcggaagacagcgggcgatttacttgcagtgctgtaaatgaggctggaaccgtcagcacatcctgctatctggctgtgcaggtgtcagaagaatttgaaaaggaaaccacagccgtgactgagaaatttactacagaagagaaacgctttgttgagtcaagagatgtggttatgactgatactagcctcacagaggaacaagcagggcctggagaacctgccgcgccttactttattacaaaaccagtggtccagaaactggtggaaggtgggagcgtggtgtttggatgccaagttggcggcaacccaaagccccatgtatactggaaaaaatctggtgttcctctaaccactggatacagatacaaagtgagttacaacaaacaaaccggtgaatgcaagctggtgatttctatgacttttgctgatgatgctggagaatacactattgttgttcgcaataagcatggagaaacttctgcatctgcttccttgcttgaagaagctgattatgagttactgatgaagtcccagcaagaaatgctttatcagacacaagtgactgcatttgttcaagaacctaaagttggagaaacagcacctggatttgtatactctgagtatgaaaaagagtatgaaaaagaacaagccttaattaggaagaaaatggccaaagatactgtagtggtcagaacttatgtagaagatcaggaattccatatttcttcctttgaagagagacttattaaagaaattgaatatagaataataaagactacattagaagaacttcttgaagaagatggagaagaaaagatggcagttgacatttctgaatctgaagctgttgaatcaggatttgatttaagaatcaagaattatagaattcttgaggggatgggtgtcacttttcattgcaagatgtctggatatccattaccaaagattgcttggtacaaagatggcaagcgcatcaaacatggagaaagataccaaatggactttctacaagatggcagagctagtctgcgtatacctgttgttcttccagaagatgaaggaatctacactgcatttgccagcaatattaaaggaaatgcaatttgctcagggaaattgtatgtggagcctgctgcaccacttggagctccgacttacattcccacactagagccagtgagcagaatcagatctctctctccacgttcagtgagcaggtctcctatacgcatgtctcctgcacggatgtcacctgcaaggatgtctcctgcacggatgtcccctgcaagaatgtcccctggacgtaggctggaggagacagatgagtcacaacttgagagactatataaaccagtctttgtgttaaaacctgtttctttcaaatgtttagaagggcaaactgccagatttgacttaaaggttgttggtagacctatgccagagacgttctggtttcatgatggccagcaaattgtcaatgactatacccataaagtagtcattaaagaagatggtactcaatcactaattattgtccctgccacacccagtgattctggggaatggactgtggttgcccaaaacagggcaggcagatcttcaatttcagtgattttaactgtggaagctgtggaacatcaggtaaaaccgatgtttgtagaaaaactgaaaaatgtcaatataaaggaaggttcccgacttgaaatgaaagtcagagctacgggtaaccccaaccctgacattgtatggttgaaaaacagtgacatcattgtgcctcataaatatcccaaaatcagaattgaaggaaccaagggagaagctgcccttaaaatcgattccactgtcagccaagattctgcctggtatactgcgactgctattaataaagctggcagagacactacaagatgcaaagtaaatgttgaagttgagtttgcagagcctgagccagagagaaagttaatcatcccacgggggacatatagagcaaaggagattgcagccccagaactggagcccctccatttgcgatatggccaagagcaatgggaagaaggtgatctctatgacaaagagaaacaacagaaaccatttttcaagaaaaaactcacttccttaagacttaagcgctttgggcctgcccactttgaatgcaggctaacacccattggtgacccaacgatggtggtggagtggctccatgatggaaagccacttgaagcagccaacaggctccgtatgatcaatgaatttgggtactgcagccttgattatggcgttgcatattctagagacagtggtatcattacttgcagagccactaacaaatatggaacagatcacacatctgctacccttattgttaaagatgagaaaagtcttgtggaagaatcccaattgcctgaggggaggaaaggcttacagagaattgaagaattagagagaatggctcatgaaggtgcacttacaggtgtaacaacagatcagaaagaaaagcaaaagccagacattgtcttgtacccagagccagttagagtacttgaaggggagactgcaaggttccgctgcagggtaacaggctaccctcagcccaaagtcaactggtacctcaatggacagctcatccgcaaaagcaaaaggttcagagttcgctatgatggtatccattacctggacatcgtggactgcaaatcatatgacacaggtgaagtgaaggtcaccgcggaaaatcctgaaggtgtgatagagcataaagtgaagcttgagattcaacagagggaagattttaggtctgtccttaggagagctcctgaaccaaggcctgagtttcacgtacatgaaccaggaaagcttcagtttgaagtacaaaaagtggatagacctgttgacaccactgaaaccaaagaagttgtgaagttgaaaagggctgaaagaattacccatgaaaaagtgcctgaagagtcggaagagctgcgcagtaaattcaagcgcagaacagaagagggctattatgaagccattaccgctgtggagctcaagtctcgaaagaaggatgaatcctatgaggaactcctcaggaagacaaaagatgaacttctccactggaccaaagagttaactgaagaggaaaagaaagctcttgccgaagaaggcaaaatcacgattccaacttttaaacctgacaagattgaactaagtcctagtatggaggctccaaaaatcttcgaaagaatccagagccaaacagtgggccaaggatctgatgcacacttccgggtcagagtcgtggggaaaccagaccccgaatgtgaatggtacaaaaatggtgtcaaaattgaacggtctgaccggatctactggtactggcccgaagacaatgtttgtgaattggtcataagagatgtgactgctgaggactctgccagcatcatggtaaaagccatcaacatagctggagaaacctccagtcacgcattcttacttgtccaagccaagcaattgatcactttcacacaggaattacaagatgttgttgctaaggaaaaagacactatggcaacctttgaatgtgaaacttcagaaccatttgtcaaagtgaaatggtataaagatggtatggaggttcatgagggagataaatacaggatgcactctgacagaaaggttcacttcctctccatactgaccattgatacgtctgatgctgaagattacagctgtgtacttgtggaagatgaaaatgtcaaaacgactgctaaacttattgttgaaggtgcagttgttgagtttgtgaaagaacttcaggacatagaagttccagaatcatattcaggagaattagagtgcattgtatccccagaaaatatagaaggaaaatggtatcataatgatgtggagcttaaatccaatggcaaatatacaattacatctcgtcgtggacgtcagaacctcacggtcaaggatgtaaccaaggaggaccagggagaatacagctttgtcatcgacgggaaaaagacaacctgtaaattaaagatgaaaccccgccccattgctatcctacaaggacttagtgaccaaaaagtctgtgagggtgacattgttcagcttgaagttaaagtctccttggaaagtgtggaaggcgtctggatgaaagacggccaagaagtgcagcccagtgacagggttcacattgtgatagacaaacaatctcatatgctgctcattgaagacatgactaaggaagatgctggaaattactctttcaccattccagcccttggcctctccaccagtgggcgtgtctctgtctatagtgtggacgtgataacacctctaaaagatgttaatgtgattgaaggcaccaaggctgtgcttgaatgtaaggtgtcagtccctgatgtgacttctgttaagtggtacttaaatgatgaacaaatcaagcctgatgaccgtgtacaggccattgtgaaaggtactaaacagcgactagtcattaaccgaactcatgcttcagacgaaggaccttacaagctgatagttggcagagttgaaaccaactgtaatctctctgtagaaaaaattaaaattatcagaggtcttcgtgaccttacctgtacagaaactcaaaatgtggtgtttgaggttgagctgtcccactctggaattgatgtcctgtggaattttaaggacaaggaaatcaagcccagttctaaatataaaattgaagcacatggaaaaatatataaattgacagttctaaatatgatgaaagatgatgaaggaaaatacacattttacgcgggagaaaatatcacatctggaaaacttactgtggcaggtggggccatctccaagccactcacagatcagaccgtagctgaatcccaggaagctgtgtttgaatgtgaagttgccaacccagattccaaaggcgaatggttgagggatggcaaacacctaccactgactaacaacatcagaagtgagtctgatggccacaaaaggagacttatcattgctgccaccaaattagatgacattggagaatatacctacaaggtggccacctccaaaacatctgccaaactcaaagttgaagctgtcaaaattaagaagactctgaagaacctcacagtgacagaaacacaggatgctgttttcactgtcgagcttacacaccctaatgtcaaaggtgtccagtggatcaaaaatggagttgtgctggaatccaatgaaaagtatgctatctctgtcaaaggaacaatttactctctgaggattaaaaactgtgccatcgtggatgagtctgtttatggcttcaggcttggaaggcttggagccagtgccagactgcacgtggagactgtcaagatcattaaaaagccaaaggatgtgacagccttggaaaatgccactgttgcctttgaagttagtgtttcccatgacactgttccagtaaaatggttccataagagtgtggaaattaagccaagtgacaaacacagactggtctcagaaaggaaagtccacaagctgatgctgcagaacatctccccctcagatgctggggaatacacagctgtggtcgggcaattggaatgcaaagcaaaactgtttgtggagacattacatattacaaaaaccatgaaaaatatcgaggtgcctgagaccaaaactgcctcttttgagtgtgaggtgtcccacttcaatgtcccttccatgtggctgaagaatggtgtggaaattgagatgagtgaaaagttcaagatagttgtgcagggaaaactccatcagctgatcatcatgaacaccagcacagaggactcggcagaatacacatttgtctgtggcaatgaccaagtcagtgccaccctgacagtcaccccaatcatgattacttccatgctgaaagacatcaacgctgaagaaaaagacactattacttttgaggtgacagtgaactatgaaggcatctcttacaaatggttaaagaatggtgtggaaatcaaatcaactgacaagtgccagatgagaaccaaaaagctcacacactcactgaacatcaggaatgttcactttggggatgctgctgactacacctttgtggctggaaaagcaacatcaacagccacactttatgtggaagctcgtcatatagaatttaggaaacacattaaggacattaaggtactggagaagaagcgagccatgtttgaatgtgaagtttctgaacctgacatcactgtacagtggatgaaagatgaccaggaactgcagatcacagacagaataaagattcagaaggagaaatatgtccaccgccttctgatcccatccacccggatgtctgatgctgggaagtacacagtggtggcaggaggcaacgtgtcaactgcaaaactctttgtagaaggcagagatgttcgcatccgaagtattaaaaaggaggttcaggtcattgagaaacagcgtgctgttgttgaatttgaggtcaatgaagacgatgttgatgcccactggtataaagatggcattgaaatcaatttccaagttcaagaacgacacaaatatgtagtggaaagaagaatccaccgaatgtttatctctgagaccagacagagcgatgcaggagaatacacctttgtggcaggaaggaacaggagttctgtcactctctatgtcaatgctcctgaaccgccccaagttctgcaggagctccagcctgtcactgtgcagtctggcaagcctgcccgcttctgtgccgtgatatccggaagaccacagcccaaaatttcctggtacaaggaagagcagctgctttccactggcttcaagtgcaaatttcttcatgatgggcaagagtacacgcttttgctaattgaagccttcccagaggatgcggcagtctatacctgtgaagccaagaatgactatggtgttgccacaacatcagcttcactctcagtggaagttccagaagttgtgtctcctgatcaggaaatgcctgtttatccacctgccatcatcaccccgcttcaggacactgtcacttctgaagggcagccagcccgttttcaatgccgggtttctggaacagatctaaaagtgtcgtggtacagcaaagacaagaaaatcaagccatctcggttctttagaatgactcaatttgaagacacttatcaactggaaattgccgaagcttatccagaagatgaaggaacttacacgtttgttgctagtaatgctgtaggccaagtatcaagcacagccaacctgagtctggaagtgcaagccctagataggcaaagttctgggaaagatgtaagagagtccaccaagtcccaggcagtggcagattcctctttcacaaaggaggagagcaaaatatctcaaaaggaaattaagtcatttcaaggatcatcatatgaatatgaagtgcaggtttttgaaagtgtatctcaaagttccatccacacagctgcatctgttcaagatacacagttgtgccatactgcatccctttcacaaattgcagaaagcactgagctatctaaggaatgtgctaaagagtccacgggtgaggcgcccaagattttcctgcatcttcaggacgtcactgtaaagtgcggtgacacggctcaattcctctgtgttttaaaagatgattctttcattgatgtaacctggactcacgaaggtgcaaagatagaggaatccgagagactgaaacaatcacaaaatggaaatattcagtttcttaccatatgtaatgttcagctggtagaccaaggactatacagctgcattgtacacaatgactgtggagagaggacaacgtcagcagtactaagtgtagaaggtgctcctgaatcaattttgcatgagaggattgaacaagagattgagatggaaatgaaagagttttctagttcttttctgtctgccgaggaagaaggacttcatagcgccgaacttcaattatctaaaataaatgaaacacttgaacttttgtctgaatctccagtttactcaactaaatttgattccgaaaaggaaggcactggcccaattttcatcaaagaagtgtcaaatgctgatataagcatgggggatgtggctacactgtctgtaactgtcattggcatccccaaacctaaaattcagtggttctttaatggagtgctattaaccccttctgctgactacaaatttgtttttgacggtgatgatcatagcctgatcattctgttcaccaaattggaggatgagggagagtatacatgtatggccagtaatgactatggaaagacaatatgtagtgcctatctaaaaattaattccaaaggagagggtcacaaagacactgaaacagaatcagcagtggcaaaatctctggaaaagctgggaggtccttgtcctcctcacttccttaaggagttaaaaccaattcgctgtgctcaagggcttcctgccatctttgagtacacagtggttggagagcctgcccctactgttacatggttcaaagaaaacaagcagctttgcaccagtgtttattacactatcattcataaccctaatggctctggaactttcattgtcaatgaccctcagagggaagacagtggcctctatatctgtaaagcagagaatatgttgggtgagtccacctgtgcagcagagctgcttgtgcttctggaagacacagacatgactgataccccctgcaaagcaaagtccacaccagaggctcctgaggattttccacagacacccttaaagggtcccgcagttgaagcacttgactcagagcaggaaattgcaacgtttgtaaaagacaccattttgaaagctgctttaattacagaagaaaaccagcaactatcttatgagcatattgctaaagccaatgaattgagcagtcagcttcctttgggagctcaggaattgcaatccattttggagcaagacaagctcactcctgaaagcaccagggaatttctttgcatcaatggcagtattcactttcagcctctcaaggaaccatctcccaacctacagctgcagattgtacagtcccagaaaaccttctccaaagaaggtattctaatgcctgaagagcctgagacacaggcagttctatcagataccgagaaaatcttcccaagtgccatgtccatagaacaaattaattcattaacagttgagcctctgaaaactttattagctgaacctgaagggaattatccacagtcttcaatagaacctccaatgcattcttatctaacctctgtggctgaggaagtactttcaccaaaagaaaagacagtatctgacaccaacagagagcaaagagtgactcttcaaaagcaagaggcacaaagtgcgctcatcttgagtcagagcttagctgagggacacgtggagagtctccagagtcctgatgtcatgatctctcaggtaaactatgagcccctagtcccttcagaacactcatgcacagaaggaggtaaaattttgatagaaagtgcaaatccactggaaaatgcagggcaagattctgcggtcagaattgaggaaggcaagtccttaagatttccactagcacttgaagaaaagcaggtactgctcaaagaagagcattctgacaacgtggtgatgcccccagaccaaatcattgagtctaaaagagagcccgtggcaataaagaaagtgcaggaggtacagggaagggaccttctttctaaggaaagcttgctttctggtattccagaagagcagagattaaacctgaaaattcaaatctgccgggctttgcaagcagccgtggccagcgagcagccaggtcttttctctgagtggctaagaaatattgaaaaggtggaggtcgaggctgtaaacatcacccaagagcccagacacatcatgtgcatgtaccttgttacttcggcaaagtctgtaacagaagaagtaaccatcattattgaagatgttgatcctcaaatggctaacctgaaaatggaacttagggatgctttgtgtgctattatatatgaggaaatagacatcctaacagctgagggtcctagaattcagcaaggagccaaaacaagtttgcaagaagaaatggattctttttcaggttcacagaaggttgaacccattactgaaccagaagttgaatctaaatatctgatctcaactgaagaggtcagttattttaacgtgcaaagtagggttaaatatttggatgccacacctgtcactaaaggggttgcttcagctgttgtctctgacgaaaaacaagatgagagtctgaaaccatcagaggaaaaagaggagtcttcctctgaaagtggtactgaggaggttgctacagtaaagatacaggaagctgagggtggcttaatcaaagaggatggccccatgatacatacacctttagtggacactgtttctgaggaaggtgatattgtacacctcacaacatccataacaaatgctaaagaggtgaattggtattttgagaataaactggtgccttcagatgaaaagttcaagtgtttacaagatcaaaatacatatacgctagtcatcgacaaagtaaataccgaagaccatcaaggagagtatgtctgtgaggccttgaatgacagcggaaaaacagcaacttcagccaaactcactgtagtaaaaagagctgccccagtgatcaagaggaaaatcgaacccctggaagtagcactgggccacctagccaaattcacctgtgagatccaaagtgctcccaatgtccggttccagtggtttaaagctggccgagaaatttatgagagtgacaagtgttctattcgatcttcaaagtatatctccagccttgaaatcctgagaacccaggtggttgactgcggcgagtatacatgcaaagcttccaatgagtatggcagtgtcagctgtacagccacactaactgtgacagtgcctggaggtgaaaagaaagttcgcaaattacttccggaacgtaaacctgaaccaaaggaagaagttgttctgaaaagcgttctaagaaaaagacctgaagaagaagaacctaaagtagaacctaaaaaactagaaaaagttaaaaaacctgcagtaccagaaccaccacctccaaaacctgttgaagaggttgaagtacctactgttacaaaaagggaaaggaagattcctgaaccaacaaaagtgcctgaaatcaagccagcaatacctctccctgcacctgaaccgaaaccaaagcccgaagcagaagtgaaaacaatcaaaccacctcctgtggaacctgaaccaacccccatcgctgccccagtaacagtgccagtggttggaaagaaagcagaagccaaagcacctaaggaagaggctgccaagccaaaaggtcctatcaaaggtgtacccaaaaagactccttcaccaatagaagccgaaaggagaaagttaaggccaggaagtggtggagagaaacctcctgatgaagccccgttcacctaccagctaaaggctgtgccactgaagtttgtgaaagaaatcaaagacatcatcttgacagaatcagagttcgttggctcttcagcaatctttgaatgtttggtctccccttccactgcaattacaacctggatgaaagacggtagcaatatccgtgagagtcccaagcacaggtttattgcagatggtaaagacagaaagctgcacatcattgatgttcaactttccgatgctggtgaatacacctgtgttttacgtttgggaaacaaagaaaagacctccacggctaaacttgttgtagaagaacttcctgtgcgttttgtaaaaacactggaagaggaagtcacagtggtcaaaggacagccattgtacttgagctgcgagttaaacaaagagcgtgacgtggtctggaggaaggatggcaagattgtggtggagaaacctggccgaattgtgccaggcgtcattggcttgatgcgggctctgaccatcaacgatgcagatgacacagatgctggaacatacacagttactgtggaaaacgccaacaacctggagtgttcatcttgcgtaaaagtagtagaagtcattagagattggctggtgaaacctatacgagaccagcatgtgaaacccaaggggacagctatttttgcctgtgatatagcaaaagatactccaaacattaagtggttcaaaggatatgatgaaatccctgcggaaccaaatgataagactgaaatactgagagatggaaatcatctgtacctcaaaattaagaatgctatgccagaagatattgctgagtatgcagtggaaattgaaggaaaaagataccctgcaaagctgacacttggagagcgtgaagttgaactgcttaaaccaatagaggacgttaccatttatgagaaagaaagtgcaagctttgatgcagaaatctcagaggcagacattcctggacaatggaaactgaaaggagaacttctaaggccctcacctacttgtgaaatcaaagcagaaggtggaaaacgcttcttaactttgcacaaagtcaaactggaccaagctggtgaagtcctctaccaggcccttaatgcaattacaactgccattttgacagtaaaagaaatcgaacttgactttgctgtgcccctgaaggatgtcactgttccagaaaggcgacaggctcgattcgaatgtgtcctcacccgagaggcaaatgttatatggtccaaaggacctgatataattaagtcatctgacaaatttgatatcatcgctgatggaaagaaacatattcttgttattaatgattctcaatttgatgatgaaggggtctatactgctgaggtggagggcaagaagacctcagctcggttgtttgtcacaggtataagactgaaattcatgtcacctcttgaagatcaaacagtaaaagaaggtgaaacagcaacttttgtttgtgaactttctcatgaaaaaatgcatgtagtctggttcaaaaatgatgccaaactccatacaagcagaacagtactcatctcttctgagggcaagactcacaaattggaaatgaaagaagtgacattggatgatatatctcagataaaagctcaagtcaaggagctgagctccacagcacagctgaaggtcttagaggccgatccctacttcactgtgaaattacatgacaaaactgcagtggagaaggatgagattactttgaagtgtgaagtgagcaaagatgtaccagtgaaatggttcaaagatggtgaagagattgtcccttcacccaaatattctatcaaggcagatggcctgcgccgcatcttaaaaatcaaaaaggcggaccttaaagataaaggcgaatatgtgtgtgactgtggcacagacaagaccaaggcaaatgttactgttgaggctcgactaataaaagtggaaaagcctctgtacggagtagaggtgtttgttggtgaaacagcccactttgaaattgaactttctgaacctgatgttcacggccagtggaagctgaaaggacagcctttgacagcttcccctgactgtgaaatcattgaggatggaaagaagcatattctgatccttcataactgtcagctgggtatgacaggagaggtttccttccaggctgctaatgccaaatctgcagccaatctgaaagtgaaagaattgcctcttatcttcatcacacctctcagtgatgttaaagtcttcgagaaagatgaggctaagtttgagtgtgaagtatccagggagcccaaaacattccgttggctaaaaggaacccaggaaatcacaggtgatgacagatttgagcttataaaggatggcactaagcattcaatggtgatcaagtcagctgcttttgaagatgaagcaaaatacatgtttgaagctgaagataagcacacaagtggcaaactgatcattgaaggaatccggctcaaattcctcacccctctcaaagatgtaactgccaaagagaaggaaagtgctgtatttactgtggagttatctcatgataacatccgagttaaatggttcaagaatgaccagcgcctacacaccaccaggtcggtctcaatgcaagacgaagggaaaactcattcgatcacattcaaagacctgtctattgatgacacctcccaaattagagtagaagctatggggatgagttcagaagctaaactcactgtgcttgagggagacccatattttacaggaaaacttcaagattatactggtgtagagaaagatgaagttattctacagtgtgaaattagcaaagcagatgcaccagtgaaatggtttaaggatgggaaggaaataaagccatccaaaaatgctgttattaaggcagatggcaagaaacgcatgctaatcctaaagaaagccttgaaatcagatattggacagtacacctgtgactgtgggacagataagacctcaggaaaacttgacattgaggatcgggaaattaaactggtgcgacccctgcacagtgtggaggtgatggagactgagacagcacgctttgaaaccgaaatctctgaagatgatatccacgccaactggaaactcaagggagaggccctactccaaacacctgattgtgaaattaaggaagaaggcaaaatacactcccttgttttgcacaactgtcgcctggaccagacgggtggggtggatttccaagctgccaatgttaaatctagtgcccacctccgagttaagccacgagtaattggtcttctgaggcctttaaaggatgtcaccgtgactgcaggggaaacagccaccttcgactgcgagctctcctacgaagatatcccagtggaatggtatctcaaagggaagaaactagagcccagcgataaggtggtcccacgttcagaaggaaaagttcatacacttactctgagggatgtaaagttagaagatgctggggaagtccaactaacagcaaaagatttcaaaactcacgccaacctctttgtgaaagaacccccagttgaattcactaagcctcttgaggaccagacggtcgaagagggagccactgcagtgctggagtgtgaagtctccagagaaaatgctaaggtgaaatggttcaaaaatgggacagaaatcctcaaaagcaagaagtatgaaattgttgctgatggcagggtcagaaaacttgttatacatgactgtaccccagaggatattaaaacatacacttgtgatgctaaggattttaagacttcctgtaacctgaatgtcgtgcctcctcatgtggaattcttaagaccactcaccgaccttcaagttagagaaaaagaaatggctcgatttgagtgtgaactttcccgagaaaatgctaaggttaagtggtttaaagatggtgctgaaattaaaaagggcaaaaaatatgacatcatatccaagggagcagtgcgcattcttgtcatcaacaaatgtctactggatgatgaagctgaatattcctgtgaagtaaggacagcgagaacttctggcatgctgacagttctggaagaagaagctgtctttaccaaaaatcttgccaacattgaagttagtgaaacagacactataaaactggtttgtgaagtctccaaacctggcgcagaagtgatttggtataaaggggatgaggagatcattgaaacaggaagatatgaaatactgactgaaggacggaagagaatcctggtcattcagaacgctcaccttgaggatgctggcaactacaactgtcgactcccaagctctcgaaccgatggcaaagtcaaagtacatgaactggctgctgaatttatctcaaagcctcaaaaccttgaaatacttgaaggagaaaaggctgaatttgtctgctctatatcaaaagaaagctttccagtccagtggaagagggatgataagacacttgaatctggagataaatatgacgttattgctgatggtaaaaagagggtcctagttgtgaaagatgccacattacaagatatgggcacttacgttgtcatggtaggggccgccagagcagcagctcacttgacagtcattgaaaaactcaggatcgtagttcctcttaaggacacccgggtgaaggaacaacaggaagttgtcttcaactgtgaagtcaatactgaaggtgccaaagccaaatggttcagaaatgaagaagctatatttgatagttcaaaatacatcattctccaaaaagacctagtctacaccctcagaattagagatgcacacttagatgaccaagccaactataatgtgtctttgaccaatcacagaggtgaaaatgttaaaagtgcagccaatctaatagtagaagaggaagaccttaggattgttgagcctcttaaagatattgaaacaatggagaagaaatctgtcacattctggtgcaaggtgaatcgtctcaatgtaacactgaagtggaccaaaaatggtgaagaagtgccttttgacaaccgtgtctcatacagagttgataagtacaagcacatgttaaccattaaagactgtggcttcccagatgaaggtgaatacattgtcactgctggacaagataaatctgttgctgagcttctcatcatagaagccccgacagaatttgtggaacacttggaagatcagacagtcactgagttcgatgacgctgtcttctcctgccagctctccagagagaaagccaatgtaaaatggtacagaaatgggagagaaatcaaagaaggcaaaaaatacaaatttgaaaaagatggaagtatacacagactcattataaaagattgcaggctggatgatgagtgtgaatatgcttgcggggtagaagacaggaagtctcgtgctagactttttgtggaagaaattcctgttgagatcatcaggcctccacaagatattcttgaagcccctggtgctgatgttgtctttttagcagaactcaataaagataaggtggaagtccaatggctaagaaataacatggttgttgtccagggtgataaacaccagatgatgagtgaaggaaagatacatcgactacagatttgtgatattaagccccgtgaccagggtgaatacagatttattgccaaagacaaagaagccagagctaagcttgaactggcagctgcaccaaaaatcaagacagctgaccaagaccttgtggttgatgttggcaagcctctgacaatggtggtgccatatgatgcctaccccaaagcagaagctgaatggtttaaagaaaatgaacctttatctacaaaaaccattgatactacggctgaacaaacttctttcagaattttagaagccaagaaaggagacaaagggaggtataaaattgtgcttcagaacaaacatggaaaagcagaaggattcatcaatttaaaagttattgatgttcctgggccagtacgtaacttagaagtgacagaaacatttgatggtgaagtgagccttgcttgggaagaacctttaactgatggtggaagcaaaatcataggttacgttgttgaaagacgtgacattaagagaaagacctgggttctggccacagaccgtgcagagagttgtgagtttactgtcactggtctacagaaaggaggagttgagtacctattccgtgtgagtgcaagaaacagagttggcactggtgagccagtagaaactgacaatcctgtagaagcaaggagtaaatatgatgttccaggccctcctttgaatgtaaccatcactgatgtgaatcgatttggtgtctcactgacatgggaaccaccagagtatgatggaggtgctgagatcacaaactacgtcattgaattaagagacaagacttctatcaggtgggatactgccatgactgtgagagctgaagacctgtctgcaactgttactgatgtggtagaaggacaggagtacagtttccgagtgagagcccaaaatcgaattggagttggaaaaccaagtgcagccacacccttcgtcaaagttgctgatccaattgagagaccaagtcctcctgtaaacctaacttcctcagatcagactcagtcatcagttcagctcaaatgggaacctcctctgaaagatggaggaagcccaatattaggctatataattgagcgatgcgaagaaggaaaagataattggattcgttgcaatatgaaacttgtccctgaactgacttacaaggttaccggattggaaaaaggaaataaatatttatatagagtatctgcagaaaataaagctggtgtttcagatccatctgaaattcttggtcctctcaccgctgacgatgcatttgttgaaccaacaatggatttaagtgcatttaaagatggtctggaagttattgtcccaaatcctatcacgatcctggttccaagtacaggctatccaaggccaactgcaacctggtgttttggagataaagtactagaaacaggggaccgggtgaaaatgaagaccttgtctgcctatgccgaacttgtcatttctccaagtgaacgttcagacaagggcatttatacactgaaattagaaaaccgtgtgaaaacaatttctggggaaattgatgtcaatgtaattgctcgcccaagtgcacccaaagaattgaaatttggtgatataaccaaggactcagtacatttgacttgggaaccacctgatgatgatggaggaagtccgttaactggatacgttgttgaaaaacgagaagtcagccggaaaacatggactaaagttatggactttgtgactgatctagaattcacagttcctgatcttgttcaaggaaaagagtacttatttaaagtttgtgctcgtaacaaatgtggccctggagaacctgcatatgttgatgaacctgtaaatatgtcaactcctgcaacggtacctgacccaccagagaatgttaaatggagagatcgaacagccaatagcatcttcttaacatgggatccacctaaaaatgatggtggttcacgcatcaaaggatatatagttgaaagatgtccacgtggttctgataaatgggttgcctgtggagaacctgttgcagaaacaaaaatggaagtgacaggtcttgaggaaggcaaatggtatgcctaccgcgtgaaggccttaaacaggcagggtgctagcaaaccaagcagacccacagaggaaatccaggctgtggacacacaagaggccccagaaatcttcctcgatgtgaagctccttgctggtctcactgtaaaagctgggaccaagattgaacttcctgccaccgtaaccggaaaacctgaacctaaaataacttggacaaaggctgatatgattctgaagcaggacaaaagaattaccattgaaaatgtccctaagaaatccacagtgactattgttgatagtaagagaagtgacactggcacatatatcattgaggctgtgaatgtgtgtggccgggccactgctgtggtggaagtgaacgtcttagataaacccggaccaccagctgcctttgacatcacagatgtaaccaatgagtcatgtcttctaacatggaacccaccacgcgatgatggtggatctaagatcacaaactatgttgtggagagacgagcaactgatagtgaagtgtggcacaagctctcatccaccgtcaaggatacaaacttcaaggccaccaaattaatccccaataaagagtacatcttcagagttgctgcagaaaacatgtatggtgttggtgaaccagttcaggcctctccaataacagccaaatatcagtttgatccacctggtcctccaactcgcctagaaccttctgatatcactaaagacgcagtgactctcacatggtgtgagccagatgatgatggtggcagcccaatcacaggatactgggttgaaagactggatcctgatacagataaatgggttagatgcaataagatgccagtaaaggacacaacatacagagtgaaaggtctcactaataagaaaaaatacagattccgtgtgttggctgaaaatcttgctggacctggaaaaccaagcaaatcaactgaaccaatcttaataaaggatcccatagatcctccatggccccctggaaaaccaactgtaaaagatgtaggcaaaacatcagtaaggttgaattggacaaaaccagaacatgatggaggtgcaaagattgagtcttatgtcattgaaatgctgaagactggaacagatgagtgggtcagagtggcggaaggggttcccaccactcagcacttgctcccagggctcatggaaggacaggaatactcattccgagttagagctgtgaataaggctggggaaagtgaacccagtgaacccagtgaccctgtgctttgccgggagaagctatatcctccatcaccaccacgctggcttgaagttattaatatcacaaaaaatacagcagacctaaaatggacagttcctgagaaagatggagggtcccccatcaccaactacattgtggaaaagagagacgtcaggcgaaaaggctggcaaacagtggataccactgtcaaggacaccaagtgcacagtcaccccactgactgagggctctttatatgtgttccgagttgctgcagaaaatgctataggacaaagcgactacaccgaaattgaggactctgtgctggccaaagacacctttaccactcctggaccaccctacgccctggcagtggttgatgtgacaaaacgacatgttgacctaaagtgggagccacctaaaaatgatggtggaagaccaatacagagatatgtcattgagaagaaagaaaggttaggtacccgttgggtgaaagctggaaagactgcaggacctgactgtaacttcagagtaactgatgtcatcgaaggaacagaggtccagtttcaggttcgggctgaaaatgaagctggagttggccacccaagtgaacccacagaaatcctatccattgaagatccaacaagtcctccctcaccaccccttgacctacatgtgactgatgctgggagaaaacacattgccattgcttggaagcctccagagaaaaatggtggaagtcctatcataggataccatgttgaaatgtgtccagtaggcactgagaaatggatgagagttaattctcgcccaataaaggacttgaaattcaaggttgaagaaggtgttgttcctgacaaagaatatgtcctgagagtgagagcagtcaatgctattggtgtcagcgagccatctgaaatctctgaaaatgtggttgccaaagacccagactgcaagccaacaattgacctggagactcatgacattattgttattgaaggtgaaaagttaagcattcctgttcccttcagagctgtcccagttccaactgttagttggcataaagatggcaaagaagttaaagcaagtgatagattaacaatgaagaatgatcacatctctgcacaccttgaagttcccaagagtgtccgtgcagatgccggaatttataccattacactggagaataagctcggctcagcaacagcctcaatcaatgtcaaagtcataggcctacctggaccatgcaaagatattaaagcaagtgacattaccaagagttcttgtaagttaacttgggaacctccagaatttgatggtggaaccccaattcttcattatgtcctggagcgcagagaagctgggaggagaacatatataccagtcatgtctggtgagaacaaactgtcatggactgtgaaggatctcataccaaatggtgaatacttcttccgtgttaaagcagtcaacaaggttggtggaggagaatatattgaactgaaaaatccagtcattgctcaagatccaaagcaaccccctgatccacctgtagatgtagaggttcataatcctacagcggaggcaatgactattacatggaagccacctttgtatgatggagggagcaagataatgggctacatcatagagaagattgctaagggtgaagaaaggtggaagagatgcaatgaacacctggtaccaatcctgacctatacagcaaaaggacttgaagaggggaaagagtaccaattccgtgtgcgagcagagaacgccgcgggtattagtgaaccttctcgggctactcctccaaccaaagctgtagatcccattgatgcccccaaagtcattctgagaacaagcctagaagtgaaacgaggtgatgaaatagcacttgatgcaagtatttctggatcaccttacccaactattacatggataaaggatgaaaatgttattgtaccagaggaaattaagaagcgtgcagcacccttggttaggagaaggaagggtgaagttcaagaagaagaaccatttgtcctgcctctgacacagcgtttgagtattgacaacagcaaaaagggagaatctcagctacgcgtccgagattctctccgacctgaccatggtctgtatatgatcaaagttgaaaatgaccacggtattgcaaaagctccttgtactgtcagtgtgttagatacaccgggaccaccaatcaactttgtatttgaagatatcagaaagacctcagtcctttgtaaatgggaaccaccccttgatgatggtggcagtgaaatcataaactacactttggaaaagaaagacaagacaaaacccgactcagaatggattgttgtcacttcaacacttagacattgcaaatattcagtaacaaaactgattgaaggaaaagagtacctcttccgtgtaagagctgaaaacagatttgggccaggtccaccatgtgtttcaaagccacttgtggctaaagatccatttggaccacctgatgcaccagataagcccattgtggaagatgttaccagcaacagtatgctagtgaaatggaatgaaccaaaagataatggaagccccattttgggttactggcttgaaaaacgtgaagttaacagtacacattggtctcgtgtcaacaaaagccttctgaatgccttgaaagccaatgtagatggcttattagaaggactcacctatgtcttcagagtatgtgctgaaaatgcagctggacctggaaagttcagtccaccttcagatcccaaaacagcacatgatccaatctctcctcctgggccacctatcccaagagtcactgacacaagctctacaactattgaactagaatgggaacccccagctttcaatggtggtggggaaattgttggctattttgttgataagcagttggttggcacaaatgaatggtcacgctgcacagagaagatgatcaaggtccgtcagtacaccgtcaaagaaatccgagagggtgctgattacaaacttcgggtgagtgctgtcaatgccgcaggggaaggaccgcctggagaaacacaacctgttactgtggctgaaccacaagagcctccagctgtggaactggatgtttctgtcaagggtggaatacaaataatggctgggaagactcttagaattccagctgtggtgactggtcgccctgtacctacaaaagtatggaccaaagaagaaggggagctggataaagaccgtgttgtaatagacaacgttggaaccaaatctgaactaattatcaaggatgcactgcgaaaagaccatggcagatatgtgattacagctacaaatagctgtggttccaaatttgcagcagccagggtagaagtttttgatgtccctggtccagttcttgacttaaaacctgttgtaacaaacagaaaaatgtgtctacttaactggtctgatccagaagatgatggaggaagtgaaataacaggctttatcattgaaagaaaagatgccaagatgcatacttggagacaaccaatagagactgagagatctaaatgtgacatcacaggtctgcttgagggacaagaatataagttccgtgttattgccaagaacaagtttggctgtggccctcctgttgaaataggaccaattcttgcagttgatccactaggtcctccaacatctccagagaggctcacatacactgaaaggacaaagtccactatcacacttgactggaaagagccccgcagtaatggtggcagtcccatccaaggatatatcattgaaaaacggcgtcatgacaaacctgactttgaaagagttaacaagcgactctgcccaaccacatcttttctggttgaaaatcttgatgaacaccaaatgtatgagttccgtgtcaaagctgtcaatgaaattggtgaaagtgaaccatccctacctcttaatgtagtcatacaagatgatgaagtgcctccaactattaagttgcgtctgagtgttcgaggagacactatcaaagttaaggcaggagagcctgtccacatccctgcagatgtgacaggccttccaatgcctaagattgaatggtccaaaaatgaaactgtaattgaaaaacccactgatgcacttcagataaccaaggaagaggtatcccgaagtgaggcaaaaactgagcttagcattcccaaagcggtccgggaggacaaaggcacttacacagttactgcttccaatcgccttggctcagtgttccgaaatgttcacgttgaagtatatgaccgcccatccccaccaagaaatcttgctgttactgacattaaagctgaatcttgctacttgacatgggatgcccctcttgataatggtggcagtgaaatcacccattatgttattgacaaacgtgatgcaagtaggaagaaagcagaatgggaggaagtcaccaacactgctgtagagaaaagatatgggatctggaaacttatccccaatggtcagtatgagttccgagtcagggcagtgaataaatatggaatcagtgatgagtgcaaatcagataaagtagtcattcaagatccttatcgccttcctggacctccaggaaaaccaaaagttttggcacgcaccaaaggatcaatgctagtgagctggactcctcctttggacaatggtggctctccaattactggctactggctggagaaaagagaagagggaagtccttattggtcacgtgttagccgagcaccaataaccaaagtgggattgaaaggcgtggaatttaatgttcctcgtttgcttgaaggcgttaaataccagttcagagccatggcaataaatgctgcaggaattggtcctcccagtgaaccatcagatccagaggttgcaggagatcccatatttccaccggggccaccttcttgcccagaagttaaagataaaacgaagtcaagcatctcactaggatggaaacctccagccaaagatggtggcagcccaatcaaaggatacattgtagaaatgcaagaagaaggtactactgactggaaaagagtaaatgaaccagacaaacttataactacctgtgaatgtgtggtgcctaatctgaaagagctcaggaagtacagattcagagtgaaagctgtcaatgaagctggtgaatctgaaccaagtgatacaactggggagatccctgccactgatattcaagaggaaccagaagttttcattgacattggagcacaggactgtctggtttgtaaagctggctcacagattaggattcctgctgtcatcaagggacgcccaacaccaaaatcatcttgggaatttgatggaaaggcaaagaaagcaatgaaggatggagttcatgacatacccgaagatgcacagctggagactgctgaaaactcctcagtaattattattccggagtgtaaacgatctcatacaggcaaatacagcatcacagccaagaataaagcaggacaaaagactgcaaattgcagagttaaagtcatggatgtaccaggcccacccaaagatctgaaagtcagtgatatcacaaggggtagttgcagactttcatggaagatgccagacgacgatggaggagacaggatcaaaggctatgttattgagaagaggactattgatggaaaagcctggaccaaagtcaatccagactgtggaagcaccacatttgtagtgcctgatctcctctctgaacagcaatatttcttccgtgtgcgagcagaaaaccgttttggtattggcccacctgtggaaaccattcagaggaccactgccagagatccgatatatcctcctgatcctcctattaaactcaagattggcctcatcacaaagaacacagtgcatctgtcatggaaacccccgaagaatgatgggggctcccctgttacccactatattgttgagtgccttgcatgggaccctactgggacaaagaaagaagcctggaggcagtgcaataagcgtgatgtggaagaactgcaatttactgttgaagacctagtagaaggtggggaatatgaattccgagtcaaagctgtcaatgctgcaggagtcagcaagccttcagccactgttgggccctgtgactgtcaaagaccagacatgccaccatcaattgatctaaaagaattcatggaggttgaagaaggaaccaatgttaacattgtggccaaaattaaaggtgtgccattcccgacactaacctggtttaaagctcctccaaagaagcctgataacaaagaacctgttctctatgacacccatgtcaacaaactggtggtagatgatacttgcactttagttattccgcagtctcgcaggagtgacactggcttatataccatcacagctgtaaataatctgggaacagcatcaaaggagatgagactgaatgtcctgggtcgtcctggccctccagtgggacccataaaatttgaatctgtttcagcagatcaaatgacactatcttggtttccacctaaagatgatggtgggtctaagattacaaactatgtaattgagaaaagagaagctaacaggaagacatgggtccatgtctccagtgaacctaaggagtgcacgtacacgattcccaaattgctagaaggccatgaatatgtattccgaatcatggcccagaataaatatggcattggagaacctcttgacagtgaacctgaaacagcaagaaacctcttctctgtccctggagcaccagataaaccaacagttagcagcgtgactcgtaactccatgactgtcaactgggaagagccagaatatgatggaggctctcctgtgacagggtactggctggaaatgaaagacaccacttcaaagagatggaagagagttaaccgagatcctatcaaagccatgactttgggtgtttcttataaagtgactggtcttattgaaggttccgactatcaattccgggtatatgcaatcaatgctgctggcgtgggtccagcaagtctgccatcagacccagcgactgctagagatccaattgcccctcctggtcctccatttcccaaagtgacagattggactaaatcatctgcagatctggagtggtctcccccactaaaagatggtggatccaaagtaactggatacatcgttgaatataaagaagaaggaaaagaagaatgggaaaagggtaaagataaagaagtgagaggaacaaagctcgttgtgacaggattaaaggaaggagcattctacaaatttagagttagtgcagtcaacattgctggcattggagaacctggagaggtcacagatgtcattgaaatgaaggacagacttgtttcacctgaccttcagctagatgccagtgtcagagatagaattgttgtccatgctggaggggtgatccgaatcattgcctatgtgtctggaaagcctcctccaaccgtcacctggaacatgaatgaaagaaccttacctcaagaagccaccattgagaccacagccattagctcatccatggtcatcaagaactgccagaggagccatcaaggcgtctattctcttcttgccaaaaatgaagccggagaaagaaagaagacaattattgttgatgtattagatgttccaggtcccgttggaacaccattcctagctcacaacctaaccaatgagtcctgcaaactgacatggttttctccagaagatgatggaggctctccaatcaccaattatgtcattgaaaagcgtgaatctgaccgcagagcatggaccccagtgacatatacagttacccgacaaaatgctactgtccagggtctcattcaaggaaaagcctactttttccgaattgcggctgaaaatagtattggcatgggtccatttgttgagacatcagaggcacttgttatcagagagccaataactgtaccagagcgtcctgaagacctggaagtcaaagaagttactaaaaatactgtaactttgacttggaatcctcctaagtatgatggtgggtcagaaattattaactatgtcctagaaagtcggctcattgggactgagaagttccacaaagttacaaatgacaacttgcttagcagaaaatacactgttaaaggcttaaaagaaggtgatacctatgagtaccgtgtcagtgctgtcaacattgttggacaaggcaaaccatcattttgcaccaaaccaattacttgcaaggatgagctggcacccccaacgcttcacctcgacttcagagataagctcacgattcgagttggtgaagcttttgccctcactggccgttactcaggcaaaccaaagcctaaggtttcctggttcaaagatgaagctgatgtgctggaagatgatcgcactcatataaagactacaccagcaacacttgctttagagaagatcaaggccaaacgttcagattccggcaaatactgtgtggttgtggagaacagtacaggctctaggaaaggtttctgtcaagttaatgttgttgaccgtcctggaccaccagtaggaccagttagttttgatgaggtgaccaaagattacatggttatctcttggaagcctcctttagatgatggaggcagtaaaatcaccaattatattattgagaagaaggaagtgggtaaagacgtctggatgccagtgacatctgcaagtgctaaaacaacatgcaaagtttctaaactacttgaaggaaaagattatattttccggatacatgctgaaaatctgtatggaataagtgatcctctggtgtctgattcaatgaaagccaaagatcgtttcagggttcctgatgcacctgatcagccaattgttacagaagttaccaaagactctgcattagtaacctggaataagccacatgatggaggaaaacccatcacaaactacatcctggaaaagagagaaactatgtctaaacgatgggctagagttaccaaagatcctattcatccatacactaaatttagggttcctgatcttctagaaggatgtcagtatgaattccgggtttctgcagaaaatgaaattggtattggagatccaagcccaccatccaaaccagtctttgctaaagatccaattgctaaaccaagtccacctgttaatcctgaagcaatagatacaacatgcaattcagtcgatctaacttggcagccaccacgtcatgatggtgggagcaagattctgggttatattgttgagtaccagaaagttggagatgaagagtggagaagagccaatcacacccctgagtcatgtcctgaaactaaatataaagtcaccggtcttcgggacggtcaaacctataagtttagagtgttagcagtcaatgcagctggtgaatcagatccagctcatgttccggagccagtcctagtaaaagacaggcttgaaccccctgagttgattcttgatgccaacatggcaagagaacaacacattaaagttggtgatactctaagacttagtgccatcatcaaaggagtgccattcccaaaagtaacttggaaaaaagaagacagagatgctccaactaaagcaagaattgatgtgactccagttggtagcaagcttgaaattcgtaatgctgcccatgaagatggtggaatttattctttaacagtggagaatccagctggttcaaaaactgtctcagtaaaagtacttgtattagataaacctgggccacctagagatctggaagtcagtgaaattaggaaagattcatgttaccttacttggaaagaaccactggatgatggtggttctgttattaccaattatgtggttgagaggagagatgttgccagcgcccagtggtcacctctctcagctacatcaaagaaaaagagtcacttcgctaagcatctgaatgaaggcaaccagtacctcttccgagtagctgcggagaaccagtatggacgtggtccttttgttgaaacaccaaaaccaatcaaggctttggatcctctccatcccccagggccacccaaggacctgcaccatgtagatgttgacaagactgaagtctccctagtctggaataagccggatcgtgatggtggttctccaatcactggatatttggtagaatatcaagaagaaggcacccaggactggattaaatttaagactgtgacaaacttagagtgtgtggttactggactacaacaaggaaagacctatagattccgtgtaaaagctgaaaacattgtgggtcttggtctccctgacacaactatcccgatagaatgtcaagaaaaactagtgcctccatccgtggagctagatgtgaaattaattgaaggtcttgtggtaaaggctggaaccacagtcagattccctgctattataagaggtgtgcctgttcctactgcaaagtggacaaccgatgggagtgagattaaaaccgatgagcactacacagttgaaacagacaacttctcatcagtacttaccattaagaactgcttaaggagagacactggggaatatcaaatcacagtttccaatgcagccggtagcaaaacagtagccgtacatcttactgttcttgatgttcctgggccaccaacaggtcctattaatattctggatgttactcctgaacacatgactatctcatggcagccacctaaggatgatggaggaagccctgtgataaattatattgttgagaaacaagatacaaggaaagacacgtggggtgttgtctcttccggaagcagtaagacaaagctgaaaatcccacatctgcagaagggctgtgaatatgttttccgagttagagcagagaataagataggtgttggtcctccccttgactccacacctactgttgctaagcataaatttagtcctccgtctcctcctggtaaaccagtggttactgacattactgaaaatgcagcaacagtgtcttggaccctgccaaaatctgatggtggcagtccaataactggctactatatggaacgtcgagaagtaactggcaaatgggtgagggtcaacaaaacacctatcgctgacctgaagttcagagtgactggactctatgaaggaaatacatatgagtttagagtttttgctgaaaatcttgcaggactaagcaaaccatccccaagttctgatccaataaaagcttgccggcccatcaaaccacctggaccacctattaatcctaaactgaaagacaagagcagagaaacagctgatttggtgtggacaaagcctctcagtgatggtggtagccccattctaggatatgtagtggaatgtcagaaacctggcacggcacaatggaacaggattaataaagatgaactcattaggcaatgtgcctttagggtacctggactaattgaaggaaatgagtacagattccgtataaaggcagctaatattgtaggagagggtgagccaagagaactagcagaatctgtgattgcaaaagatatccttcatcctccagaagtagaacttgatgttacttgtcgtgatgttattaccgtgagagtaggccaaactatccgcattctagctcgagtcaaaggcagacctgaaccagacataacttggactaaggaaggcaaagtattggtccgagaaaagagggtggaccttattcaggatctacctcgtgttgagttacaaattaaagaagctgttagagctgatcatggcaagtatatcatctcagctaagaacagcagtggacatgcccaaggttcagccatcgttaacgtccttgacagacctgggccttgccagaatttgaaggttaccaatgtaaccaaagagaactgtacaatttcttgggaaaacccactagataatggtggctcagaaataacaaacttcatagtagaatatcgcaaaccaaaccagaaaggctggtcaattgttgcatcagatgtcactaaacgattaatcaaggccaaccttttagccaacaatgaatactatttccgagtttgtgcagagaataaagtaggtgttgggccaaccatcgaaacaaaaactcccattctggctattaaccctattgacagaccaggtgagcctgaaaaccttcacattgcagataaaggaaagacatttgtctatctaaagtggcggaggcctgactatgatggtggcagtccaaatctgtcatatcatgttgagagaaggcttaagggctccgatgactgggaaagagtgcataaaggaagcattaaagaaactcactacatggttgacagatgtgttgaaaaccagatttatgagttcagagtgcaaacaaagaatgaaggtggggaaagtgactgggtgaagacagaggaagttgttgtgaaagaagacttacaaaaaccagtacttgatctgaaattaagtggggtcctaactgtcaaagcaggggacaccattaggcttgaggcaggggttagaggcaaaccattcccagaagttgcatggaccaaggacaaagacgctacagacttaacaagatcaccaagggtcaagattgatacccgtgctgattcatctaaattttctcttactaaagcaaagcgaagtgatgggggtaaatatgtagttacggcaactaacacggctggcagttttgtggcctatgccactgtcaatgttttagataagcctggtcctgtgagaaatctgaaaattgttgatgtgtccagtgataggtgtactgtttgctgggatccaccagaagatgatggtggctgtgaaatccaaaattatattctagaaaaatgtgagacaaagcgaatggtttggtctacctattctgctactgtcttgacacctggtactacagtaacacgtctcatagaaggaaatgaatatattttcagagtccgtgcagaaaataaaataggcacagggcctccaacagaaagtaaaccagtcatagccaaaaccaagtatgataaacctggtcgccctgatcccccagaagtcactaaagtaagcaaagaagagatgactgtggtttggaatccacctgaatatgatggtggaaagtctataactggatactttttggagaaaaaggaaaagcattcaacacgatgggtccctgtcaacaagagtgcaatccctgagagacgtatgaaagtacagaatctcctcccagaccatgaatatcagttccgtgtcaaggcagaaaatgaaattggaattggagaaccaagcttgccttcaagaccggtggtggcaaaagaccccatagagccacctggtccaccaaccaatttcagagtggttgatacaaccaaacattccataactcttgggtggggaaaaccagtctatgatggtggtgcaccgatcattggatatgttgtggaaatgagaccaaaaatagcagatgcgtctcctgatgaaggctggaaacggtgtaatgctgcagcacagcttgtacgcaaggaattcactgttaccagcttggatgaaaaccaggaatatgagttcagggtgtgtgcccaaaaccaagttggtattgggcgccctgcagagctaaaggaagctatcaaacctaaagaaatactagaacctccggagattgatttggatgccagcatgaggaaactggtcatagtgagagcaggatgccctattcgtctctttgctatagtgagaggacgaccagcccctaaagtcacttggcgaaaagttggcattgataatgtggtcagaaaaggacaagttgatctggttgacactatggccttccttgtcatccccaattctacccgtgatgactcaggaaaatattccttaacacttgtgaacccagcaggagaaaaggctgtattcgtaaatgtcagagtattagacactcctgggcctgtgtctgatttaaaagtttcagatgtcactaaaacatcatgccatgtgtcctgggcccctcctgaaaacgacggtgggagccaagtgacacattatatcgtggagaaacgtgaggcagacagaaagacatggtcgaccgttaccccagaagttaagaaaacaagcttccatgtaaccaatcttgtccctgggaatgagtattacttcagagtaactgctgtcaacgaatatggccctggcgtcccaacagatgtcccaaaaccagtgcttgcatcagatcctctaagtgagccggatcccccaaggaaattagaagtgactgaaatgaccaagaacagtgccaccttagcctggttacctcccctacgtgatggaggtgctaaaatcgatggctacatcactagttacagagaagaagagcagcctgcagatcgctggacagagtactcagtggtaaaagatctgagccttgttgtcactggcctaaaggaaggaaagaaatacaaatttagagtagcggccagaaatgctgttggagtcagtttgccaagagaagctgaaggagtgtatgaagccaaagaacaactgttgccaccaaagatccttatgccagagcaaataactatcaaagctgggaaaaaactccgaattgaagcccatgtgtatggaaagcctcatcccacctgtaaatggaaaaaaggagaagatgaagttgtcacatccagccacctggcagtgcataaagcagacagctcttcaattctgatcataaaagatgtgactaggaaagacagtggttactacagcctcacagcagagaacagttctgggacagacactcagaaaatcaaagttgtagtcatggatgcccccggcccccctcagcctccatttgacatttctgatatagacgctgatgcttgctccctgtcatggcacatccctctggaggacggaggcagtaacatcaccaattatatagtggagaagtgtgatgtaagccgaggtgactgggtcacggctctagcttcagtcacaaaaacttcctgcagggttggaaagctgatcccaggccaggagtacatcttccgggtccgtgctgaaaaccgatttggcatttcagagcctctcacatctccaaagatggttgcgcagttcccatttggtgttcctagtgaaccaaagaatgcacgagtcaccaaagtcaacaaggactgtatttttgttgcttgggacagaccagatagtgatggagggagccccattattggttatctgattgaacgcaaggaaagaaacagtttgctgtgggtgaaagccaatgatactcttgtccggtcaactgaatatccttgtgctggccttgtagaaggtcttgagtattcattcagaatctatgccctaaacaaagctggatccagcccacccagcaaacccacagaatatgtaactgcaagaatgccagttgatcctcctgggaaacctgaggttattgatgtcaccaagagtactgtatctctgatctgggctcgtccaaagcatgatggaggcagtaaaattattggctatttcgtagaagcttgcaaacttcctggtgataaatgggtacggtgcaatactgcacctcaccagattccccaggaagagtacacagctactggcctagaagagaaagctcagtatcaatttagagctattgccaggaccgcggtaaacattagcccaccttctgaaccttctgatccagtgactatcctcgcagaaaatgtccctcccaggatagacctgagtgtggctatgaaatctttgcttactgtgaaagctggaactaatgtctgcttggatgctactgtttttggtaaaccgatgccaacagtttcttggaaaaaagatggcacactgctaaaaccagcagaaggcataaagatggccatgcagcggaatctgtgcaccttggagctattcagcgtgaaccggaaggactcaggagactataccattactgctgaaaattcaagtggttctaaatcagccaccattaagcttaaagtgttagataaaccgggtcctccagcatctgttaaaatcaacaaaatgtattcagatcgtgctatgctttcttgggaaccgcctcttgaagatggaggctcagaaatcaccaactatattgttgacaaacgtgaaacaagcaggcccaactgggctcaagtctctgcaactgtgcctatcaccagctgcagcgtggagaaacttatagagggccatgagtatcagttccgtatttgtgctgaaaataaatatggagtaggcgatccagtcttcactgaaccagcaattgccaaaaacccatatgacccaccaggacgctgtgatcctcctgttattagcaacataaccaaagatcacatgacagtcagctggaagccaccagcagatgatgggggctcacccatcactggctatttgcttgaaaagcgggaaacccaggctgttaactggactaaggtcaacagaaaacctattatagaaagaacattaaaagcaacaggtcttcaagaaggtaccgaatatgagttccgtgttacagctataaataaagctggaccaggcaaacccagtgacgcatccaaggccgcttatgctcgggaccctcagtatcctcctgcgccaccggctttccctaaagtatatgatacaactcgcagctctgtgagtctatcttggggcaagccagcctatgacggcggcagccctatcattggttatctcgttgaagtaaaacgggctgactccgataactgggtgaggtgcaacttaccacagaatctacagaaaacccgctttgaggttactggcctgatggaagacacacaatatcaattccgtgtgtatgccgttaataagattggatacagtgaccccagtgatgtgccagataaacactatcccaaggacatcttaattccacctgagggagaacttgatgcggacttaaggaagacactcatattacgtgctggagttactatgagactatatgtaccagtaaaaggacgcccacctccaaagattacttggtctaaaccaaatgtcaatctaagagacaggattggactggacataaagtcaactgactttgacactttcttgcgctgtgaaaatgtgaacaaatatgatgcaggaaaatatatcttaaccctggagaacagctgtggtaaaaaggaatataccattgttgtgaaagtgcttgatactcctgggccacctgtcaatgtgactgttaaggaaatatccaaagactctgcttatgttacctgggagcctcccattattgatggcggaagccccatcataaactatgtggtacaaaaacgtgatgcagagaggaaatcctggtctacagtgacaactgagtgctccaaaacaagcttcagagtagctaatttggaggagggaaaatcctacttcttccgagtgtttgctgaaaatgagtatggcattggtgatcccggtgaaactcgtgatgctgtcaaagcttcccaaactcctggaccagttgtggacctgaaagtgaggtctgtatctaagtcatcctgtagcattggctggaaaaagcctcacagtgatggtggaagtcggattattggatatgtagttgatttcctgactgaagaaaataagtggcaacgagttatgaaatccttaagcctacagtactctgcaaaagatttgactgaagggaaggaatataccttcagagtgagtgctgagaatgaaaatggagaaggaaccccaagcgaaatcactgttgtggcaagggatgatgttgtggctcctgatcttgacttaaagggtctacctgatttgtgctacttggctaaagaaaacagcaacttccggcttaagatccccataaaaggcaagccagctccatcagtctcctggaagaaaggggaagatcctctagcaactgacactagagtcagtgttgagtcatctgcggttaacacaactcttatagtgtacgattgccaaaaatctgatgctggaaaatacacaatcacacttaagaatgttgctggcaccaaggaaggaactatctccataaaggttgttggcaagcctggcatccccactggaccaatcaaatttgatgaagtcacagcagaagccatgaccttaaagtgggctcctccaaaggatgatggaggttctgaaatcaccaactatatcctagagaagagggattctgtgaacaacaagtgggtgacgtgcgcctcagctgtccagaaaaccacctttagagtaaccagacttcatgagggcatggaatataccttcagggtcagtgccgaaaataaatatggtgtaggggaaggcctgaaatcggagccaattgttgcgagacatccatttgatgtgcctgatgctcccccacctcccaatattgtggatgtcagacacgattcagtatctctaacttggactgaccccaagaaaactggtggttctccaattacagggtatcatctcgagttcaaggaaagaaacagccttttgtggaagagagctaacaagactccgataaggatgagagactttaaagtgacaggattaactgaaggtcttgaatatgaattccgagttatggcaatcaatttagcaggtgtgggcaagccaagcctaccatcagagcctgttgtggcactggacccaattgatcctcctggaaaacctgaggttattaacataacaaggaattcagtgactctcatttggactgaacctaaatatgacggtggtcataagttaactggatatatagtggagaagcgagatctaccttcgaagtcttggatgaaagccaaccatgttaatgtcccagaatgtgcctttactgtaactgaccttgttgagggtggaaaatatgaattcagaattagagcaaagaatacagcaggtgctatcagtgctccatcagaaagtacagaaaccattatttgcaaggatgaatacgaggcaccaacaattgtccttgatcccacaataaaagatgggctaacaattaaagcaggggataccattgttttgaatgccattagcattcttggcaaaccccttccaaaatcaagttggtccaaggcaggaaaagacattagaccatcagatatcactcagataacttcaaccccaacatcttccatgcttactatcaagtatgccactagaaaagatgcgggtgaatataccatcactgctaccaatccttttggcacgaaggtggaacatgtgaaggtaacagtccttgatgtacctggtcccccaggtcctgttgaaatcagtaatgtttctgctgaaaaagcaacacttacatggacacctcccttggaagatggcggctcaccaattaagtcctatatacttgaaaagagagaaaccagccgacttttgtggacagtggtttctgaagatattcagtcttgcaggcatgtggcaaccaaacttatccaaggaaatgagtacatcttccgggtctcagctgtaaaccactatggcaaaggagaacctgtacagtctgaacctgtcaaaatggtagacagatttggtccccctggccctcctgaaaaaccagaggtatcaaatgtcactaagaacactgccactgtcagctggaaaaggccagtggatgatggtggcagcgaaattacaggatatcatgtagaaaggagagaaaagaaaagcctgcgatgggtgagagcaataaaaacaccagtttccgatctcaggtgcaaagtaacaggactgcaagaaggaagcacctacgaattccgtgtcagtgcagaaaacagagcaggaattggtccacccagtgaggcttcagattctgttctgatgaaagatgcagcatatcctccaggaccaccttcaaatccgcatgtcactgatactaccaagaaatctgcttctttggcatggggcaagcctcattatgatggtggacttgaaatcactggctatgtcgtggagcatcaaaaagtaggagacgaggcctggataaaagataccacaggaaccgccctcagaatcactcagttcgttgttcctgatcttcagactaaagaaaaatacaacttcagaatcagtgccatcaacgatgcaggtgttggggagccagcggtgattccagatgttgaaatcgtagaacgggagatggctcctgattttgaactagatgccgagcttcgaagaacacttgttgttagagcaggactcagtattaggatatttgtgccaattaaaggtcgtcctgctcctgaagtgacatggaccaaagataacatcaacctgaaaaaccgagccaacattgaaaatacggaatcatttactcttctgattatcccagaatgtaacagatatgataccggtaaatttgtcatgaccattgaaaacccggctgggaagaaaagtggctttgtgaacgtcagagtcttggacacgccaggcccagtcctcaacctgcggcctacagacatcacaaaggacagtgtcaccctgcactgggacctccctctgatagatggaggctcacgtataacaaactacattgtagagaaacgtgaagcaacacggaaatcttattccacagccaccactaagtgccataaatgcacatataaagttaccggcttgtctgaagggtgtgaatatttcttcagagtgatggcagagaatgaatatggaattggtgagccaacagaaactacagagcccgtaaaagcctctgaagcaccatctccaccagacagccttaacatcatggacataactaagagcaccgtcagcctggcatggcctaagcccaaacacgatggtggcagcaagatcactggctatgtgattgaagcccaaagaaaaggctctgaccagtggacccacatcacaaccgtgaaagggttagaatgtgttgtgaggaatctaactgaaggagaggaatataccttccaagtgatggcagtgaacagcgcggggagaagtgcccctagagaaagcagacccgtcattgtcaaggagcagacaatgcttccagagctggatctccgtggcatctatcagaaactggtcattgccaaagctggtgacaacatcaaagttgaaattccagtgctcggtcgaccgaagcccacagtgacatggaaaaaaggagaccaaattcttaaacagacacagagagttaattttgaaaccacagcgacttcaaccattttaaatatcaatgagtgtgtcagaagtgatagtgggccctatccattaacagcaaggaacattgtaggagaggttggtgatgtcatcaccattcaagtccatgatatcccagggccacctactggaccaatcaaatttgatgaagtttcatctgattttgtaaccttctcttgggacccacctgagaacgatggtggtgtaccaataagcaactatgtagtggaaatgcggcagactgacagtactacctgggttgagttagcaaccaccgttatacgtactacctataaagccacccgccttactactggattagagtatcagttccgtgtaaaagctcagaatagatatggagttggaccaggcatcacatcagcatgcatagttgccaactatccatttaaggttcctggacctcctggtacccctcaggtaactgcagttaccaaggattcaatgacaattagctggcatgagccactttctgatggtggaagccccattttaggatatcatgttgaaagaaaagaacgaaatggtattctctggcagactgtgagcaaagctttagtaccaggcaacattttcaaatcaagtggacttacagatggtattgcttatgagttccgggtgattgcagaaaacatggcaggcaaaagtaagccaagcaagccatcagaacctatgttggctctggatcccattgacccacctggaaaaccagtacctctaaatattacaagacacacagtaacacttaaatgggctaagcctgaatatactgggggctttaaaattaccagttatatcgttgaaaagagagaccttcctaatggacggtggctgaaggccaacttcagcaacattttggagaatgaatttacagtcagtggcctaacagaagatgctgcatatgaattccgtgtgatcgccaaaaatgctgcaggtgccatcagtccaccatctgagccatctgatgctatcacttgcagggatgatgttgaggcaccaaagataaaggtggatgttaaatttaaggacacggttatattaaaagcaggtgaagcattcagactggaagctgatgtttcaggccgcccacctccaacaatggaatggagcaaagatggaaaagagctggaaggcacagcaaagttagaaataaaaattgcagatttctctactaatctggtaaacaaagattcaacaagaagggatagtggtgcctatacccttacagcgactaatcctggtggctttgctaaacacattttcaatgtcaaagttcttgacagaccaggcccacctgaaggacctttggctgtaactgaagtgacatcagaaaagtgtgtactatcatggttccctccactggatgatggaggtgccaaaattgatcattacatagtacagaaacgtgaaaccagcagattggcatggacaaatgtagcctcagaagtccaagtaacaaagctaaaggtcactaaactcttgaaaggcaatgaatacatattccgtgtcatggctgtaaataaatatggagtgggagagccactggaatcagagcctgtgcttgcagtgaatccttatggaccccctgatccgcccaaaaaccctgaagtgacaactattactaaagattcgatggttgtctgctggggacatcctgattctgatggtggaagtgaaatcatcaattatattgtggaacggcgtgataaagctggccaacgctggattaaatgcaacaaaaaaactcttactgatttaagatataaagtgtctggactgacagaaggacatgaatatgagttcaggattatggctgaaaatgctgctggaattagtgcaccaagtcctaccagtccattttacaaggcttgtgacactgtgtttaaacctggaccaccaggtaacccacgtgttctggatacaagcagatcatccatttcaatcgcttggaataaacctatctatgatggtggttcagaaatcactgggtatatggttgagattgccctgccagaggaagatgaatggcagattgtcactccaccagcaggactcaaggcaacttcgtatactatcactggcctcacagagaatcaggaatataagatccgcatctatgccatgaattccgaaggacttggggaacctgcccttgttcctggaactccaaaggctgaagacagaatgctgcctccagaaattgaactggatgctgacctgcgcaaagttgttactataagggcctgctgcaccctgagactttttgttcccatcaaaggaaggcctgcacctgaggtgaagtgggcccgggaccatggagaatctttagataaagctagcatcgaatccacaagctcttacaccctgcttattgttggaaatgtaaacagatttgacagtggcaaatatatactaactgtagaaaatagttcaggcagcaagtctgcatttgtcaatgttagagttctcgatacaccaggccccccacaggatctgaaggtaaaagaggtcactaagacatctgtcacactcacatgggacccacctctccttgatggaggttcaaaaatcaagaactatattgttgaaaagcgggaatcaacaagaaaagcatattcaactgttgcaacaaactgccacaagacttcctggaaggtagaccagcttcaagaaggctgtagctactatttcagggttctcgcagaaaatgaatatggcattgggctgcctgctgaaaccgcagaatctgtgaaagcatcagaacgacctcttcctccaggaaaaataactttgatggatgtcacaagaaatagtgtgtcactctcttgggagaaaccagagcatgatggaggcagccgaattctaggctacattgtggagatgcagaccaaaggcagtgacaaatgggccacgtgtgccacagtcaaggtcactgaagccactatcactggattaattcagggtgaagaatactctttccgtgtttcagctcagaatgaaaagggcatcagtgatcctagacaactgagtgtgccagtgatcgccaaagatcttgtcattccaccagccttcaaactcctgttcaatactttcactgtactggcaggtgaagacctaaaagttgatgttccattcattggccgccctaccccagctgtaacctggcataaagataatgtaccactgaagcagacaactagagtaaatgcagagagcacagaaaataattcactactgacaataaaggacgcctgccgagaagatgttggccattatgtggttaaactgactaactcagctggtgaagctattgaaacccttaatgttatcgttcttgacaaaccagggcctccaactggaccagttaaaatggatgaagtgacagctgatagtattactctttcctggggcccacccaagtatgatggtggaagttctatcaataattacattgttgagaaacgggacacttccacaaccacctggcaaattgtatcagctacagttgcaaggacaacaataaaggcttgcagactgaagactggatgtgaatatcagtttagaattgcagctgaaaacagatatgggaagagtacctacctcaattcagagcctactgtagcccaatatccattcaaagttcctggtcctcctggcactccagttgtcacactgtcctccagggacagcatggaagtacaatggaatgagccaatcagtgatggaggaagtagagtcattggctatcatctagaacgcaaggaaagaaatagcatcctctgggttaagttgaataaaacacctattcctcaaaccaagtttaagacaactggccttgaagaaggtgttgaatatgaatttagagtctctgcagagaacatcgtgggcattggcaagccgagtaaagtatcagaatgttatgtggctcgtgacccatgtgatccaccaggacggccagaggcaatcattgtcacaaggaattctgtgactcttcagtggaagaaacccacctatgacggtggaagcaagatcactggttatattgttgagaagaaagaattacctgagggccgttggatgaaagccagttttacaaatattattgacactcattttgaagtaactggcctagttgaagatcacagatatgagttccgggttatagcccgaaatgccgcaggagtgtttagtgagccttcagaaagcacaggagcaataacagctagagatgaggtagatccaccacgaataagtatggatccaaaatacaaagacacaatcgtggttcatgctggtgaatcattcaaggttgatgcagatatttatggcaaaccaataccaaccattcagtggataaaaggtgatcaggagctttcaaacacagctcgattagaaataaagagcaccgactttgccaccagtctcagtgtaaaagatgcagtacgtgtcgacagtggaaattacatactgaaggccaaaaatgttgcaggagaaagatcagttactgtgaatgtcaaggttcttgacagaccagggccacctgaaggacctgttgttatctcaggagttacagcagaaaaatgcacactagcttggaaacccccacttcaggatggtgggagtgacatcataaattatattgtggaaaggagagaaaccagccgcttagtttggactgtggttgatgccaatgtgcagactctcagctgcaaggttactaagcttcttgaaggcaatgaatatactttccgtataatggcagtaaacaaatatggtgttggtgaacctcttgaatctgagccagtagttgccaagaatccatttgtagtaccagatgcaccaaaagctccagaagtcacaacagtgaccaaggactcaatgattgttgtatgggaaagaccagcatctgatggtggtagtgaaattcttggatatgttcttgagaaacgggataaagaaggcattagatggacaagatgccataagcgtctgattggagagttgcgcctgagagtaactggactcatagaaaatcacgattatgagttcagagtttctgctgagaatgctgctggacttagtgaaccaagccctccttctgcttaccaaaaggcttgtgatcctatttataaaccaggacccccaaacaaccccaaagtcatagacataaccagatcttcagtattcctttcttggagcaaaccaatatatgatggtggctgtgaaattcaaggatacattgttgaaaaatgtgatgtgagtgttggtgaatggacaatgtgcactccaccaacaggaattaataaaacaaacatagaagtagagaagctgttggaaaagcatgaatacaacttccgtatctgtgctattaataaagctggagttggagaacatgctgacgtccctggacctattatagttgaagaaaaattagaagcaccagacattgatcttgacctagaactaaggaaaatcataaatataagggcaggtggctccttaaggttatttgttcctataaaaggtcgtcctacaccagaagttaaatggggaaaggtggatggtgaaatccgagatgcagctataattgatgtcactagcagtttcacctctcttgttcttgacaatgtcaaccgatatgatagtggaaaatatacgcttacattagaaaacagcagtggaacaaagtctgcctttgttactgtgagagttctggacacgccaagtccacctgttaacctgaaagtcacagaaatcaccaaagactcagtatcaattacatgggaacctcctttgttggatgggggatccaaaataaaaaattacattgttgagaaacgtgaagccacaagaaaatcatatgctgctgttgtaactaactgccataagaattcttggaaaatcgatcagctccaagaaggttgcagttattactttagagtcacagctgagaatgagtatggtattggccttcctgcccagactgctgatccaattaaggttgcagaagtgccacaacctcctggaaaaataactgtggatgatgtcaccagaaacagtgtctctctgagttggacaaaacctgaacatgatggtggcagtaaaatcattcagtatattgtggaaatgcaagctaaacacagtgagaaatggtcagagtgtgctcgagtaaagtctcttcaggcagtaattaccaacctaactcaaggggaagaatatctttttagagttgttgctgtaaatgaaaaggggagaagtgatcctcggtcccttgcagttccaatagttgccaaagatctggtaattgagccagatgtaaaacctgcattcagtagttacagtgtacaggttggccaagatttgaaaatagaagtgccaatttctggacgtcctaagccaaccattacctggactaaagatggtctcccactgaagcagaccacaagaatcaatgttaccgattcactggatctcaccacactcagtattaaagaaactcataaggatgatggtggacaatatggaatcacagttgccaatgttgttggtcagaagacagcatccatcgaaattgtaactctagataaacctgatcctccaaaaggacctgttaaatttgatgacgtcagtgctgaaagtattacattatcttggaaccctccattatatacagggggctgccaaatcaccaactacattgttcagaaaagagatacaaccaccacagtatgggatgttgtttctgctactgttgctagaactacactcaaagtgaccaaactgaaaactggtacagaataccaatttagaatatttgccgaaaacagatatggacaaagctttgccttagagtctgatccaattgtagctcaatatccctacaaagaaccaggccctccaggtacaccatttgccacagccatttccaaagactccatggtcatacagtggcatgaaccagtcaacaatggtggaagccccgtcataggttaccacctggagagaaaagaaagaaacagtattttgtggacaaaggtcaacaaaactattattcatgacacccaattcaaagcacagaatcttgaagaaggcattgaatatgaattcagagtgtatgctgaaaatattgttggtgtaggcaaagcaagcaagaattctgaatgctatgtagccagagatccctgtgacccaccaggaaccccagaaccaataatggttaaaagaaatgaaatcactttacagtggaccaaacctgtgtatgatggtggaagtatgattacaggctacattgtagagaaacgtgatttgcctgatggtcgttggatgaaagctagctttacaaatgtcattgaaactcaatttactgtgtcaggtcttactgaagatcaaagatatgaattcagagtcattgcaaagaatgcagctggtgcaataagtaaaccctctgacagtactggaccaataactgccaaggatgaggttgaactcccaagaatttcaatggatccaaaattcagagacacaattgtggtaaatgctggagaaacattcagacttgaggctgatgtccatggaaagcccctacctaccattgagtggttaagaggagataaggaaattgaagaatctgctagatgtgaaataaagaacacagatttcaaggctttacttattgtaaaagatgcaattagaattgatggtgggcagtatattttaagagcttccaatgttgcaggttctaagtcattcccagtaaatgtaaaagtattagatagaccaggacctccagaagggccagtccaggttactggagtcacttctgaaaaatgctctttaacatggtctccaccacttcaagatggtggcagtgacatttctcactatgttgttgaaaagcgagaaaccagtcgacttgcctggactgttgttgcttcagaagttgtgaccaattctctgaaagttaccaaactcttagaaggtaatgaatatgttttccgtataatggctgtcaacaaatatggtgttggagagcctttggaatctgcaccagtactaatgaaaaatccatttgtgcttcctggaccaccaaaaagcttggaagtcacaaatattgccaaagactccatgaccgtctgttggaaccgtccagatagtgatggtggaagtgagattattggttacattgtagagaaaagagacagaagtggcattcgatggataaaatgtaataaacgccgcattacagatttgcgtctaagagtgacaggattaacagaagatcatgagtatgaattcagggtctctgcagaaaatgctgctggagttggggaaccaagtccagctacagtttattataaagcctgtgatcctgtgttcaaacctggcccacctaccaatgcacacattgtagacaccactaaaaattcaatcacacttgcctggggtaaacccatctatgatggcggcagtgagatcttgggatatgtagtagaaatctgtaaagcagatgaagaagaatggcaaatagttactccacagactggcctgagagtcactcgatttgaaatttcaaaactcactgaacaccaagagtataaaatacgagtctgtgccctcaacaaagttggtttaggtgaggctacatcagttcctggtactgtgaaaccagaagataaacttgaagcacctgaacttgaccttgactccgaattaagaaaaggaattgttgtaagagctggtggatctgccagaattcacattccattcaaaggtcgtccaacgcctgagatcacttggtctcgagaggaaggtgaattcacagataaggtccaaattgaaaagggagtaaactatacccaactatcaatagataactgtgatagaaatgatgctggaaaatacattcttaagttggaaaacagcagtggatcaaagtctgcttttgtaactgtgaaagttcttgacactccaggaccaccacagaatttggcagtcaaagaagtgagaaaagattctgccttcctggtatgggagccacccatcattgatggaggggcaaaggtcaagaactatgtgattgacaaacgtgagtcaaccagaaaagcgtatgctaatgtgagtagtaaatgcagcaaaacaagttttaaagtggaaaaccttacagaaggagccatttattacttcagagtcatggctgaaaatgaatttggagttggtgttccagtggaaactgttgatgccgtgaaagctgctgaacctccttccccaccaggaaaggttacactcactgatgtgtcccagaccagtgcatcacttatgtgggagaaacctgaacatgatggcggtagcagagtcctggggtacgttgttgaaatgcagcccaaaggaactgaaaaatggagcattgtggctgaatccaaagtctgtaatgcagttgttactggtttgagttctggacaagaatatcagttccgtgtcaaggcttataatgagaaaggaaaaagcgatccaagagtgttgggtgttcctgtcatagccaaggacttgactatacagcctagtttaaagttaccatttaacacatatagtatccaagctggagaagatcttaaaatagaaattccagttataggccgaccaagacctaacatttcttgggtcaaagatggtgagcctcttaaacagacaacaagagtaaacgttgaagaaacagctacctcaactgttttgcacattaaagaaggtaacaaagatgactttggaaaatacaccgtaacggcaacaaatagtgcaggcacagcaacagaaaatctcagtgttatcgttttagaaaagcctggacctccagttggcccagttcggtttgatgaagttagtgcagactttgtagtcatatcttgggaacctccagcctatactggtggctgccaaataagcaactacattgtagagaagcgagatacaaccaccaccacttggcacatggtatcagcaacagttgcaagaacaacaattaaaataaccaaactgaaaacaggcacggagtaccagtttagaatttttgctgaaaacaggtatggaaaaagtgccccactggattctaaggcagttattgtacaatatccatttaaagaacctggaccacctggaactccttttgtgacatcaatctcaaaagatcagatgcttgtgcaatggcatgagccagtgaatgatggaggcaccaaaattattggctaccatcttgaacagaaagaaaagaacagtattttatgggtcaagttaaataagacccccattcaggacaccaaattcaaaacaactgggcttgatgagggccttgagtatgagttcaaagtttctgctgaaaatattgttggcattggcaagcctagcaaagtgtcagaatgctttgttgctcgtgatccatgtgacccacctggtcgccctgaagccattgttattacaagaaacaatgtcacactgaaatggaagaaacctgcctatgatggtggtagcaaaataacaggttatattgtagaaaagaaagatctacctgatggccgctggatgaaagccagctttaccaacgtattagaaactgaatttacagtgagtggacttgtagaagaccaaagatatgaatttagagtaattgcaagaaatgcagctggaaactttagtgaaccatctgatagtagtggtgccattactgcaagagatgaaattgatgcaccaaatgcctctctggatccaaaatataaagatgtcatcgttgttcatgcaggagagacttttgttcttgaagccgacatccgtggcaaacctatacctgatgttgtttggtcaaaagatggaaaagaacttgaagaaacagctgctagaatggaaattaaatctactattcagaaaacaactcttgttgtcaaagactgtatacggactgatggaggacaatatattctgaaactcagcaatgttggtggtacaaagtctatacccatcactgtaaaggtacttgacaggccagggcctcctgaagggcctctgaaagttactggagttactgcggaaaaatgttacctggcatggaacccacctttgcaagatggtggtgctaatatttcacattacatcattgaaaagagggagacaagccgactctcttggacccaggtttcaactgaggtacaggcccttaactacaaagttactaaacttcttcctggtaatgagtacattttccgtgtcatggctgtgaataaatatggaattggagagcccttggaatctgggcctgttacggcctgtaatccttataagccaccaggtcctccctcaacacctgaagtctcagcaatcaccaaagattctatggtagtaacatgggcacgcccagtagacgacggaggtaccgaaattgagggctacattcttgaaaaacgagataaggaaggcgttagatggaccaagtgcaacaagaaaacattaacggatctgcggctcagggtaactggtcttaccgaaggccattcctatgaattcagagttgctgctgaaaatgcagctggtgtgggagaacctagtgagccatctgttttctaccgtgcgtgtgatgccttgtatccaccaggtcccccaagcaatccaaaagtgacggacacttccagatcttctgtctccctggcatggagtaagccaatttatgatggtggcgcacctgttaaaggctatgttgtagaggtcaaagaagctgctgcggatgaatggacaacctgcactccaccaacaggattacaaggaaagcagttcacagtgaccaagcttaaagaaaacactgaatataacttccgtatttgtgccatcaattctgaaggtgtaggtgaacctgcaactctacctggctcagtggttgctcaggagaggatagagccaccagaaatagaactcgatgctgatctcagaaaggtggtcgttctgcgtgcaagtgctactttacgcttatttgtcactatcaaaggtcgaccagaacccgaagttaaatgggaaaaggcagaaggcattctcactgacagggctcagatagaggtgaccagctcatttacaatgttggtgattgataatgttaccagatttgacagtggtcggtataatctgacattagaaaataatagtggctccaaaacagcttttgttaacgtcagagttcttgactcaccaagtgcccctgtgaatttgaccataagagaagtgaagaaagactcagtgacgttgtcctgggaaccaccacttattgatggtggagctaagattacaaactacattgtcgaaaaacgagaaactacaagaaaagcctatgctaccattacaaataattgcactaaaactactttcagaattgaaaatctacaagaaggatgttcttactacttccgagtcttggcttccaatgaatatgggattggtttgccagctgaaacaacagaacccgttaaagtgtctgaaccacccctcccacctggaagagtaactcttgttgatgtgacccgtaatacagctacaattaagtgggagaaaccagaaagtgatggtggcagcaaaattactggttatgtggttgaaatgcagactaaagggagtgaaaagtggagcacctgcacacaagttaagactctagaagcaactatatctggcttaactgcaggagaagagtatgtcttcagggtagctgcagttaacgaaaagggaagaagtgatccaagacaacttggagtgccagtaattgcaagggatattgaaataaagccttcagttgagcttcctttccatactttcaatgtaaaggctagagaacaacttaagattgatgtgccattcaaaggaagacctcaagctactgtgaactggagaaaagatggtcagactcttaaagagacaactagagtcaatgtttcttcttcaaagactgtaacatcactatctattaaggaagcttcaaaggaagatgttggaacttatgaattatgtgtttcaaacagtgctggatccataacagttcctattactataattgtccttgacagaccaggacctccaggtcctatacgtattgatgaggttagttgtgacagcataaccatttcttggaatcctccagaatatgatggtggctgccaaattagcaattacattgttgaaaagaaagaaaccacctctacaacatggcacatagtttcacaagcagttgcaagaacatccattaaaatagttcgcctgacaacaggaagtgagtatcagttccgtgtttgtgcagaaaaccgctatggaaagagctcctacagtgaatcttcagctgttgttgcagagtatccattcagtcccccaggtcctcctggtactcctaaagttgtgcatgccacaaaatctaccatgcttgtaacctggcaagtgccagttaatgatggaggaagtcgagtaattggctatcatcttgagtataaagaaagaagcagcattctttggtcaaaagcaaataaaatcctcattgctgatactcaaatgaaagtctccggccttgatgaaggactgatgtatgagtatcgtgtatatgctgaaaatattgctggaattggtaaatgcagtaaatcttgtgaaccagtccctgcaagagatccttgtgaccctcctggacaacctgaagtcacaaatatcacaagaaaatcagtgtcacttaaatggtctaaaccacattatgatggtggagctaagatcacaggatacattgttgaacgcagagaactaccagatggccggtggctgaagtgcaattatactaatatacaagaaacatactttgaagtaactgaacttactgaagatcagcgttatgaattccgggtttttgcaaggaatgctgctgactcagttagtgagccatctgaatccactgggcctattatagttaaagatgatgttgagcctccaagagttatgatggatgtcaagttccgagacgttattgttgtcaaagctggagaggtccttaagataaatgcagacattgcagggcgacctctgccagtaatttcctgggccaaggatggtatagaaattgaagaaagagcaagaacagaaatcatctcaacagacaatcatactttgttaacagttaaagactgtataagacgagacactgggcaatatgtactaacactgaagaatgttgccggcactcggtctgtggccgttaattgcaaagtacttgataagcctggtccaccagcaggaccacttgaaataaatggcctcactgctgagaaatgctctctttcctggggacgtccccaagaagatggtggtgcagatatcgactattacatcgtagaaaaacgtgaaacaagccaccttgcatggacaatatgtgaaggagagttacagatgacatcctgtaaagtaaccaagttactcaaaggcaatgaatatatatttagagtaactggtgttaataaatatggtgttggtgagcccctagagagtgtagctataaaggcactagatccatttacagttccaagtccacccacgtctttggaaattacttctgtgaccaaagaatctatgacactttgctggtcaagacccgagagtgatggaggtagtgaaatatctggatatataattgaaaggcgagagaaaaatagcctaagatgggtgcgtgtaaacaaaaaaccagtttatgatctaagagtgaaatcaacaggacttcgggaaggatgtgaatatgaatatcgtgtttatgcagaaaatgctgctggcctaagtcttccaagtgaaacctctcccttaattagggcagaagatccagtgttcctaccatctcctccatccaaacccaaaattgtggactcaggcaagacaactataactattgcctgggttaagccgctgtttgatggtggggccccgataactggatatactgtagaatacaaaaaatctgatgacactgactggaaaacttccattcagagcttacgagggacagaatatacaataagcggactaacaacaggagctgaatatgttttcagagtaaaatctgtcaataaggttggtgctagtgaccccagtgatagctctgaccctcagatagcaaaggaaagagaagaagaacctttatttgatattgacagtgaaatgaggaagaccttgattgtcaaggctggtgcctcatttaccatgactgtgcctttccgaggaagaccagtacccaatgtcttgtggagtaagccagacactgacctccgtactagagcttatgttgataccacagactcccgtacatcactgaccattgaaaatgccaacagaaatgactctggaaagtacacattaacaattcagaatgttttgagtgctgcttcactgaccttagttgtcaaagttttagataccccaggtcctccaaccaacattactgtgcaagatgtaaccaaagagtctgcagtgttatcctgggatgttcctgaaaacgatggtggagcaccagtgaagaattaccacatagaaaaacgtgaggccagcaagaaagcatgggtctctgtgaccaacaactgtaaccgcctctcctacaaagttaccaatttacaagaaggagctatctattacttcagagtctctggagaaaatgagtttggtgttggtataccagctgaaacaaaggaaggagtaaaaataacagaaaaaccaagcccacctgaaaaacttggagtaacaagtatatccaaagacagtgtttccctgacctggctgaagcctgaacatgatggcggaagcagaattgtacactatgtcgttgaagcactagaaaaaggacagaaaaactgggttaaatgtgcagtggcaaagtcaacccatcacgttgtttccggtctgagagagaattctgaatactttttccgagtgtttgctgaaaatcaagctggcctgagtgacccgagagagcttctgcttcctgttcttattaaggagcaactagaaccacctgaaattgatatgaagaatttcccaagtcacactgtatatgttagagctggttcaaaccttaaagttgacattccaatctctggaaaaccacttcccaaagtgaccttatcaagagatggtgtcccccttaaggcaaccatgagatttaataccgaaattactgctgagaacctgaccatcaatctcaaagaaagtgttacagctgacgctgggagatatgaaatcactgctgccaactccagtggtacaaccaaagctttcattaacattgttgtgctagacaggcctggtcctccaactggccctgttgttattagtgatataactgaagaaagtgtgactctcaaatgggagccacctaagtatgacggtggaagtcaagttaccaactacattctactcaaaagagaaacaagtactgcagtgtggactgaagtgtctgcaacagttgcaagaaccatgatgaaagtcatgaaactgaccacaggagaagaataccaattccgcatcaaggcagaaaaccgctttggcatcagtgatcatatagattcagcttgtgtgactgtcaaactaccatacacaacacctggaccaccatctacaccatgggtcactaatgttactcgagaaagcatcactgtgggctggcatgaaccagtgtcaaatggaggcagtgcagtcgtaggctatcacctggaaatgaaagacagaaacagtattttatggcaaaaagccaacaaactggtcatccgcacaactcacttcaaagtcacaacaatcagtgctggacttatttatgaattcagggtgtatgcagaaaatgctgctggagttggaaaacctagccatccttctgaaccagtcttggcaattgatgcttgtgaacccccaagaaatgttcgtatcactgatatttcaaagaactctgtcagcctttcatggcaacaaccagctttcgatggaggtagcaagattacaggctacattgttgagagacgtgaccttccagatggcagatggaccaaggccagcttcaccaatgttactgaaactcaattcatcatctctggcttgactcagaattcccagtatgaattccgtgtctttgctaggaatgctgttggttccattagcaatccatctgaggttgtagggcccattacttgcatcgattcttatggtggtcctgtaattgatttgcctctagaatatacagaagttgtcaaatacagagcaggtacatctgtgaagctcagagctggcatttctggcaaacctgcgcctactattgagtggtataaagatgataaagaattacaaaccaatgcactggtgtgtgttgaaaataccacggacctcgcatctatactcatcaaagatgccgatcgccttaatagtggatgctatgaattaaaactaaggaatgccatgggctcagcctcagccaccatcagagtacagatccttgacaaaccaggcccacctggtggaccaattgaatttaagactgtaactgctgagaagatcacccttctctggcggcctccagctgatgatggtggtgcaaaaatcactcactacattgtggaaaagcgtgagacaagccgcgttgtgtggtctatggtgtctgaacatttggaagagtgcatcattacaaccaccaaaattatcaaaggaaatgaatacatcttccgggtccgagccgtgaacaaatatggaattggcgagccactggaatctgattccgttgtagccaagaacgcatttgttacacctgggccaccaggcataccagaagtgacaaagattaccaagaattcgatgactgttgtatggagcaggccaattgcagatggcggtagtgatataagtggctatttccttgaaaaacgagacaagaagagcctaggatggtttaaagtactaaaagagactatccgtgacaccagacaaaaagtaacaggactcacagaaaacagtgactatcaatacagagtttgtgctgtaaacgctgctggacagggtccattttctgaaccatctgaattctacaaagctgctgatcctattgatcctccaggtccacctgctaagataagaatcgcagattcaaccaagtcatccatcacccttggctggagtaagcctgtctatgatgggggcagtgctgttactgggtatgttgtcgagataagacaaggagaggaagaggaatggactactgtctctaccaaaggagaggtcagaactacagaatatgtggtatccaacctgaaacctggagtcaattactacttccgggtatctgctgtaaactgtgctggacaaggagaacctatagaaatgaatgaacctgtacaagctaaagatatacttgaggcaccagagattgacctggatgtggctctcagaacttctgttattgccaaagctggtgaagatgtacaagtgttgattccctttaaaggcagacctccacctactgtcacatggagaaaagatgagaagaatcttggcagtgatgccagatacagcattgaaaacactgattcatcctcattactcaccattcctcaagttactcgcaatgatacaggaaaatatattctcacaatagaaaatggagttggtgaacctaagtcttcaactgtgagtgttaaagtgcttgacacaccagctgcctgccagaaactacaggttaaacatgtttctcgaggcacagtcactttgctctgggatcctcctctcattgatggaggatctccaataattaattatgtcattgaaaagagagatgccaccaagagaacatggtctgtcgtgtcacacaaatgttctagcacatccttcaagctaatagatttgtcggagaagactccattcttcttcagagttcttgcagaaaatgaaattggaattggggaaccctgtgaaactacagagccagtgaaggctgctgaagtaccagctcctatacgtgatctctcaatgaaagactcaacaaagacatctgtcatcctcagctggaccaaacctgactttgatggtggtagcgtcatcacagaatatgttgtagaaaggaaaggtaaaggtgaacagacgtggtcccacgctggcataagtaagacatgtgaaattgaggttagccaacttaaggagcagtcagtcctggagttcagagtgtttgccaaaaatgagaaaggactgagtgatcctgtcactattgggccaattacagtgaaagaacttattattacacctgaagttgacctgtcagatatccctggggcacaagtcactgtgagaattgggcacaatgtgcaccttgaattaccttataagggaaaacccaaaccatccatcagttggctgaaagatggcttgccactgaaagaaagtgaatttgttcgcttcagtaaaactgaaaacaaaattactttgagtattaagaatgccaagaaggagcatggaggaaaatacactgttattcttgataatgcagtgtgtagaattgcagtccccattacagtcatcacccttggcccaccatcaaagcccaaaggacccattcgatttgatgaaatcaaggctgatagtgtcatcctgtcatgggatgtacctgaagataatggaggaggagaaattacttgttacagcatcgagaagcgggaaacttcacaaactaactggaggatggtgtgttcaagtgttgccagaacgactttcaaagttcctaatctagtcaaagatgctgagtaccagtttagagtgagagcagaaaacagatacggagtcagccaaccacttgtctcaagcattattgtggcaaaacaccagttcaggattcctggtcccccaggaaagccagttatatacaatgtgacttctgatggcatgtcactaacttgggatgctccagtttatgatggtggttcagaagttactggattccatgttgaaaagaaagaaagaaatagcatcctctggcaaaaagttaatacatcaccaatctctggaagagaatatagagccactggactggtagaaggtctggattaccaattccgtgtatatgctgaaaattctgctggcctaagctcacctagtgacccaagcaaatttaccttagctgtttctccagtagacccacctggcactcctgactacattgatgtcacccgggaaaccatcacacttaaatggaacccaccattgcgtgatggaggcagtaagattgtgggctatagcattgagaaacggcaaggaaatgaacgctgggtgagatgcaactttactgacgtcagtgaatgtcagtacacagttacaggactcagtcctggggatcgctatgagttcagaataattgcaagaaatgctgttggaactataagcccgccctcacagtcttctggcattattatgacaagagatgaaaatgttccaccaatagtagagtttggccctgaatactttgatggtctcattattaagtccggagagagccttagaattaaagctttggtacaaggaagaccagtgcctcgagtaacttggttcaaagatggagtggaaatcgaaaagaggatgaatatggaaataaccgacgtacttggatccaccagcctatttgttagagatgctactcgggaccatcgtggtgtatacacagtggaagccaaaaatgcatctggttctgcaaaagcagaaattaaagtgaaagtacaagatacaccaggaaaagtagttgggccaataagattcaccaatattactggggagaagatgactctgtggtgggatgccccactcaatgacggttgtgctcccataacccactacatcattgaaaaacgggaaaccagcagacttgcctgggcactaattgaggataaatgtgaagcccaaagttacactgccattaaactaataaacggcaatgaataccaattccgtgtttctgcagttaacaagtttggtgttggcaggccacttgattctgatccagtggttgctcaaatacaatatactgttcctgatgcccctggcattccagaacctagcaacataacaggcaacagcattaccctgacatgggcaaggccagaatcagatggtggcagtgaaattcaacagtatatccttgaaagaagagaaaagaaaagcacaagatgggtaaaagtgatcagcaaacgaccaatctctgaaacaagattcaaagtcactggtctgacagaaggcaatgagtatgaattccatgtcatggctgaaaatgctgcaggagttggacctgcaagtggcatctcaagactcattaaatgtagagagcccgtcaacccaccaggtcctcccacagtggtcaaagtaacagacacatcaaagacaactgtgagcttagaatggtccaaaccagtgtttgatggtggcatggaaataattgggtatattattgaaatgtgtaaggccgacttaggagactggcacaaggtgaatgcagaggcatgtgtgaaaacaagatatacagtcactgatctacaagcaggtgaagaatacaaattccgagttagtgctatcaatggtgctggaaaaggcgacagctgtgaagtgactggcacaattaaagcagttgaccggttaacagctcctgagttagacatagatgcaaacttcaaacagactcatgttgttagagctggggccagtattcgcctcttcattgcctaccaaggtagacctactcctacagctgtgtggagcaaaccagactctaaccttagccttcgggctgatatccatacaacagattccttcagcaccctcactgtggaaaactgcaacagaaatgatgcagggaaatatacccttactgtggaaaacaacagtggtagtaagtcaatcacattcaccgtgaaagtgctagacactccaggcccacctggcccaattaccttcaaagatgtgacccggggatctgctacattgatgtgggatgcccctcttcttgacggtggtgcccgaatccatcattatgtggtagagaaacgagaggcaagtcgccgtagttggcaggttatcagtgaaaaatgcactcgtcagatcttcaaggtcaatgacctggccgaaggtgttccgtactatttccgtgtttctgcagtaaatgagtatggtgttggtgagccctatgaaatgccagaaccaattgtagccacagaacagcctgctccacctaggagacttgatgttgttgatactagcaaatcctccgcagtcttagcttggcttaaacctgaccacgatggaggcagccggatcactggctacctgcttgaaatgagacaaaagggatctgacttctgggttgaagctggtcacaccaaacagctaactttcacagtagagcgtcttgttgagaaaactgaatatgaattccgtgtgaaggccaagaatgatgctggctatagtgaacccagagaagccttctcttctgtcatcattaaggagcctcaaatcgagcccactgctgacctcactggaattaccaatcagcttataacttgcaaagcaggaagcccatttaccattgacgtaccaatcagtggtcgtcctgcccccaaagtaacatggaaactggaagaaatgagacttaaagagacagatcgagtgagcattacaacaacaaaagacagaaccacactgactgtaaaggacagcatgagaggtgactctggaagatacttcttgaccctggaaaatacagctggtgttaaaacatttagcgtcacagttgtggtcattggaaggccaggtccagtaaccggccccattgaggtctcatctgtctcagctgaatcgtgtgtcctgtcatggggagaacctaaagatggaggaggcactgaaattactaattacatagttgaaaagcgtgaatcgggtacaacagcttggcagcttgtcaattccagtgtcaagcgcactcaaattaaagtcactcatctcacaaaatacatggaatattctttccgtgtcagttcagagaacagatttggtgtcagcaaacctctagaatcagcaccaataattgctgaacatccatttgtcccaccaagcgctcctaccagacctgaggtctaccatgtgtctgccaatgccatgtctattcgttgggaagaaccctaccacgatggtggcagtaaaatcattggctactgggttgagaagaaagaacgtaatacaattctttgggtgaaagaaaacaaagtgccatgcttagagtgcaactacaaagtaactggtttagtagaaggactggaatatcagttcagaacttatgcactcaatgctgcaggtgttagcaaggccagcgaagcttcaagacctataatggctcaaaatccagttgatgcaccaggcagaccagaggtgacagatgtcacaagatcaacagtatcactgatttggtctgccccagcgtatgatggaggcagcaaggttgtgggctacatcatagagcgtaagccagtcagtgaggtaggagatggtcgctggctgaagtgcaactacaccattgtatctgacaatttcttcaccgtgactgctctcagtgaaggagacacttatgagttccgtgtgttagccaagaatgcagcaggcgtaattagcaaagggtctgaatctacaggccctgtcacttgccgagatgaatacgctccacccaaagccgaactggatgcccgattacacggtgatctggttaccatcagagcaggttctgatcttgttctggatgctgcagttggtggcaaacctgaacccaaaattatctggaccaaaggagacaaggagctagatctctgtgaaaaagtctctttgcagtatactggcaaacgagcaactgctgtgatcaagttctgtgacagaagtgacagtggaaaatacactttaacagtgaaaaatgccagcgggaccaaggccgtgtctgtcatggtcaaagtgcttgattcccctggcccatgtggaaagctcaccgtcagcagagtaacacaggagaagtgcactttagcctggagccttccgcaggaagacggaggagcagaaatcactcactacatcgtggaaagacgcgagactagcaggctcaactgggtgattgttgaaggcgaatgcccaaccctatcctatgtcgttaccaggctcatcaagaacaatgagtacatattccgagtgagggcagtaaacaaatatggccctggtgtgcctgttgaatcagagccaattgtagccagaaactcattcactattccatcaccacccggcatacctgaagaagttgggactggcaaagagcatatcatcattcagtggacaaaacctgaatctgatggtggcaatgaaatcagcaactacctagtagacaaacgtgagaagaagagcctgcgctggacacgtgtcaacaaagactatgtggtgtatgataccaggctgaaggtgaccagcctgatggagggttgtgattaccagttccgggtgaccgcagtgaatgcagctggtaacagtgagcccagcgaagcttccaacttcatctcatgcagagaaccatcatatacccctggaccaccttctgctccaagagttgtggataccaccaaacacagcattagtttggcatggaccaaacccatgtacgatggtggtactgacattgtaggatatgttctggaaatgcaagagaaggacactgatcagtggtaccgagtgcataccaatgccacaataagaaatactgaattcactgtgccagaccttaaaatgggccagaaatattccttcagagttgctgccgtgaacgtgaagggtatgagcgaatacagcgaatcaattgctgaaattgagcccgtggaaagaatagaaataccagatcttgagcttgcagatgatctaaagaagactgtgaccatcagggctggggcctccttgcgcttgatggtgtctgtatctggaagaccacctcctgtcataacgtggagcaagcagggcattgaccttgcaagccgggcaattattgacaccactgagagctactcattgctaatagtggacaaagttaatcggtacgatgctggaaaatacacaattgaagctgaaaaccaatctggcaagaaatcagcaacagtccttgttaaagtctatgatactcctggtccctgtccttcagtgaaagttaaggaagtatcaagagattctgtgactataacttgggaaattcccacgattgatggtggagctccagtcaacaattacatcgttgagaagcgtgaagctgctatgagagcattcaaaacagtaactaccaaatgcagcaagacactttacagaatttctggacttgtagaaggaaccatgtactatttcagagtgctgccagaaaatatttatggcattggagaaccttgtgaaacatctgatgcagtactggtctcagaagtgcctttggtgcctgcaaagctagaagtggtcgatgtcaccaaatccactgttacccttgcctgggaaaaaccactctacgatggtggtagccgactcactggatatgttctcgaggcctgcaaagctggcacagagagatggatgaaggttgtcaccttaaaacccacagtcctagagcacactgttacttccttaaatgaaggtgaacaatacttatttagaataagggcacaaaatgagaaaggtgtgtcagaaccaagagagactgtcacagccgtgactgtacaagacctcagagtgttgccaacaatcgatctttctacaatgcctcagaagaccatccatgtcccagctggcagaccagtagagctggtgatacctattgctggccgtccacctcctgctgcttcctggttctttgctggttctaaactgagagaatcagagcgtgtcacagttgaaactcacactaaagtagctaaattaaccatccgtgaaaccactatcagagatactggagaatacacacttgaattgaagaatgttaccggaactacttcagaaaccattaaagttatcattcttgacaagcctggtccaccaacaggacctattaagattgatgaaattgatgctacatcaattaccatttcctgggaaccacctgaattggacggtggtgctccactgagtggttatgtggtagaacaacgtgacgctcatcgtccaggatggctgcccgtttctgaatcagtgactaggtccacgtttaagtttaccagactcaccgaaggaaatgagtatgtgttccgtgtggctgcaacaaaccgcttcgggattggctcttacttgcagtctgaggtcatagagtgtcgcagcagcatccgtattcctggacccccagaaacattacagatatttgatgtttcccgtgatggcatgacacttacttggtacccaccagaggatgacggtggctcccaagtgactggatatattgtggagcgcaaagaagtgagagcagatcgatgggtccgtgtaaataaagtacctgtgacaatgacacggtaccgctccactggccttactgaaggcttagaatatgaacaccgtgtcacagccattaatgcaagagggtctgggaaaccaagtcgtccttccaaacccatcgttgccatggatccaattgctcctccaggaaagccacaaaacccaagagttactgatacaacaaggacatcagtctccctggcctggagtgttccagaagatgaaggaggatctaaagtcacaggctacttgattgaaatgcaaaaagtagatcaacatgaatggaccaagtgtaacaccactccaaccaagattcgagagtatactctaacacacctacctcagggtgcagaatacaggttccgcgtcctagcttgtaatgctggtggacctggtgagcctgctgaggtaccaggaacagtcaaagtcactgaaatgcttgaatatcctgattatgaacttgatgaaagataccaagaaggtatctttgtaaggcaaggtggcgtcatcagacttaccataccaatcaaaggaaaaccattcccaatatgtaaatggaccaaggaaggccaggatattagtaagcgtgccatgattgcaacatctgaaacacacactgagcttgtgatcaaagaagcagacaggggtgattctggcacttatgacctggttctggaaaataaatgtggcaagaaggctgtctacatcaaggtcagggtgataggaagtcccaacagtccagaagggccactggaatatgatgacatccaagtccgctctgtgagggtcagctggagacctcctgctgatgatggtggtgctgacatcttaggctacatcctcgagagacgagaagtgcctaaagccgcctggtataccattgattccagagtccgaggtacatctctggtggtaaaaggcctcaaagagaatgtagaataccatttccgtgtttcagcagaaaaccagtttggcataagcaaacccttgaaatctgaggaaccagtcacaccaaaaacaccattgaatcctccagaacctccaagcaatcctccagaagtactcgatgtaaccaagagttctgttagcttgtcctggtcccggcccaaagatgatggtggttctagagtcacaggctactacatcgaacgcaaagagacatccactgacaagtgggtcagacacaacaagactcagatcaccaccacaatgtacactgtcacagggcttgttcccgatgctgagtatcagttccgcatcatcgcacagaatgatgttggcctgagtgagaccagccctgcttctgaaccagttgtttgcaaagatccatttgataaaccaagccaaccaggagaacttgagattctttcaatatccaaagatagtgtcactctacagtgggagaaacctgaatgtgatggtggtaaagaaattcttggatactgggttgaatatagacagtctggagacagtgcctggaagaagagcaataaggaacgtattaaggacaagcaattcacaataggaggtttgctggaagctactgagtatgaattcagggtttttgctgagaatgagactgggctgagcagacctcgcagaactgctatgtctataaagactaaactcacatctggagaggccccaggaatacgcaaagaaatgaaggatgttaccacaaaattgggtgaagctgctcaactctcatgccagattgttggaaggcctcttcctgacattaaatggtacagatttggtaaagagctcatacaaagccggaaatacaaaatgtcttcagatggacgcacacacactcttacagtaatgacagaggaacaggaagatgaaggtgtttatacctgcatagccaccaatgaggttggagaagtagaaaccagtagtaagcttctcctgcaagcaacaccgcagttccatcctggttacccactgaaagagaaatattatggagctgtgggttccacacttcggcttcatgttatgtacattggtcgtccagtacctgccatgacttggttccatggtcagaaacttttgcaaaactcagaaaacattactattgaaaacactgagcactatactcatcttgtcatgaagaatgtccaacgtaagactcatgctgggaaatacaaagtccagctcagcaatgtttttggaacagttgatgccatccttgatgtggaaatacaagataaaccagacaaacctacaggaccaattgtgatcgaagctctattgaagaactccgcagtgatcagctggaaaccacccgcagatgacggaggctcctggatcaccaactatgtggtggaaaaatgtgaggccaaggagggggctgaatggcaattggtgtcttcagccatctcagtgacaacctgtagaattgtgaacctcacagaaaatgctggctattacttccgggtttcagctcagaacactttcggcatcagtgaccctctagaagtgtcctcagttgtgatcattaagagtccatttgaaaagccaggtgctcctggcaaaccaactattactgctgtcacaaaagattcttgtgttgtggcctggaagccacctgccagtgatggaggtgcaaagattagaaattactaccttgagaagcgtgagaagaagcagaataaatggatttctgtgacaacagaagaaattcgagaaactgtcttttcagtgaaaaaccttattgaaggtcttgaatacgagtttcgtgtgaaatgtgaaaatctaggtggggaaagtgaatggagtgaaatatcagaacccatcactcccaaatctgatgtcccaattcaggcaccacactttaaagaggaactgagaaatctaaatgtcagatatcagagcaatgctaccttggtctgcaaagtgactggtcatccaaaacctatcgtcaaatggtacagacaaggcaaagaaatcattgcagatggattaaaatataggattcaagaatttaagggtggctaccaccagctcatcattgcaagtgtcacagatgatgatgccacagtttaccaagtcagagctaccaaccaagggggatctgtgtctggcactgcctccttggaagtggaagttccagctaagatacacttacctaaaactcttgaaggcatgggagcagttcatgctctccgaggtgaagtggtcagcatcaagattcctttcagtggcaaaccagatcctgtgatcacctggcagaaaggacaagatctcattgacaataatggccactaccaagttattgtcacaagatccttcacatcacttgttttccccaatggggtagagagaaaagatgctggtttctatgtggtctgtgctaaaaacagatttggaattgatcagaagacagttgaactggatgtggctgatgttcctgacccacccagaggagtcaaagttagtgatgtctcacgagattctgtcaacttaacatggactgagccagcctctgatggtggcagcaaaatcaccaactacattgttgaaaaatgtgcaactactgcagaaagatggctccgtgtaggacaggcccgagaaacacgttataccgtgatcaacttatttggaaaaacaagttaccagttccgggtaatagctgaaaataaatttggtctgagcaagccttcagagccttcagaaccaaccataaccaaagaagataagaccagagctatgaactatgatgaagaggtagatgaaaccagggaagtctccatgactaaagcatctcactcttcaaccaaggaactctatgagaaatatatgattgctgaagatcttgggcgtggtgagtttggaattgtccatcgttgtgttgaaacatcctcaaagaagacatacatggccaaatttgttaaagtcaaagggactgatcaggttttggtaaagaaggaaatttccattctgaatattgctaggcatagaaacatcttacacctccatgaatcatttgaaagcatggaagaattagttatgatctttgagtttatatcaggacttgacatatttgagcgcattaacacaagtgcttttgaacttaatgaaagagaaattgtaagttatgttcaccaggtctgtgaagcacttcagtttttacacagtcataatattggacactttgacattagaccagaaaatatcatttaccaaaccagaagaagctctaccattaaaatcatagaatttggtcaagcccgtcagctgaaaccaggggacaacttcaggcttctattcactgccccagaatactatgcacctgaagtccaccagcatgatgttgtcagcacagccacagacatgtggtcacttggaacactggtatatgtgctattgagtggtatcaacccattcctggctgaaactaaccaacagatcattgagaatatcatgaatgctgaatatactttcgatgaggaagcattcaaagagattagcattgaagccatggattttgttgaccggttgttagtgaaagagaggaaatctcgcatgacagcatcggaggctctccagcacccatggttgaagcagaagatagaaagagtcagtactaaagttatcagaacattaaaacaccggcgttattaccacaccctgatcaagaaagacctcaacatggttgtgtcagcagcccggatctcctgtggtggtgcaattcgatctcagaagggagtgagtgttgctaaagttaaagtggcatccattgaaattggcccagtttctgggcagataatgcatgcagttggtgaagaaggaggacatgtcaaatatgtatgcaaaattgaaaattatgatcagtctacccaagtgacttggtactttggcgtccgacagctggagaacagtgagaaatacgaaatcacctacgaagatggagtggccatcctctatgtcaaagacattaccaaattagatgatggtacctacagatgcaaagtagtcaatgactatggtgaagacagttcttatgcagagctatttgttaaaggtgtgagagaagtctatgactattactgccgtagaaccatgaagaaaattaagcgcagaacagacacaatgagactcctggaaaggccaccagaatttaccctgcctctctataataagacagcttatgtaggtgaaaatgtccggtttggagtaactataactgtccacccagagcctcatgtaacatggtataaatcaggtcagaaaatcaaaccaggtgacaatgacaagaagtacacatttgagtcagacaagggtctttaccaattaacaatcaacagtgtcactacagatgatgacgctgaatatactgttgtggcaaggaacaaatatggtgaagacagctgtaaagcaaagctgacagtaaccctacacccacctccaacagatagtaccttaagacccatgttcaaaaggttactggcaaatgcagaatgccaagaaggccaaagtgtctgctttgagatcagagtgtctggcatccccccaccaacattaaaatgggagaaagatggtcagccactgtccctcgggcctaacattgaaattatccatgaaggcttggattattatgctctgcacatcagggacactttgcctgaagacacgggttattatagagtcacagccactaacacagctgggtccaccagctgccaggctcacctacaagtggaacgcctgaggtacaagaaacaggaattcaagagtaaggaggagcatgagcgacacgtacaaaaacaaattgacaaaaccctcagaatggctgaaattctttctggaactgaaagtgtaccactgacacaggtagctaaagaggctctgagagaagctgctgtcctttataaaccggctgtaagcaccaagactgtaaaaggggaattcagacttgagatagaagaaaagaaggaggagagaaaactccggatgccttatgatgtaccagagccacgcaagtataagcagactaccatagaagaagaccaacgcatcaagcagttcgtgcccatgtctgacatgaagtggtataaaaagatacgtgatcagtatgaaatgcctgggaaacttgacagagttgtacagaaacgacccaagcgcatccgcctttcaagatgggaacagttctatgtgatgcctcttccacgcattacagatcaatacagacctaaatggcgtattcctaaactgtcccaagatgatcttgagatagtgagaccagcccgccggcgtacaccttctcctgattatgacttttactaccgacctagaagacgttctcttggggacatctctgatgaagaattactcctccccattgatgactacttagcaatgaaaagaacagaggaagagaggctgcgtcttgaagaagagcttgagttaggtttttcagcttcacccccaagtcgaagccctccacactttgagctttctagcctacgttactcttcaccacaagctcatgtcaaggtggaggaaacaagaaaagacttcaggtattcaacctatcacatcccaacgaaggctgaagctagtacaagttatgcagaactgagggaacggcatgcccaggctgcgtacagacagccaaagcaacggcaaagaatcatggctgagagggaggatgaagagttgcttcgcccagttacgaccacccagcatctctcagaatacaaaagcgaacttgacttcatgtcaaaggaggaaaagtctagaaagaaatcaaggcgacaaagagaagtgacagaaataacagaaattgaggaagaatacgaaatctcaaaacatgctcaaagagaatcatcctcatctgcgtctagactactgagacgacggcgctccctgtctccaacttatattgagttaatgaggccagtgtctgagctgatccggtcacgtccacaaccggctgaggaatacgaagatgacacagaaagaaggtcacctactccagagagaactcgcccacgatcccccagccctgtgtctagtgagagatcactctcgagatttgagaggtctgcaagatttgatatcttttccaggtatgagtccatgaaagctgctttaaaaactcagaagacatcagaaaggaagtatgaagttttgagtcagcagcctttcacactggaccatgcccctcgaatcacactgagaatgcgctcgcacagggtaccatgtggccaaaatacacgttttattttaaatgttcagtctaagccaactgccgaggttaaatggtaccacaatggtgtggaactccaagaaagcagtaagattcattacaccaacacgagtggagtcctcaccctggaaattctggactgtcatactgatgacagtggaacctaccgtgctgtgtgcaccaactacaagggcgaagcttctgactatgcaacgttggacgtgacaggaggggattataccacctatgcttcccaacgcagagatgaagaggtccccagatctgttttccctgagctgacaagaacagaggcgtatgctgtttcatcatttaagaaaacatctgagatggaagcttcgtcttctgtcagggaagtgaaatcacagatgacggagacaagggaaagtctctcctcatatgaacactctgcatctgcagaaatgaaaagtgctgcattagaagaaaagtcactggaagaaaaatccacaaccagaaagatcaagacgactttggcagcaagaattctaacaaagccacggtccatgaccgtctacgagggcgagtctgcaaggttttcttgtgacaccgatggtgagccggtaccaactgtgacctggctgcgtaaaggacaagtgctaagtacttctgcccgccaccaagtgaccaccacaaagtacaaatcaacctttgagatctcttcagtccaggcttccgatgagggcaattacagcgtggtggtagaaaacagtgaagggaaacaagaagcagagttcactctgactattcaaaaggccagggtaactgaaaaggctgtgacatcaccaccaagagtcaaatccccagagcctcgggtgaaatccccagaagcagttaagtctccaaaacgagtgaaatctccagaaccttctcacccgaaagccgtatcacccacagagacaaaaccaacaccaacagagaaagttcagcacctcccagtctctgccccaccaaagattactcagttcctgaaagcagaagcttctaaagagattgcaaaactgacctgtgtggttgaaagcagtgtattaagggcaaaagaggtcacctggtataaagatggcaagaaactgaaggaaaatgggcatttccagtttcattattcagcagatggtacctatgagctcaaaatcaataacctcactgaatctgatcaaggagaatatgtttgtgagatttctggtgaaggtggaacgtctaaaaccaacttacaatttatggggcaagcctttaagagtatccatgagaaggtatcaaaaatatcagaaactaagaaatcagatcagaaaaccactgagtcaacagtaaccagaaaaactgaaccaaaagctcctgaaccaatttcctcaaaaccagtaattgttactgggttgcaggatacaactgtttcttcagacagtgttgctaaatttgcagttaaggctactggagaaccccggccaactgccatctggacaaaagatggaaaggccattacacaaggaggtaaatataaactctctgaagacaagggagggttcttcttagaaattcataagactgatacttctgacagtggactttatacttgtacagtaaaaaattcagctggatctgtgtcctctagctgcaaattaacaataaaagctataaaagatactgaggcacagaaagtctctacacaaaagacttctgaaattacacctcagaagaaagctgttgtccaagaggaaatttcccaaaaagccctaaggtctgaagaaattaagatgtcagaggcaaaatctcaagaaaagttagccctcaaagaggaagcttcaaaggttctgatttctgaagaagtcaagaaatcagcagcaacctccctggaaaaatccattgtccatgaggaaatcactaaaacatcacaggcatcagaagaagtcagaactcatgctgagattaaagcattttctactcagatgagcataaacgaaggtcaaagactggttttaaaagccaacattgctggtgccactgatgtgaaatgggtactgaatggcgtagagcttaccaactctgaggagtaccgatatggtgtctcaggcagcgatcagaccctaaccatcaagcaagccagtcacagagatgaaggaatcctcacctgcataagcaaaaccaaggaaggaatcgtcaagtgtcagtatgatttgacactgagcaaagaactctcagatgctccagccttcatctcacagcctagatctcaaaatattaatgaaggacaaaatgttctctttacttgtgaaatcagtggcgagccatcccctgaaatcgaatggtttaaaaacaacctgccaatttctatttcttcaaatgtcagcataagccgctccagaaatgtatactcccttgaaatccgaaatgcatcagtcagcgacagtggaaagtacacaattaaggccaaaaatttccgtggccagtgttcagctacagcttccttaatggtccttcctctagttgaagaaccttccagagaggtagtattgagaacaagtggtgacacaagcttgcaaggaagcttctcgtctcagtcagtccaaatgtctgcctccaagcaggaggcctccttcagcagtttcagcagcagcagtgctagcagcatgactgagatgaaatttgcaagcatgtctgcccaaagcatgtcctccatgcaagagtcctttgtagaaatgagttccagcagctttatgggaatatctaatatgacacaactggaaagctcaactagtaaaatgcttaaagcaggcataagaggaattccgcctaaaattgaagctcttccatctgatatcagcattgatgaaggcaaagttctaacagtagcctgtgctttcacgggtgagcctaccccagaagtaacatggtcctgtggtggaagaaaaatccacagtcaagaacaggggaggttccacattgaaaacacagatgacctgacaaccctgatcatcatggacgtacagaaacaagatggtggactttataccctgagtttagggaatgaatttggatctgactctgccactgtgaatatacatattcgatccatttaagagggcctgtgcccttatactctacactcattcttaacttttcgcaaacgtttcacacggactaatctttctgaactgtaaatatttaaagaaaaaaaagtagttttgtatcaacctaaatgagtcaaagttcaaaaatattcatttcaatcttttcataattgttgacctaagaatataatacatttgctagtgacatgtacatactgtatatagccggattaacggttataaagttttgtaccatttattttatgacattttacaatgtaagttttgaaactaactgttggtaggagaaagtttcttatggaacgaataccctgctcaacatttaatcaatctttgtgcctcaacatactgttgatgtctaagtatgcctcagtgggttgagaaaatccccattgaagatgtcctgtccacctaaaagagaatgatgctgtgcatatcacttgatatgtgcaccaatacctactgaatcagaaatgtaaggcattggtgatgtttgcatttaccctcctgtaagcaacactttaacgtcttacattttctctgatgatgtcacacaaaattatcatgacaaatattaccagagcaaagtgtaacggccaacactttgttcgctcattttacgctgtctctgacataaggagtgcctgaatagcttggaaaagtaacatctcctggccatcccttcatttaaccaagctattcaagtattcctatgccagagcagtgccaactcttggaggtcccagagtgcagccaatgcctttgtgtggtagttctaaattttaattgcacctgaaaaacctgggcacctaagcaatgagccacagcaaaaagtaaagaacaacaacaaaataaagctgttgttaaattttaaacaatattactaattgcccaaaatgtcaatttgatgtagttcttttcatgcaagtataaattcaattgttagttataattgttggacctccttgagatagtaacaacaaaataaagcaagctatctgcacctcaaaa

SEQ ID NO: 12700 - DNA, 101518 bp, Homo sapiens
agcagtcgtgcattcccagcctcgcctcgggtgtagggattgcatagaaaagcaaaactacacagtcttgactgtgtagttttgtttttaggattagaggctcaccgattcatgtcggagatggtcagaaaaaccaactctccataggacgtcgtttcagaagcaaccttgggcttagtcccaccctttttaggcactcttgagaaatcaagtgcctagaaagatgacaactcaagcaccgacgtttacgcagccgttacaaagcgttgtggtactggagggtagtaccgcaacctttgaggctcacattagtggttttccagttcctgaggtgagctggtttagggatggccaggtgatttccacttccactctgcccggcgtgcagatctcctttagcgatggccgcgctaaactgacgatccccgccgtgactaaagccaacagtggacgatattccctgaaagccaccaatggatctggacaagcgactagtactgctgagcttctcgtgaaagctgagacagcaccacccaacttcgttcaacgactgcagagcatgaccgtgagacaaggaagccaagtgagactccaagtgagagtgactggaatccctacacctgtggtgaagttctaccgggatggagccgaaatccagagctcccttgatttccaaatttcacaagaaggcgacctctacagcttactgattgcagaagcataccctgaggactcagggacctattcagtaaatgccaccaatagcgttggaagagctacttcgactgctgaattactggttcaaggtgaagaagaagtacctgctaaaaagacaaagacaattgtttcgactgctcagatctcagaatcaagacaaacccgaattgaaaagaagattgaagcccactttgatgccagatcaattgcaacagttgagatggtcatagatggtgccgctgggcaacagctgccacataaaacacctcccaggattcctccgaagccaaagtcaagatccccaacaccaccgtctattgctgccaaagcacagctggctcggcagcagtccccatcgcccataagacactccccttccccggtcagacacgtgcgggcaccgaccccatctccggtcaggtccgtgtctccagcagcaagaatctccacatcccccatcaggtctgttaggtctccattgctcatgcgtaagactcaggcatccaccgtggccacaggtcctgaagtgcctcccccttggaagcaagagggctacgtggcctcctcatctgaggctgagatgagagagacaacgctgacaacctctactcagatcaggacagaagagagatgggaagggagatacggtgtccaggagcaagtgaccatcagtggtgctgcgggtgctgccgccagtgtgtcggccagtgctagctacgcagcagaggctgttgccactggtgctaaagaggtgaaacaagatgctgacaaaagtgcagctgttgcgactgttgttgctgccgttgatatggccagagtgagagaaccagtgatcagcgctgtagagcagactgctcagaggacaaccacgactgctgtgcacatccaacctgctcaagaacaggtaagaaaggaagcggagaagactgctgtaactaaggtagtagtggccgccgataaagccaaggaacaagaattaaaatcaagaaccaaagaagtaattaccacaaagcaagagcagatgcacgtaactcatgagcagataagaaaagaaactgaaaaaacatttgtaccaaaggtagtaatttccgcagctaaagccaaagaacaagaaactagaatttctgaagaaattactaagaaacagaaacaagtaactcaagaagcaataagacaggaaactgagataactgctgcatccatggtggtagttgccactgcaaagtccacaaaactagaaacagtcccgggagctcaagaagaaactaccacacaacaagatcaaatgcacctaagttatgaaaagataatgaaggaaactaggaaaacagttgtacctaaagtcatagttgccacacccaaagtcaaagaacaagatttagtatcaagaggtagagaaggcattactaccaaaagagaacaagtgcaaataactcaggagaagatgagaaaggaagccgagaaaactgccttgtctacaatagcagttgctactgctaaagccaaagaacaagaaacaatactgagaactagagaaactatggctactagacaagaacaaatccaagttacccatggaaaggtggacgttggaaaaaaggctgaagctgtagcaacagttgttgctgcagtagaccaggcccgagtcagagagcccagagagcctgggcatcttgaagaatcctatgctcagcagaccactttggagtacggatataaggaacgcatttccgccgcaaaggtagctgagcctccccaacgtccagcctcagaaccccacgttgtccctaaagcagtcaagcctagagtaatccaggctccttctgagactcatatcaaaactactgatcaaaagggaatgcacatatcatcacagatcaagaaaactacagatctaacaacggaaagattagtccatgtggataaacgcccccgcacagctagccctcactttactgtttcaaaaatttctgttcctaagacagaacatggatatgaggcatcaatagccggtagtgctattgccacattacaaaaagagttgtcagccacatcttctgctcagaagatcaccaaatcggtgaaggctcctactgtgaagcccagtgagactagagtaagggcagagcccacacccttgccacagttccccttcgctgacacaccagatacttacaagagtgaagctggcgttgaggtgaaaaaggaagtaggggtgagcatcactggcaccaccgtccgtgaagagcgctttgaagtactgcacggacgcgaagccaaggtaacagaaacagcaagagtaccagcacctgttgaaattcctgttactccaccaactttggtctcgggcttaaaaaatgtgactgtcatagaaggtgaatctgtcaccttggagtgccacatctctggatacccatccccgacagtgacatggtacagggaagactaccaaatcgaaagttccattgacttccagataaccttccagagtggaattgctcgtcttatgattcgcgaagcatttgcggaagacagcgggcgatttacttgcagtgctgtaaatgaggctggaaccgtcagcacatcctgctatctggctgtgcaggtgtcagaagaatttgaaaaggaaaccacagccgtgactgagaaatttactacagaagagaaacgctttgttgagtcaagagatgtggttatgactgatactagcctcacagaggaacaagcagggcctggagaacctgccgcgccttactttattacaaaaccagtggtccagaaactggtggaaggtgggagcgtggtgtttggatgccaagttggcggcaacccaaagccccatgtatactggaaaaaatctggtgttcctctaaccactggatacagatacaaagtgagttacaacaaacaaaccggtgaatgcaagctggtgatttctatgacttttgctgatgatgctggagaatacactattgttgttcgcaataagcatggagaaacttctgcatctgcttccttgcttgaagaagctgattatgagttactgatgaagtcccagcaagaaatgctttatcagacacaagtgactgcatttgttcaagaacctaaagttggagaaacagcacctggatttgtatactctgagtatgaaaaagagtatgaaaaagaacaagccttaattaggaagaaaatggccaaagatactgtagtggtcagaacttatgtagaagatcaggaattccatatttcttcctttgaagagagacttattaaagaaattgaatatagaataataaagactacattagaagaacttcttgaagaagatggagaagaaaagatggcagttgacatttctgaatctgaagctgttgaatcaggatttgatttaagaatcaagaattatagaattcttgaggggatgggtgtcacttttcattgcaagatgtctggatatccattaccaaagattgcttggtacaaagatggcaagcgcatcaaacatggagaaagataccaaatggactttctacaagatggcagagctagtctgcgtatacctgttgttcttccagaagatgaaggaatctacactgcatttgccagcaatattaaaggaaatgcaatttgctcagggaaattgtatgtggagcctgctgcaccacttggagctccgacttacattcccacactagagccagtgagcagaatcagatctctctctccacgttcagtgagcaggtctcctatacgcatgtctcctgcacggatgtcacctgcaaggatgtctcctgcacggatgtcccctgcaagaatgtcccctggacgtaggctggaggagacagatgagtcacaacttgagagactatataaaccagtctttgtgttaaaacctgtttctttcaaatgtttagaagggcaaactgccagatttgacttaaaggttgttggtagacctatgccagagacgttctggtttcatgatggccagcaaattgtcaatgactatacccataaagtagtcattaaagaagatggtactcaatcactaattattgtccctgccacacccagtgattctggggaatggactgtggttgcccaaaacagggcaggcagatcttcaatttcagtgattttaactgtggaagctgtggaacatcaggtaaaaccgatgtttgtagaaaaactgaaaaatgtcaatataaaggaaggttcccgacttgaaatgaaagtcagagctacgggtaaccccaaccctgacattgtatggttgaaaaacagtgacatcattgtgcctcataaatatcccaaaatcagaattgaaggaaccaagggagaagctgcccttaaaatcgattccactgtcagccaagattctgcctggtatactgcgactgctattaataaagctggcagagacactacaagatgcaaagtaaatgttgaagttgagtttgcagagcctgagccagagagaaagttaatcatcccacgggggacatatagagcaaaggagattgcagccccagaactggagcccctccatttgcgatatggccaagagcaatgggaagaaggtgatctctatgacaaagagaaacaacagaaaccatttttcaagaaaaaactcacttccttaagacttaagcgctttgggcctgcccactttgaatgcaggctaacacccattggtgacccaacgatggtggtggagtggctccatgatggaaagccacttgaagcagccaacaggctccgtatgatcaatgaatttgggtactgcagccttgattatggcgttgcatattctagagacagtggtatcattacttgcagagccactaacaaatatggaacagatcacacatctgctacccttattgttaaagatgagaaaagtcttgtggaagaatcccaattgcctgaggggaggaaaggcttacagagaattgaagaattagagagaatggctcatgaaggtgcacttacaggtgtaacaacagatcagaaagaaaagcaaaagccagacattgtcttgtacccagagccagttagagtacttgaaggggagactgcaaggttccgctgcagggtaacaggctaccctcagcccaaagtcaactggtacctcaatggacagctcatccgcaaaagcaaaaggttcagagttcgctatgatggtatccattacctggacatcgtggactgcaaatcatatgacacaggtgaagtgaaggtcaccgcggaaaatcctgaaggtgtgatagagcataaagtgaagcttgagattcaacagagggaagattttaggtctgtccttaggagagctcctgaaccaaggcctgagtttcacgtacatgaaccaggaaagcttcagtttgaagtacaaaaagtggatagacctgttgacaccactgaaaccaaagaagttgtgaagttgaaaagggctgaaagaattacccatgaaaaagtgcctgaagagtcggaagagctgcgcagtaaattcaagcgcagaacagaagagggctattatgaagccattaccgctgtggagctcaagtctcgaaagaaggatgaatcctatgaggaactcctcaggaagacaaaagatgaacttctccactggaccaaagagttaactgaagaggaaaagaaagctcttgccgaagaaggcaaaatcacgattccaacttttaaacctgacaagattgaactaagtcctagtatggaggctccaaaaatcttcgaaagaatccagagccaaacagtgggccaaggatctgatgcacacttccgggtcagagtcgtggggaaaccagaccccgaatgtgaatggtacaaaaatggtgtcaaaattgaacggtctgaccggatctactggtactggcccgaagacaatgtttgtgaattggtcataagagatgtgactgctgaggactctgccagcatcatggtaaaagccatcaacatagctggagaaacctccagtcacgcattcttacttgtccaagccaagcaattgatcactttcacacaggaattacaagatgttgttgctaaggaaaaagacactatggcaacctttgaatgtgaaacttcagaaccatttgtcaaagtgaaatggtataaagatggtatggaggttcatgagggagataaatacaggatgcactctgacagaaaggttcacttcctctccatactgaccattgatacgtctgatgctgaagattacagctgtgtacttgtggaagatgaaaatgtcaaaacgactgctaaacttattgttgaaggtgcagttgttgagtttgtgaaagaacttcaggacatagaagttccagaatcatattcaggagaattagagtgcattgtatccccagaaaatatagaaggaaaatggtatcataatgatgtggagcttaaatccaatggcaaatatacaattacatctcgtcgtggacgtcagaacctcacggtcaaggatgtaaccaaggaggaccagggagaatacagctttgtcatcgacgggaaaaagacaacctgtaaattaaagatgaaaccccgccccattgctatcctacaaggacttagtgaccaaaaagtctgtgagggtgacattgttcagcttgaagttaaagtctccttggaaagtgtggaaggcgtctggatgaaagacggccaagaagtgcagcccagtgacagggttcacattgtgatagacaaacaatctcatatgctgctcattgaagacatgactaaggaagatgctggaaattactctttcaccattccagcccttggcctctccaccagtgggcgtgtctctgtctatagtgtggacgtgataacacctctaaaagatgttaatgtgattgaaggcaccaaggctgtgcttgaatgtaaggtgtcagtccctgatgtgacttctgttaagtggtacttaaatgatgaacaaatcaagcctgatgaccgtgtacaggccattgtgaaaggtactaaacagcgactagtcattaaccgaactcatgcttcagacgaaggaccttacaagctgatagttggcagagttgaaaccaactgtaatctctctgtagaaaaaattaaaattatcagaggtcttcgtgaccttacctgtacagaaactcaaaatgtggtgtttgaggttgagctgtcccactctggaattgatgtcctgtggaattttaaggacaaggaaatcaagcccagttctaaatataaaattgaagcacatggaaaaatatataaattgacagttctaaatatgatgaaagatgatgaaggaaaatacacattttacgcgggagaaaatatcacatctggaaaacttactgtggcaggtggggccatctccaagccactcacagatcagaccgtagctgaatcccaggaagctgtgtttgaatgtgaagttgccaacccagattccaaaggcgaatggttgagggatggcaaacacctaccactgactaacaacatcagaagtgagtctgatggccacaaaaggagacttatcattgctgccaccaaattagatgacattggagaatatacctacaaggtggccacctccaaaacatctgccaaactcaaagttgaagctgtcaaaattaagaagactctgaagaacctcacagtgacagaaacacaggatgctgttttcactgtcgagcttacacaccctaatgtcaaaggtgtccagtggatcaaaaatggagttgtgctggaatccaatgaaaagtatgctatctctgtcaaaggaacaatttactctctgaggattaaaaactgtgccatcgtggatgagtctgtttatggcttcaggcttggaaggcttggagccagtgccagactgcacgtggagactgtcaagatcattaaaaagccaaaggatgtgacagccttggaaaatgccactgttgcctttgaagttagtgtttcccatgacactgttccagtaaaatggttccataagagtgtggaaattaagccaagtgacaaacacagactggtctcagaaaggaaagtccacaagctgatgctgcagaacatctccccctcagatgctggggaatacacagctgtggtcgggcaattggaatgcaaagcaaaactgtttgtggagacattacatattacaaaaaccatgaaaaatatcgaggtgcctgagaccaaaactgcctcttttgagtgtgaggtgtcccacttcaatgtcccttccatgtggctgaagaatggtgtggaaattgagatgagtgaaaagttcaagatagttgtgcagggaaaactccatcagctgatcatcatgaacaccagcacagaggactcggcagaatacacatttgtctgtggcaatgaccaagtcagtgccaccctgacagtcaccccaatcatgattacttccatgctgaaagacatcaacgctgaagaaaaagacactattacttttgaggtgacagtgaactatgaaggcatctcttacaaatggttaaagaatggtgtggaaatcaaatcaactgacaagtgccagatgagaaccaaaaagctcacacactcactgaacatcaggaatgttcactttggggatgctgctgactacacctttgtggctggaaaagcaacatcaacagccacactttatgtggaagctcgtcatatagaatttaggaaacacattaaggacattaaggtactggagaagaagcgagccatgtttgaatgtgaagtttctgaacctgacatcactgtacagtggatgaaagatgaccaggaactgcagatcacagacagaataaagattcagaaggagaaatatgtccaccgccttctgatcccatccacccggatgtctgatgctgggaagtacacagtggtggcaggaggcaacgtgtcaactgcaaaactctttgtagaaggcagagatgttcgcatccgaagtattaaaaaggaggttcaggtcattgagaaacagcgtgctgttgttgaatttgaggtcaatgaagacgatgttgatgcccactggtataaagatggcattgaaatcaatttccaagttcaagaacgacacaaatatgtagtggaaagaagaatccaccgaatgtttatctctgagaccagacagagcgatgcaggagaatacacctttgtggcaggaaggaacaggagttctgtcactctctatgtcaatgctcctgaaccgccccaagttctgcaggagctccagcctgtcactgtgcagtctggcaagcctgcccgcttctgtgccgtgatatccggaagaccacagcccaaaatttcctggtacaaggaagagcagctgctttccactggcttcaagtgcaaatttcttcatgatgggcaagagtacacgcttttgctaattgaagccttcccagaggatgcggcagtctatacctgtgaagccaagaatgactatggtgttgccacaacatcagcttcactctcagtggaagttccagaagttgtgtctcctgatcaggaaatgcctgtttatccacctgccatcatcaccccgcttcaggacactgtcacttctgaagggcagccagcccgttttcaatgccgggtttctggaacagatctaaaagtgtcgtggtacagcaaagacaagaaaatcaagccatctcggttctttagaatgactcaatttgaagacacttatcaactggaaattgccgaagcttatccagaagatgaaggaacttacacgtttgttgctagtaatgctgtaggccaagtatcaagcacagccaacctgagtctggaagctcctgaatcaattttgcatgagaggattgaacaagagattgagatggaaatgaaagctgccccagtgatcaagaggaaaatcgaacccctggaagtagcactgggccacctagccaaattcacctgtgagatccaaagtgctcccaatgtccggttccagtggtttaaagctggccgagaaatttatgagagtgacaagtgttctattcgatcttcaaagtatatctccagccttgaaatcctgagaacccaggtggttgactgcggcgagtatacatgcaaagcttccaatgagtatggcagtgtcagctgtacagccacactaactgtgacagaggcatatccaccaacctttctctccagacctaagtcccttacaacttttgtgggtaaggcagccaagttcatctgcacagtgacagggactcctgtgatagaaaccatttggcagaaagatggtgctgcactctcaccttcacctaactggaggatttccgacgcagaaaacaaacacattttagaactctcaaaccttaccattcaagatagaggagtttattcttgtaaggcttctaacaagtttggagcagacatctgccaagcagagttgatcatcattgataagccacatttcattaaagaattagagcctgtgcagtccgctatcaataagaaggtccaccttgagtgccaagtagatgaagacagaaaagtcacagttacgtggagcaaagatgggcaaaaactccccccagggaaagattataagatctgttttgaagataaaatagcaacacttgagattcctttggccaaactgaaagattcaggaacctatgtctgtacagcttcaaatgaggctggaagcagctcctgctcagccacagtcactgtcagagagccaccatccttcgtgaagaaggtggatccctcttatttaatgctcccaggtgaatcagcacgcctccattgcaagctgaaaggctcacctgtgatccaggttacttggtttaaaaataacaaagaactcagtgaaagtaacacagtccgaatgtattttgtcaattctgaggctatacttgatattacggatgtaaaagttgaagacagtgggagttactcatgtgaagcagtgaatgacgtcggcagtgatagctgcagtactgaaatagttatcaaagaacctccttctttcatcaaaactcttgagcctgcagacatagtgagaggaacaaatgctctacttcagtgtgaagtctcaggcactggaccatttgaaattagctggttcaaagacaagaaacaaattcgaagtagtaaaaaatacagattgttttctcagaagtctcttgtgtgtctggagatcttttcgtttaatagtgcagatgttggtgaatatgaatgtgttgttgctaatgaagtcggcaagtgtggctgcatggcaacccacttactcaaagaacctccaacctttgtaaagaaagtagatgatttgattgcactaggaggacaaaccgttaccctgcaagctgctgtgagagggtcagagcccatttctgtcacatggatgaaaggtcaagaggtcatcagagaagacggaaaaatcaaaatgagcttttccaatggtgttgcagtcttgataatccctgatgttcagattagttttggaggcaaatacacgtgcctggctgaaaatgaagctggaagccaaacatctgttggggaattaatagttaaagaacctgccaaaatcattgagcgagcagaactgatccaggtgacagcaggagatcccgccacactggagtacacagtggcaggcacgccagaactgaagcccaaatggtacaaagatgggagacccttggtcgccagtaaaaaataccgaataagttttaaaaacaatgttgcccagctcaaattttattcagctgagctgcacgacagtggccaatacacatttgagatttccaatgaagtgggcagcagctcctgtgagactacattcactgtattagatcgagacattgctccattttttaccaaacccttgcgcaacgtggatagtgttgttaatggtacctgcagactggactgcaaaattgcaggctccctccccatgagggtgtcctggtttaaggatggcaaagaaatagctgcttctgacagatacaggatagcatttgtggaaggcacagcctctttggagatcatcagagtagacatgaatgatgcagggaatttcacttgtcgagccacaaattccgtgggaagcaaagacagcagtggagccctgattgtgcaagaaccacccagttttgtaactaaacccggctcaaaggatgttctgcctggctcagcagtctgcctgaagagcactttccaaggatctactcctctcacaatcagatggtttaagggcaacaaagagctggtttctggtggaagctgctatattaccaaagaagctttagagagttccctggaactctatttagtaaaaacctctgattcgggcacgtacacatgtaaagtcagcaatgtcgctggaggggtggaatgcagtgcaaacttgtttgtaaaagaacctgccacatttgttgaaaagttagagccatcacagctgttaaagaagggagatgccacccagctagcctgcaaagtaactggtacccctccaattaaaataacatggtttgcaaatgatagagaaattaaggagagcagcaaacacagaatgtcttttgtggagtctactgcagttctaagactgacagatgttggcatcgaagacagtggtgaatatatgtgtgaggcccaaaatgaggctggcagtgaccactgcagtagcattgtaatagtcaaagagtcaccttattttaccaaggaatttaagccaattgaagtcttaaaggagtacgatgtcatgttgctggctgaggtggcaggcactcctccctttgagatcacttggttcaaagataacacaatcctgcgaagtggtagaaagtataagactttcattcaggatcatctggttagcctgcagatcctcaagtttgtagctgcagatgctggcgaataccagtgtcgggtgaccaatgaggtgggcagcagcatctgcagtgccagggtgactttaagagaacccccatccttcataaagaagatcgagagtaccagctccctccggggaggcacagctgccttccaggccactctgaagggctccttgccaattacggtgacttggctaaaagacagcgatgaaatcactgaagacgataatataagaatgacctttgagaacaatgtggccagtttgtacctcagtggcattgaagtcaagcatgatgggaaatatgtctgtcaggccaaaaatgatgcaggaatacaaagatgttctgcattactctcagtaaaagaacctgcaacaatcaccgaggaagctgtgtctatagatgtcacccaaggagacccagccactttgcaggttaaattttcagggactaaggagattacagccaaatggtttaaagatggccaagaactgaccctgggctcaaaatataaaatcagtgtcactgatacagtctcaatactgaagattatttctacagaaaagaaagatagtggagaatatactttcgaggtccaaaatgatgttgggaggagcagctgcaaggctagaattaatgtattagatcttatcatacctccttcattcaccaaaaagctgaagaaaatggacagcattaaaggttctttcattgatttagaatgtatagtggctgggtcacatcccataagcatccagtggttcaaagatgaccaagaaatatcagctagtgaaaagtacaaattctcttttcatgacaatactgccttcttggaaatcagccagctggaaggtacagacagtgggacatacacttgttctgccacaaataaggcagggcacaaccaatgcagtgggcatctgacagtcaaagaacccccttactttgtggaaaagccacagtcacaagatgtcaatcccaacacaagggtacagttaaaggctcttgtgggtggcactgcacccatgacaataaagtggtttaaagataacaaagagttacactcaggagcagcccgctcagtttggaaggatgacacctctaccagtctagagctctttgcagccaaagctaccgattctggaacctacatttgccaactaagcaatgatgttggcacagcaaccagcaaagccactctctttgtaaaagaacctcctcaattcattaagaagcccagtccagtcttagtgctgaggaatggacagtcaacaacatttgaatgccaaataacaggcactcctaaaatccgagtgtcttggtatctagacgggaatgaaataacagccattcagaaacatggcatttccttcattgatggtttagccactttccagatttctggtgccagggtagaaaatagtgggacttatgtgtgtgaagctcgaaatgacgcaggcacggcgagctgcagcattgaactcaaagtgaaagaaccccccacctttatcagagagctgaagcctgtggaggtagtaaaatatagtgacgtggagctggagtgtgaagttacgggaacacctccgtttgaagtcacttggctgaagaataacagggaaattcgaagcagcaaaaaatacacattgaccgacagagtgtctgtgtttaacctccatataaccaagtgtgacccttcagacactggggaataccagtgcattgtatccaatgaaggcggcagctgctcatgcagtactagagttgccctgaaagaaccaccatcattcattaagaagatagaaaataccactactgttttgaaaagttctgccacctttcagagtaccgtggcaggttctcctcctatttctataacctggctaaaggatgatcagattcttgatgaagatgataatgtctatatttcatttgtggacagtgtggccacacttcaaatcagaagtgtggataatggacacagtgggagatatacctgtcaagccaagaatgagtcaggagttgagaggtgttatgctttccttttagtacaagaaccagctcaaatcgtagagaaagctaaatcagttgatgttacggagaaagatcccatgaccttggaatgtgttgtggctggaacaccagaactcaaagtgaaatggcttaaagacgggaaacaaatagttcccagtagatacttttcaatgagttttgaaaataacgtggccagttttagaattcagtcagtaatgaagcaggacagcggtcagtacactttcaaggtggaaaatgacttcggaagcagtagctgtgatgcctacttaagagtgctagatcaaaatattcctccatcattcaccaaaaaattaaccaaaatggataaagttctgggctcttctattcatatggagtgcaaggtgtctggttcacttcccattagtgctcagtggtttaaggatggaaaagaaatatctacaagtgcaaaatacagacttgtgtgccatgagagatctgtgtctctggaagttaataatctggaattagaagatactgcaaattacacatgcaaagtgtcaaatgtagcaggagatgatgcatgcagtggcatcttaactgtgaaagaaccaccaagcttcctagtgaaacctgggcgacagcaagccatacctgattctacagtggaatttaaggcaatactaaaaggaacaccaccatttaaaataaaatggtttaaggatgatgtggaacttgtctcaggtcctaaatgtttcattggcttggaagggtcgactagcttcttaaatctctactcagtggatgcttctaagactggacagtatacttgccatgttaccaatgatgttggtagcgactcttgtactacgatgttgcttgtgacagaaccaccaaagtttgtaaagaaattagaagcctccaaaattgtgaaagcaggtgactcttcacgacttgaatgcaagatagctggatccccagaaatcagagttgtgtggttccgaaatgaacatgaacttccagccagtgataagtacagaatgactttcattgactcagtggccgtcatacagatgaacaatctcagtactgaggacagtggagatttcatttgtgaggctcagaatcccgctggcagcacaagctgcagtaccaaggttatagtaaaagagccacctgtttttagcagcttccctcctatagtagaaacccttaaaaatgctgaagtcagtcttgaatgtgaactttcgggaacaccaccgtttgaggtggtatggtacaaagacaagcggcaactcagaagcagcaagaaatacaagattgcatccaaaaacttccacacaagtattcacattctcaatgtggacacttcagacatcggtgaataccactgcaaagcacagaatgaagtgggaagtgatacttgtgtttgtactgtaaaattgaaagaaccaccaagatttgtctccaaactgaacagcctcactgttgtagccggagagcctgctgaattacaagcatccatagaaggcgcccagcctatttttgtccagtggcttaaagagaaggaagaagtgattagagaaagtgaaaacatcaggattacatttgtggaaaatgttgcaactctacagtttgcaaaagcagagccagctaatgctggaaagtatatctgccaaatcaagaatgatggtggaatggaggagaacatggccacactgatggtcttagagcccgcagtcattgttgagaaggcaggaccgatgacggtgactgtaggagaaacgtgcactctggagtgtaaggtggctggcactccggaactctctgttgaatggtacaaggatggaaagctgttgaccagcagccaaaaacacaaatttagcttctacaacaaaatctcttccttaaggattctctcagttgaaaggcaagatgcaggcacatacactttccaggttcaaaataatgttgggaaaagcagctgcacagctgtggttgatgtttcagaccgagcagttcctccctctttcacacgaagactgaaaaatactggtggggtgttaggtgcttcttgcatcttggaatgcaaagtagctggatcatcacctatttcagttgcctggtttcatgagaaaaccaagattgtcagtggagcaaagtaccaaaccacattttcagataatgtctgcacattgcagttgaattctctggattcctcagatatgggcaattacacatgcgtggctgctaatgtcgctgggtctgatgaatgtcgtgcagtgctaactgtacaagaaccaccctcttttgtgaaagaacctgaacctttggaagtactaccaggcaaaaatgtaaccttcacaagcgttattagaggaacccctccattcaaagtcaactggttcagaggtgccagagaactagtgaaaggagaccggtgcaacatctattttgaagacactgtggcagaactggaattatttaatattgacatatctcagagtggggaatacacctgtgtggtttctaacaacgctggccaagcatcttgcactacccgtctctttgtgaaagaaccagctgcatttttgaagagattaagtgatcattctgtagaaccagggaagtccataattctggagagcacctacactggaacacttccaatttctgtcacttggaaaaaggatggttttaacataactacctctgaaaaatgtaacatagtcacaacagagaaaacttgtatcctggaaattctgaatagcacaaaaagagatgcagggcagtattcctgcgagattgaaaatgaggcaggaagggatgtttgtggagctctggtatctacattagaaccgccttattttgttacggaactggaacctctggaggcagcagttggagattcggtttctttacaatgccaagttgctgggacaccagaaattacagtgtcttggtacaaaggagataccaaattacggccaactcctgaatacaggacctactttacaaacaatgtggccacacttgtttttaataaagtgaacatcaatgacagtggagagtacacatgcaaagcagaaaatagtataggaactgcttcttctaagactgtgttcagaattcaagagcgccaactcccaccttcttttgcaagacaattaaaggacattgaacaaactgtggggttacctgttacactcacttgtcgattaaatggctctgcacccatccaagtgtgctggtatagagatggagtacttttaagagacgatgaaaatctacagacttcatttgtagataatgtggcaactttaaaaattttgcaaactgacttgagtcactctggccagtactcttgctcagcttccaacccacttggaacagcatcttctagtgctagactcacagcaagagaacccaagaaatctcccttctttgacatcaagcctgtatctatagatgttattgctggagaaagtgctgattttgagtgtcatgttactggtgctcaaccgatgcgaatcacttggtcaaaagataacaaggagatccgtcctggaggaaactatacaatcacatgtgtgggaaacactcctcatttgagaattcttaaagtaggcaaaggagactctggtcaatatacttgccaagcaaccaatgatgttggcaaagacatgtgctcagctcagctcagtgtaaaagaacctccaaagtttgttaagaaattagaagcttcaaaagttgcaaagcagggagaatccattcaactggaatgtaaaataagtggctccccagaaatcaaagtttcatggttccgaaatgacagcgaacttcatgaaagttggaaatacaacatgtcattcattaattctgtggcattgcttacgatcaatgaagctagtgctgaagacagcggggactacatttgtgaggctcataatggtgttggtgacgccagctgcagcacagcgttgacagtgaaagcacctcctgttttcacccagaagccttctccagtaggagctcttaaaggttctgatgtgattctccaatgtgaaatttcgggaactcccccatttgaagtagtatgggttaaagatcgaaagcaagttagaaacagcaagaaatttaaaatcacttcaaaacattttgatacaagtcttcatatccttaatcttgaagcctccgatgtcggggaatatcactgcaaagctactaatgaggtgggaagtgacacgtgttcttgctctgtcaagttcaaagaacctccacgattcgtgaaaaagctaagtgacacctcaacccttattggggatgctgttgagttacgggccatagtggagggcttccagccaatttctgttgtctggctgaaagatagaggtgaagtcatcagagagagtgaaaataccaggatttcattcattgataacattgcaaccctccagctggggagtccagaagcatctaattctggaaaatatatatgccaaatcaaaaacgatgctggaatgagagaatgctctgcagtcttgactgtactagaaccagcaagaatcatagagaagcccgaacccatgactgtcactactggaaatccttttgcattagagtgtgtagtgactggaacaccagaactctcagccaagtggttcaaagatggaagagaattgtctgcagacagcaaacatcacattacattcatcaataaagtggcttcccttaaaatcccctgtgccgaaatgagtgacaaaggattatatagctttgaagtgaaaaacagtgttggcaaaagtaactgcactgtatccgtccatgtttctgatcggattgtgcctccttccttcatccgcaagctgaaagacgtgaatgccatcctgggggcctcagttgttttggagtgccgagtctctggctcagccccgatttcagttggctggtttcaggatggaaatgagattgttagtgggcccaaatgtcagtccagcttttcggaaaacgtctgtactttgaatctgagcttgttggagccctccgacacaggcatatacacgtgtgtggctgccaatgtagctggttccgatgagtgctcagcagtcctgactgtgcaagaaccaccatcttttgaacaaacccctgattctgtggaagttttgcctggaatgagcctcacattcaccagtgtcatcagaggcacccctcctttcaaggtcaagtggtttaaaggcagcagggaactggtgcctggggagtcatgcaacatctctctggaagattttgtcacagaactggagttgtttgaggtgcagccattagaaagtggagactattcttgcctcgttacaaatgatgctggcagtgcttcctgtaccacacatctttttgtgaaagaaccagccacctttgtgaaaagattggctgatttcagtgttgagacaggaagccccatagttctcgaggccacatacactggcacacctccaatctcagtgagctggataaaggacgagtatcttatttcacaatctgagagatgcagtattactatgacagaaaaatctaccatactggaaattcttgagagcacaatagaggattatgcacagtacagctgcctgatagaaaatgaggctggtcaagatatctgtgaagctctggtgtctgtcttagaaccaccgtactttattgaacctctggaacatgtggaagcagtcattggagaacctgcaactttacagtgtaaagtggatggaactccagaaattagaatttcttggtataaagaacacacaaagctacgatcagctcctgcatataaaatgcaattcaaaaataacgttgcttccttagtaatcaacaaagtggatcacagtgatgtgggagagtattcatgcaaggcagacaacagtgtgggggcagtcgcttcttcagctgtgcttgttatcaaagagcgcaaacttccacctttctttgcaagaaaactgaaagacgttcatgagactctaggcttcccagttgcatttgaatgccgcatcaatggctcagaacctcttcaagtgtcttggtacaaggatggggttcttttgaaagatgatgctaatttgcagacatcttttgttcataatgtagcaactcttcagattttacaaactgaccagagccacatagggcagtataattgctctgcttctaatcctcttgggactgcttcatccagtgccaagctcattctctcagagcatgaagtgcctcctttctttgatctaaagcctgtatcagtagatcttgctcttggagaaagtggtacttttaaatgtcatgtaactgggactgcaccaatcaaaatcacttgggccaaagataaccgagagattcgccctggaggcaactacaagatgactttggtagaaaatactgccactctgacagttctcaaagtaggcaaaggcgatgccgggcagtacacctgctatgcaagcaacatcgctggaaaagactcttgttctgctcatctgggtgtacaagaaccacccaggttcattaagaagctagaaccttcaagaattgtgaaacaggatgaattcacaaggtatgaatgcaaaatcggtgggtctccagaaatcaaagttttatggtataaggacgagactgaaattcaagagagcagtaaattcagaatgtcattcgttgactcggtggctgtgctggaaatgcacaatctcagtgttgaagacagtggagactacacctgtgaggcccacaatgcagcaggcagtgccagcagcagcacatccttaaaagttaaagaaccacccattttccgcaaaaagcctcatcctatagagacactgaaaggagctgatgttcaccttgaatgtgagcttcagggcactcccccatttcacgtttcttggtataaagacaagagagaacttaggagcggcaagaagtacaagataatgtctgagaacttcctaaccagtatccacatcctgaatgtcgatgctgcagacattggggaatatcagtgtaaagccacaaatgatgtgggaagcgacacttgcgttggttccatcgctctcaaagcaccaccaagatttgtgaagaagctcagtgacatatctactgtcgttggtaaagaagttcagctgcagactaccattgaaggcgctgaacccatttcagtggtgtggttcaaagataagggagaaatcgttagagaaagtgacaacatatggatttcttattcagaaaacattgcaaccttacagttttcaagagtggaaccagccaatgctggaaaatacacttgtcagatcaaaaacgatgctgggatgcaagagtgcttcgccacgctatccgttctcgagcctgcaacaattgtagaaaagccagaatccataaaagttaccacgggagacacctgtaccttggagtgtacagtagctggcacccctgaactcagtactaagtggtttaaggatggaaaagagctaacaagtgacaacaaatacaaaataagcttcttcaacaaagtatccggccttaagatcatcaatgtagcaccgagtgacagtggggtatacagttttgaggtgcagaaccctgttggcaaagacagctgcacagcttcattgcaggtttcagaccgaaccgttcctccttcattcacaagaaaattgaaagagacaaatggtctatccggctcctcagttgtaatggagtgtaaagtctatgggtcacctccaatctctgtctcctggttccatgaaggaaatgagatcagtagtggaaggaaataccagaccaccctgacagataatacttgtgctttaactgtgaacatgctggaagaatcagacagtggtgactacacatgtatagctactaatatggctggttctgatgaatgtagtgctcctttgactgtgagagaaccaccatcttttgttcagaaacctgatcccatggatgttttaactgggaccaatgtaactttcacaagtatcgtaaaaggaacacctcctttcagtgttagctggttcaaaggtagcagtgaactagtaccaggtgacagatgcaacgtgtctttggaggattcagttgctgaactggagttgttcgatgtagatacatcacaaagtggagaatatacttgcatagttagcaatgaagctggcaaggcttcttgtacaacacatctctacataaaagccccagccaaatttgtgaagaggctgaatgattacagcatagagaaaggaaaacccctgatcctagagggtacattcactggaactcctcccatttcggttacctggaagaaaaatggcataaatgtaactccttctcagaggtgtaatataactacgactgaaaaatcggcaatcctggaaattccaagtagcacagtagaggatgcaggacaatacaactgctacattgaaaatgcctctggaaaagattcctgttcagcacaaatactcatactagaaccaccgtattttgtcaagcagttggagccggttaaggtgtctgttggagattctgcctctctacaatgccagcttgctggaacccctgaaattggggtatcctggtataaaggagatacaaaattgagacccactacgacttacaaaatgcattttaggaataatgttgctacactggttttcaaccaggttgatattaatgatagtggagaatatatctgcaaagctgaaaacagcgtgggagaagtttctgcatcaactttccttaccgttcaagagcaaaaacttccaccatcattttctcgacaattgagagatgttcaagaaacagttggactgccagttgtttttgattgtgccataagtggatcagaacctatctccgtgtcttggtataaagacggcaagccattgaaagacagcccaaatgtacaaacatcatttttagacaatacagccacactcaatatttttaaaactgaccggagccttgcaggccagtattcctgcacagctacaaaccctataggctctgcttcttccagtgccaggctcattctcacagaggggaagaacccacccttctttgacatccgtcttgcccctgtggatgctgtggtgggagaaagtgctgactttgagtgccacgtcacgggcacacaaccgataaaggtcagctgggccaaagacagcagagaaatacgaagtggcggaaagtaccagattagttatctggaaaacagcgcccacctgacagtcctcaaagtagacaaaggagattctggacaatatacctgctatgctgtgaatgaagtgggaaaagactcttgcacagctcagctgaatataaaagagcggctcatcccaccaagtttcactaaaagactctcagagacagtagaagaaacagaagggaattctttcaaacttgagggacgtgtggctggttcccaacctataactgttgcctggtacaaaaataatatagagatacaaccaacttctaactgtgaaataacattcaagaacaacacgttagtgctgcaagtcagaaaagcaggcatgaacgacgctggtttgtacacatgcaaagtgtccaatgatgcaggctctgctctgtgcacgtcttcaatcgtcatcaaagaacctaagaagccacctgtatttgatcagcaccttactccagtaacagtgagtgaaggagaatacgtgcagctcagctgccatgtccagggatctgagccaattaggatccagtggttgaaggctggcagggaaataaagccttcagacagatgcagcttcagctttgctagtgggacagctgtactggaactcagagatgtggctaaagcagattcgggagattatgtgtgtaaagcttcaaatgtggctggaagtgacactaccaaatcaaaagtgaccattaaagacaaaccagctgtggccccagcaaccaagaaagctgcggtagatggaagactcttttttgtgtcagaacctcagagtatcagagtcgtagaaaaaaccactgcgaccttcattgcaaaagttggaggtgacccaatcccaaatgttaaatggacaaaagggaagtggagacagctgaaccaaggaggtcgtgttttcatccaccaaaaaggcgatgaagcaaaactggagattagggacaccacaaaaactgattctgggttataccgatgcgtggcatttaacgaacatggtgaaattgaaagtaatgttaacttacaggtggatgaaaggaagaaacaagagaaaattgaaggcgatcttagagcaatgctgaaaaagactccaatcttaaagaaaggagctggagaagaagaggaaattgatatcatggaacttctcaaaaatgttgatcctaaagaatatgaaaaatatgcccgcatgtatggaatcactgacttccgaggtcttcttcaagcatttgaactgctcaagcaaagccaagaagaagagacacatagactggaaattgaggaaatagagaggtcagagagggacgaaaaggaatttgaggaacttgtatcatttattcagcaaagactgtcacagacagagcctgtcactctgatcaaggacattgaaaatcagacagttttgaaagataatgatgctgtctttgaaattgacattaaaattaattatccagaaatcaagctttcgtggtacaaaggaactgaaaaactggaacccagtgataaatttgaaataagcattgatggtgaccgacatacactcagagtcaaaaactgtcaacttaaagaccagggcaattatcgattggtttgtggtccacacatcgctagcgctaaactaactgtaattgagcctgcatgggaacggcatcttcaggatgtgactctgaaagaaggccagacttgcaccatgacatgccaattttctgtaccaaatgtaaaatctgaatggttcagaaatggcagaatccttaaaccccaaggtagacataaaacagaagtggaacacaaagtccataaattgaccattgcagatgttcgagcagaagaccagggtcagtacacctgcaaatatgaagaccttgaaacttcagcagaactcagaatcgaagctgaaccaattcagtttacaaagcgcatacagaacatcgtggtgagtgagcatcagtctgccacctttgagtgtgaagtgtcctttgatgatgccattgtaacatggtacaaaggaccaacagaactgacagagagccagaaatacaacttcaggaatgatggccgctgccattatatgaccatccacaatgtgaccccagacgatgaaggtgtctactcggtcatcgctcggctggagccaagaggtgaagcaagaagcacggcagagctgtacctaacgacgaaagaaatcaaacttgagctgaagcctcctgatattcctgactccagagttccaatcccaaccatgcctatcagagcagtgccaccagaagaaatccctcctgtggttgctcctcctatcccccttttgctaccaacacccgaagaaaagaaaccaccaccaaaacgtattgaagttaccaaaaaggctgtgaagaaagatgccaaaaaagttgttgcaaagcccaaagagatgacaccacgtgaagagattgtcaagaagcctccacctcctactaccttaattccagcaaaagctcctgaaatcattgatgtatcctctaaagctgaagaagtaaaaataatgactataaccagaaagaaagaggttcagaaagaaaaagaagctgtgtatgagaaaaagcaagcagtccacaaggagaagagagtcttcattgaatctttcgaagaaccttatgacgaactggaggtagaaccatacacagagccatttgaacaaccttattatgaagaaccagatgaagactatgaagagattaaggtagaagctaaaaaagaagttcacgaggaatgggaagaagattttgaagaagggcaagaatactatgaaagggaagaaggctatgacgaaggggaggaagagtgggaagaggcttaccaagaaagggaagtaattcaagttcaaaaggaggtctatgaagaatcacatgagagaaaagttccagccaaagtacctgaaaagaaagcaccaccacctcctaaagttataaagaagccagtaattgaaaaaattgaaaagacttctcgaagaatggaggaagaaaaagttcaagtcaccaaagtacctgaagtttcaaagaagattgttccacaaaaaccttcccggactccagtacaggaagaagttattgaagtgaaagtaccagctgtgcatacaaagaagatggttatttcagaagaaaagatgttctttgcttctcacacagaggaggaggtgtcagtcacagtccccgaggtacaaaaggaaattgttactgaagagaaaattcacgttgccgtttccaaaagggttgaaccaccacctaaagtccctgagctacctgagaaaccagctccagaagaagtggcccctgttcctatccctaaaaaagtggagcccccagcaccaaaagttcctgaggttcccaagaaacccgtgccagaggagaaaaagccagttcctgtgcctaagaaggaacctgctgctcccccaaaagtcccagaggtgccaaagaaacctgtccctgaagaaaagattcccgttcctgttgcaaagaaaaaggaagctcccccagctaaagttcctgaagtacagaagagagttgtgacagaagaaaaaataaccattgtaactcaaagagaggaatctccaccaccagcagtgccagaaataccaaagaagaaagttcctgaagaaaggaaacctgttcctcggaaggaggaagaagttccaccaccaccaaaagtgccagctctgcctaagaaacccgtcccagaggagaaagttgcagtgccagttcctgtcgctaagaaagctcctcctccccgagctgaagtctctaagaaaactgttgtagaagaaaagagatttgttgctgaagaaaaactatccttcgcagttcctcaaagagtggaagtcacgcggcacgaagtatctgcagaggaggaatggagttactcagaagaggaggaaggtgtgtccatttcagtttatagagaagaagaaagagaggaggaggaagaagcagaggttacagaatatgaagtgatggaagagcctgaggaatatgttgtggaagaaaagctgcacattatttctaagagagtggaagctgagccagctgaagtgacagagaggcaggagaagaaaattgtactgaaaccaaaaattcctgctaaaatagaggagcctccaccggctaaagttcctgaagcacctaagaaaattgtgccagaaaagaaagttcctgctccagttcctaaaaaggaaaaggtgcccccacctaaagtgccagaagagccaaagaaaccagttccagaaaaaaaggttcctccaaaagtcattaagatggaagaacctctcccagccaaagtgactgagaggcacatgcaaattacccaggaagaaaaagttcttgttgctgtaactaaaaaagaggcgcctccaaaagcaagagtgccagaggaaccgaagagagctgtcccagaagaaaaagttctgaaactcaaacctaaaagagaggaggaaccaccagctaaagtgactgaattcagaaaaagagtggttaaagaagaaaaagtatcaattgaagctccaaaaagagaacctcaacccatcaaagaagtaactataatggaagagaaagaaagggcttataccctagaagaagaagctgtttcagtacaacgggaagaagaatatgaggaatatgaagaatatgattataaagaatttgaggagtatgaaccaacagaagaatatgaccaatatgaagaatacgaggagcgggagtatgaacgatatgaagagcatgaagaatacatcacagaaccagagaagcctatccctgtaaagcctgtcccagaagaaccagttcccacaaaaccaaaggccccaccggctaaagtgctgaagaaagctgtccctgaagaaaaagtaccagtgcccattcctaagaaactcaaacctccaccacccaaagtgcctgaagaaccaaagaaagtttttgaggaaaaaatacgtatttcaattaccaaacgtgaaaaagagcaggtgactgaacccgctgctaaagtgcccatgaagcccaagagggttgtcgcagaagaaaaagtacctgtccctagaaaagaagtagcaccacctgttagagtgccagaagtgcctaaagaacttgaaccagaagaggttgcctttgaagaggaagttgtaacccatgtagaagaatatcttgtagaagaagaagaagagtacattcatgaagaagaggagttcataactgaggaagaagtggtgccagtgataccagtcaaagtgcctgaggtacccaggaaacctgttccagaagagaagaaacctgttcctgttcccaagaagaaggaagctccaccggcaaaagtgcctgaggttcctaagaagccagaggagaaagttcctgtgcttattcctaaaaaggagaagcctccgccagcaaaagttcctgaagtgcccaagaaacctgtgccagaggagaaagtaccagtaccagttcctaaaaaggtggaagctccacctgccaaagtgccagaggtacccaagaagcctgtgcctgagaagaaggtgccagttcctgctcctaagaaagtggaggctccacctgcaaaagtgccagaggtgcccaagaagctcatcccagaagaaaagaaaccaacacctgttccgaaaaaagtggaagcaccaccacccaaagtgccaaagaaacgtgaaccagttccagttcctgtagctctacctcaggaagaggaagttctatttgaagaagaaattgttcctgaagaggaagttctacctgaggaagaggaagttctacctgaggaagaggaagttctacctgaagaagaggaagttctacctgaagaagaggaaattccacctgaggaagaggaagttcctcccgaagaagaatatgtacctgaggaagaagaatttgtacctgaagaagaagtccttccagaagttaaacctaaggtgccagtacctgcaccagtgcctgaaattaagaagaaagtgacagagaagaaagtggtcattcccaagaaagaggaggctccccctgccaaagttcctgaggtgcctaagaaggtggaagaaaaacgaatcattctccctaaagaagaggaagttctaccagttgaagtgactgaggagcctgaagaagagcctatttcagaagaagaaatcccagaagaaccacctagcatagaggaagttgaagaggtggcaccacctagagtgcctgaagtgattaagaaagcagtacctgaagcacctactcctgttcctaaaaaagtggaggcaccaccagctaaagtgtcaaagaaaattcctgaggaaaaagtacctgttcctgttcagaaaaaagaggcacccccagccaaagtgcctgaagtaccaaagaaagtcccagaaaagaaagtccttgtgcctaaaaaggaagctgttcccccagctaaagggagaactgtccttgaagaaaaagtatcagttgccttccgccaagaagtagtagtaaaagaaagactagaattagaagtagtagaagcagaagtggaagaaattccggaagaagaagagttccatgaagttgaagaatattttgaagaaggcgagtttcatgaagtagaagaattcatcaaattagaacaacatagagttgaagaagaacacagagttgaaaaagttcatagggtaatagaagtttttgaggctgaagaagtggaagtatttgaaaaaccaaaagctccacctaaagggcctgagatatctgagaaaatcatccctccaaaaaaaccgcccactaaagttgttcctcgaaaagagccaccagctaaagtaccggaggtgcctaagaaaattgtggtagaagaaaaagtacgtgttcctgaagagcccagagttccaccaactaaagtgcctgatgtgctgccaccgaaggaagtggtcccagaaaagaaagtaccggtgcctcctgccaaaaagccagaagctccacctcctaaagtgcctgaggctcccaaagaagttgttcctgaaaagaaagtgccagtgcctcctcctaaaaagcctgaagtgccacccacaaaagtcccagaggtgccaaaggcagctgtcccagaaaagaaggtgcctgaagctattcctcccaaaccggaaagtcctccccctgaagtgccagaggctccgaaagaagttgttcctgaaaagaaagtgccagcggctcctcctaaaaagcctgaagtcacacctgttaaagtgcctgaggctcccaaagaagttgttcctgaaaagaaagtgccagtgcctcctcctaaaaagcctgaagtgccacccacaaaagtcccagaggtgccaaaggtagctgtcccagaaaagaaggtgcctgaagctattcctcccaaaccggaaagtcctccccctgaagtgttcgaggagcctgaggaagttgccctagaagagcctcctgctgaagttgtggaagagccagagccagcggcgcctccacaagtgaccgtaccacctaagaaacctgtcccagaaaagaaagcacctgctgtcgttgccaaaaaacctgaactaccaccagtgaaagtgcccgaggtgcccaaggaggttgttcctgaaaagaaggtgcctctggtggttcccaaaaagccagaagccccacctgctaaagtgcctgaagttccaaaagaagttgttccagaaaagaaagtagctgttcccaaaaagccagaagtcccaccagcaaaagtgccagaagtgccaaagaaacctgtcttggaagagaaaccagctgttcctgttccagaaagagcggagtctcctcccccagaagtatatgaagaacctgaggaaattgctcctgaagaggaaattgctcctgaagaggaaaagccagttcctgttgcagaagaggaggaaccagaggttccacctccagcagtgcctgaagagcccaagaagatcatcccagagaagaaagttcctgtcatcaaaaaaccagaagcaccgcctcctaaagaacctgaacctgaaaaggttattgagaagccaaaactcaaaccaagacccccacctcctccacctgctccacctaaggaagatgtgaaggagaaaatattccaacttaaagctattccaaagaagaaagttcctgaaaaacctcaggttccagaaaaagtggagcttacacctctgaaagtgcctggaggtgaaaagaaagttcgcaaattacttccggaacgtaaacctgaaccaaaggaagaagttgttctgaaaagcgttctaagaaaaagacctgaagaagaagaacctaaagtagaacctaaaaaactagaaaaagttaaaaaacctgcagtaccagaaccaccacctccaaaacctgttgaagaggttgaagtacctactgttacaaaaagggaaaggaagattcctgaaccaacaaaagtgcctgaaatcaagccagcaatacctctccctgcacctgaaccgaaaccaaagcccgaagcagaagtgaaaacaatcaaaccacctcctgtggaacctgaaccaacccccatcgctgccccagtaacagtgccagtggttggaaagaaagcagaagccaaagcacctaaggaagaggctgccaagccaaaaggtcctatcaaaggtgtacccaaaaagactccttcaccaatagaagccgaaaggagaaagttaaggccaggaagtggtggagagaaacctcctgatgaagccccgttcacctaccagctaaaggctgtgccactgaagtttgtgaaagaaatcaaagacatcatcttgacagaatcagagttcgttggctcttcagcaatctttgaatgtttggtctccccttccactgcaattacaacctggatgaaagacggtagcaatatccgtgagagtcccaagcacaggtttattgcagatggtaaagacagaaagctgcacatcattgatgttcaactttccgatgctggtgaatacacctgtgttttacgtttgggaaacaaagaaaagacctccacggctaaacttgttgtagaagaacttcctgtgcgttttgtaaaaacactggaagaggaagtcacagtggtcaaaggacagccattgtacttgagctgcgagttaaacaaagagcgtgacgtggtctggaggaaggatggcaagattgtggtggagaaacctggccgaattgtgccaggcgtcattggcttgatgcgggctctgaccatcaacgatgcagatgacacagatgctggaacatacacagttactgtggaaaacgccaacaacctggagtgttcatcttgcgtaaaagtagtagaagtcattagagattggctggtgaaacctatacgagaccagcatgtgaaacccaaggggacagctatttttgcctgtgatatagcaaaagatactccaaacattaagtggttcaaaggatatgatgaaatccctgcggaaccaaatgataagactgaaatactgagagatggaaatcatctgtacctcaaaattaagaatgctatgccagaagatattgctgagtatgcagtggaaattgaaggaaaaagataccctgcaaagctgacacttggagagcgtgaagttgaactgcttaaaccaatagaggacgttaccatttatgagaaagaaagtgcaagctttgatgcagaaatctcagaggcagacattcctggacaatggaaactgaaaggagaacttctaaggccctcacctacttgtgaaatcaaagcagaaggtggaaaacgcttcttaactttgcacaaagtcaaactggaccaagctggtgaagtcctctaccaggcccttaatgcaattacaactgccattttgacagtaaaagaaatcgaacttgactttgctgtgcccctgaaggatgtcactgttccagaaaggcgacaggctcgattcgaatgtgtcctcacccgagaggcaaatgttatatggtccaaaggacctgatataattaagtcatctgacaaatttgatatcatcgctgatggaaagaaacatattcttgttattaatgattctcaatttgatgatgaaggggtctatactgctgaggtggagggcaagaagacctcagctcggttgtttgtcacaggtataagactgaaattcatgtcacctcttgaagatcaaacagtaaaagaaggtgaaacagcaacttttgtttgtgaactttctcatgaaaaaatgcatgtagtctggttcaaaaatgatgccaaactccatacaagcagaacagtactcatctcttctgagggcaagactcacaaattggaaatgaaagaagtgacattggatgatatatctcagataaaagctcaagtcaaggagctgagctccacagcacagctgaaggtcttagaggccgatccctacttcactgtgaaattacatgacaaaactgcagtggagaaggatgagattactttgaagtgtgaagtgagcaaagatgtaccagtgaaatggttcaaagatggtgaagagattgtcccttcacccaaatattctatcaaggcagatggcctgcgccgcatcttaaaaatcaaaaaggcggaccttaaagataaaggcgaatatgtgtgtgactgtggcacagacaagaccaaggcaaatgttactgttgaggctcgactaataaaagtggaaaagcctctgtacggagtagaggtgtttgttggtgaaacagcccactttgaaattgaactttctgaacctgatgttcacggccagtggaagctgaaaggacagcctttgacagcttcccctgactgtgaaatcattgaggatggaaagaagcatattctgatccttcataactgtcagctgggtatgacaggagaggtttccttccaggctgctaatgccaaatctgcagccaatctgaaagtgaaagaattgcctcttatcttcatcacacctctcagtgatgttaaagtcttcgagaaagatgaggctaagtttgagtgtgaagtatccagggagcccaaaacattccgttggctaaaaggaacccaggaaatcacaggtgatgacagatttgagcttataaaggatggcactaagcattcaatggtgatcaagtcagctgcttttgaagatgaagcaaaatacatgtttgaagctgaagataagcacacaagtggcaaactgatcattgaaggaatccggctcaaattcctcacccctctcaaagatgtaactgccaaagagaaggaaagtgctgtatttactgtggagttatctcatgataacatccgagttaaatggttcaagaatgaccagcgcctacacaccaccaggtcggtctcaatgcaagacgaagggaaaactcattcgatcacattcaaagacctgtctattgatgacacctcccaaattagagtagaagctatggggatgagttcagaagctaaactcactgtgcttgagggagacccatattttacaggaaaacttcaagattatactggtgtagagaaagatgaagttattctacagtgtgaaattagcaaagcagatgcaccagtgaaatggtttaaggatgggaaggaaataaagccatccaaaaatgctgttattaaggcagatggcaagaaacgcatgctaatcctaaagaaagccttgaaatcagatattggacagtacacctgtgactgtgggacagataagacctcaggaaaacttgacattgaggatcgggaaattaaactggtgcgacccctgcacagtgtggaggtgatggagactgagacagcacgctttgaaaccgaaatctctgaagatgatatccacgccaactggaaactcaagggagaggccctactccaaacacctgattgtgaaattaaggaagaaggcaaaatacactcccttgttttgcacaactgtcgcctggaccagacgggtggggtggatttccaagctgccaatgttaaatctagtgcccacctccgagttaagccacgagtaattggtcttctgaggcctttaaaggatgtcaccgtgactgcaggggaaacagccaccttcgactgcgagctctcctacgaagatatcccagtggaatggtatctcaaagggaagaaactagagcccagcgataaggtggtcccacgttcagaaggaaaagttcatacacttactctgagggatgtaaagttagaagatgctggggaagtccaactaacagcaaaagatttcaaaactcacgccaacctctttgtgaaagaacccccagttgaattcactaagcctcttgaggaccagacggtcgaagagggagccactgcagtgctggagtgtgaagtctccagagaaaatgctaaggtgaaatggttcaaaaatgggacagaaatcctcaaaagcaagaagtatgaaattgttgctgatggcagggtcagaaaacttgttatacatgactgtaccccagaggatattaaaacatacacttgtgatgctaaggattttaagacttcctgtaacctgaatgtcgtgcctcctcatgtggaattcttaagaccactcaccgaccttcaagttagagaaaaagaaatggctcgatttgagtgtgaactttcccgagaaaatgctaaggttaagtggtttaaagatggtgctgaaattaaaaagggcaaaaaatatgacatcatatccaagggagcagtgcgcattcttgtcatcaacaaatgtctactggatgatgaagctgaatattcctgtgaagtaaggacagcgagaacttctggcatgctgacagttctggaagaagaagctgtctttaccaaaaatcttgccaacattgaagttagtgaaacagacactataaaactggtttgtgaagtctccaaacctggcgcagaagtgatttggtataaaggggatgaggagatcattgaaacaggaagatatgaaatactgactgaaggacggaagagaatcctggtcattcagaacgctcaccttgaggatgctggcaactacaactgtcgactcccaagctctcgaaccgatggcaaagtcaaagtacatgaactggctgctgaatttatctcaaagcctcaaaaccttgaaatacttgaaggagaaaaggctgaatttgtctgctctatatcaaaagaaagctttccagtccagtggaagagggatgataagacacttgaatctggagataaatatgacgttattgctgatggtaaaaagagggtcctagttgtgaaagatgccacattacaagatatgggcacttacgttgtcatggtaggggccgccagagcagcagctcacttgacagtcattgaaaaactcaggatcgtagttcctcttaaggacacccgggtgaaggaacaacaggaagttgtcttcaactgtgaagtcaatactgaaggtgccaaagccaaatggttcagaaatgaagaagctatatttgatagttcaaaatacatcattctccaaaaagacctagtctacaccctcagaattagagatgcacacttagatgaccaagccaactataatgtgtctttgaccaatcacagaggtgaaaatgttaaaagtgcagccaatctaatagtagaagaggaagaccttaggattgttgagcctcttaaagatattgaaacaatggagaagaaatctgtcacattctggtgcaaggtgaatcgtctcaatgtaacactgaagtggaccaaaaatggtgaagaagtgccttttgacaaccgtgtctcatacagagttgataagtacaagcacatgttaaccattaaagactgtggcttcccagatgaaggtgaatacattgtcactgctggacaagataaatctgttgctgagcttctcatcatagaagccccgacagaatttgtggaacacttggaagatcagacagtcactgagttcgatgacgctgtcttctcctgccagctctccagagagaaagccaatgtaaaatggtacagaaatgggagagaaatcaaagaaggcaaaaaatacaaatttgaaaaagatggaagtatacacagactcattataaaagattgcaggctggatgatgagtgtgaatatgcttgcggggtagaagacaggaagtctcgtgctagactttttgtggaagaaattcctgttgagatcatcaggcctccacaagatattcttgaagcccctggtgctgatgttgtctttttagcagaactcaataaagataaggtggaagtccaatggctaagaaataacatggttgttgtccagggtgataaacaccagatgatgagtgaaggaaagatacatcgactacagatttgtgatattaagccccgtgaccagggtgaatacagatttattgccaaagacaaagaagccagagctaagcttgaactggcagctgcaccaaaaatcaagacagctgaccaagaccttgtggttgatgttggcaagcctctgacaatggtggtgccatatgatgcctaccccaaagcagaagctgaatggtttaaagaaaatgaacctttatctacaaaaaccattgatactacggctgaacaaacttctttcagaattttagaagccaagaaaggagacaaagggaggtataaaattgtgcttcagaacaaacatggaaaagcagaaggattcatcaatttaaaagttattgatgttcctgggccagtacgtaacttagaagtgacagaaacatttgatggtgaagtgagccttgcttgggaagaacctttaactgatggtggaagcaaaatcataggttacgttgttgaaagacgtgacattaagagaaagacctgggttctggccacagaccgtgcagagagttgtgagtttactgtcactggtctacagaaaggaggagttgagtacctattccgtgtgagtgcaagaaacagagttggcactggtgagccagtagaaactgacaatcctgtagaagcaaggagtaaatatgatgttccaggccctcctttgaatgtaaccatcactgatgtgaatcgatttggtgtctcactgacatgggaaccaccagagtatgatggaggtgctgagatcacaaactacgtcattgaattaagagacaagacttctatcaggtgggatactgccatgactgtgagagctgaagacctgtctgcaactgttactgatgtggtagaaggacaggagtacagtttccgagtgagagcccaaaatcgaattggagttggaaaaccaagtgcagccacacccttcgtcaaagttgctgatccaattgagagaccaagtcctcctgtaaacctaacttcctcagatcagactcagtcatcagttcagctcaaatgggaacctcctctgaaagatggaggaagcccaatattaggctatataattgagcgatgcgaagaaggaaaagataattggattcgttgcaatatgaaacttgtccctgaactgacttacaaggttaccggattggaaaaaggaaataaatatttatatagagtatctgcagaaaataaagctggtgtttcagatccatctgaaattcttggtcctctcaccgctgacgatgcatttgttgaaccaacaatggatttaagtgcatttaaagatggtctggaagttattgtcccaaatcctatcacgatcctggttccaagtacaggctatccaaggccaactgcaacctggtgttttggagataaagtactagaaacaggggaccgggtgaaaatgaagaccttgtctgcctatgccgaacttgtcatttctccaagtgaacgttcagacaagggcatttatacactgaaattagaaaaccgtgtgaaaacaatttctggggaaattgatgtcaatgtaattgctcgcccaagtgcacccaaagaattgaaatttggtgatataaccaaggactcagtacatttgacttgggaaccacctgatgatgatggaggaagtccgttaactggatacgttgttgaaaaacgagaagtcagccggaaaacatggactaaagttatggactttgtgactgatctagaattcacagttcctgatcttgttcaaggaaaagagtacttatttaaagtttgtgctcgtaacaaatgtggccctggagaacctgcatatgttgatgaacctgtaaatatgtcaactcctgcaacggtacctgacccaccagagaatgttaaatggagagatcgaacagccaatagcatcttcttaacatgggatccacctaaaaatgatggtggttcacgcatcaaaggatatatagttgaaagatgtccacgtggttctgataaatgggttgcctgtggagaacctgttgcagaaacaaaaatggaagtgacaggtcttgaggaaggcaaatggtatgcctaccgcgtgaaggccttaaacaggcagggtgctagcaaaccaagcagacccacagaggaaatccaggctgtggacacacaagaggccccagaaatcttcctcgatgtgaagctccttgctggtctcactgtaaaagctgggaccaagattgaacttcctgccaccgtaaccggaaaacctgaacctaaaataacttggacaaaggctgatatgattctgaagcaggacaaaagaattaccattgaaaatgtccctaagaaatccacagtgactattgttgatagtaagagaagtgacactggcacatatatcattgaggctgtgaatgtgtgtggccgggccactgctgtggtggaagtgaacgtcttagataaacccggaccaccagctgcctttgacatcacagatgtaaccaatgagtcatgtcttctaacatggaacccaccacgcgatgatggtggatctaagatcacaaactatgttgtggagagacgagcaactgatagtgaagtgtggcacaagctctcatccaccgtcaaggatacaaacttcaaggccaccaaattaatccccaataaagagtacatcttcagagttgctgcagaaaacatgtatggtgttggtgaaccagttcaggcctctccaataacagccaaatatcagtttgatccacctggtcctccaactcgcctagaaccttctgatatcactaaagacgcagtgactctcacatggtgtgagccagatgatgatggtggcagcccaatcacaggatactgggttgaaagactggatcctgatacagataaatgggttagatgcaataagatgccagtaaaggacacaacatacagagtgaaaggtctcactaataagaaaaaatacagattccgtgtgttggctgaaaatcttgctggacctggaaaaccaagcaaatcaactgaaccaatcttaataaaggatcccatagatcctccatggccccctggaaaaccaactgtaaaagatgtaggcaaaacatcagtaaggttgaattggacaaaaccagaacatgatggaggtgcaaagattgagtcttatgtcattgaaatgctgaagactggaacagatgagtgggtcagagtggcggaaggggttcccaccactcagcacttgctcccagggctcatggaaggacaggaatactcattccgagttagagctgtgaataaggctggggaaagtgaacccagtgaacccagtgaccctgtgctttgccgggagaagctatatcctccatcaccaccacgctggcttgaagttattaatatcacaaaaaatacagcagacctaaaatggacagttcctgagaaagatggagggtcccccatcaccaactacattgtggaaaagagagacgtcaggcgaaaaggctggcaaacagtggataccactgtcaaggacaccaagtgcacagtcaccccactgactgagggctctttatatgtgttccgagttgctgcagaaaatgctataggacaaagcgactacaccgaaattgaggactctgtgctggccaaagacacctttaccactcctggaccaccctacgccctggcagtggttgatgtgacaaaacgacatgttgacctaaagtgggagccacctaaaaatgatggtggaagaccaatacagagatatgtcattgagaagaaagaaaggttaggtacccgttgggtgaaagctggaaagactgcaggacctgactgtaacttcagagtaactgatgtcatcgaaggaacagaggtccagtttcaggttcgggctgaaaatgaagctggagttggccacccaagtgaacccacagaaatcctatccattgaagatccaacaagtcctccctcaccaccccttgacctacatgtgactgatgctgggagaaaacacattgccattgcttggaagcctccagagaaaaatggtggaagtcctatcataggataccatgttgaaatgtgtccagtaggcactgagaaatggatgagagttaattctcgcccaataaaggacttgaaattcaaggttgaagaaggtgttgttcctgacaaagaatatgtcctgagagtgagagcagtcaatgctattggtgtcagcgagccatctgaaatctctgaaaatgtggttgccaaagacccagactgcaagccaacaattgacctggagactcatgacattattgttattgaaggtgaaaagttaagcattcctgttcccttcagagctgtcccagttccaactgttagttggcataaagatggcaaagaagttaaagcaagtgatagattaacaatgaagaatgatcacatctctgcacaccttgaagttcccaagagtgtccgtgcagatgccggaatttataccattacactggagaataagctcggctcagcaacagcctcaatcaatgtcaaagtcataggcctacctggaccatgcaaagatattaaagcaagtgacattaccaagagttcttgtaagttaacttgggaacctccagaatttgatggtggaaccccaattcttcattatgtcctggagcgcagagaagctgggaggagaacatatataccagtcatgtctggtgagaacaaactgtcatggactgtgaaggatctcataccaaatggtgaatacttcttccgtgttaaagcagtcaacaaggttggtggaggagaatatattgaactgaaaaatccagtcattgctcaagatccaaagcaaccccctgatccacctgtagatgtagaggttcataatcctacagcggaggcaatgactattacatggaagccacctttgtatgatggagggagcaagataatgggctacatcatagagaagattgctaagggtgaagaaaggtggaagagatgcaatgaacacctggtaccaatcctgacctatacagcaaaaggacttgaagaggggaaagagtaccaattccgtgtgcgagcagagaacgccgcgggtattagtgaaccttctcgggctactcctccaaccaaagctgtagatcccattgatgcccccaaagtcattctgagaacaagcctagaagtgaaacgaggtgatgaaatagcacttgatgcaagtatttctggatcaccttacccaactattacatggataaaggatgaaaatgttattgtaccagaggaaattaagaagcgtgcagcacccttggttaggagaaggaagggtgaagttcaagaagaagaaccatttgtcctgcctctgacacagcgtttgagtattgacaacagcaaaaagggagaatctcagctacgcgtccgagattctctccgacctgaccatggtctgtatatgatcaaagttgaaaatgaccacggtattgcaaaagctccttgtactgtcagtgtgttagatacaccgggaccaccaatcaactttgtatttgaagatatcagaaagacctcagtcctttgtaaatgggaaccaccccttgatgatggtggcagtgaaatcataaactacactttggaaaagaaagacaagacaaaacccgactcagaatggattgttgtcacttcaacacttagacattgcaaatattcagtaacaaaactgattgaaggaaaagagtacctcttccgtgtaagagctgaaaacagatttgggccaggtccaccatgtgtttcaaagccacttgtggctaaagatccatttggaccacctgatgcaccagataagcccattgtggaagatgttaccagcaacagtatgctagtgaaatggaatgaaccaaaagataatggaagccccattttgggttactggcttgaaaaacgtgaagttaacagtacacattggtctcgtgtcaacaaaagccttctgaatgccttgaaagccaatgtagatggcttattagaaggactcacctatgtcttcagagtatgtgctgaaaatgcagctggacctggaaagttcagtccaccttcagatcccaaaacagcacatgatccaatctctcctcctgggccacctatcccaagagtcactgacacaagctctacaactattgaactagaatgggaacccccagctttcaatggtggtggggaaattgttggctattttgttgataagcagttggttggcacaaatgaatggtcacgctgcacagagaagatgatcaaggtccgtcagtacaccgtcaaagaaatccgagagggtgctgattacaaacttcgggtgagtgctgtcaatgccgcaggggaaggaccgcctggagaaacacaacctgttactgtggctgaaccacaagagcctccagctgtggaactggatgtttctgtcaagggtggaatacaaataatggctgggaagactcttagaattccagctgtggtgactggtcgccctgtacctacaaaagtatggaccaaagaagaaggggagctggataaagaccgtgttgtaatagacaacgttggaaccaaatctgaactaattatcaaggatgcactgcgaaaagaccatggcagatatgtgattacagctacaaatagctgtggttccaaatttgcagcagccagggtagaagtttttgatgtccctggtccagttcttgacttaaaacctgttgtaacaaacagaaaaatgtgtctacttaactggtctgatccagaagatgatggaggaagtgaaataacaggctttatcattgaaagaaaagatgccaagatgcatacttggagacaaccaatagagactgagagatctaaatgtgacatcacaggtctgcttgagggacaagaatataagttccgtgttattgccaagaacaagtttggctgtggccctcctgttgaaataggaccaattcttgcagttgatccactaggtcctccaacatctccagagaggctcacatacactgaaaggacaaagtccactatcacacttgactggaaagagccccgcagtaatggtggcagtcccatccaaggatatatcattgaaaaacggcgtcatgacaaacctgactttgaaagagttaacaagcgactctgcccaaccacatcttttctggttgaaaatcttgatgaacaccaaatgtatgagttccgtgtcaaagctgtcaatgaaattggtgaaagtgaaccatccctacctcttaatgtagtcatacaagatgatgaagtgcctccaactattaagttgcgtctgagtgttcgaggagacactatcaaagttaaggcaggagagcctgtccacatccctgcagatgtgacaggccttccaatgcctaagattgaatggtccaaaaatgaaactgtaattgaaaaacccactgatgcacttcagataaccaaggaagaggtatcccgaagtgaggcaaaaactgagcttagcattcccaaagcggtccgggaggacaaaggcacttacacagttactgcttccaatcgccttggctcagtgttccgaaatgttcacgttgaagtatatgaccgcccatccccaccaagaaatcttgctgttactgacattaaagctgaatcttgctacttgacatgggatgcccctcttgataatggtggcagtgaaatcacccattatgttattgacaaacgtgatgcaagtaggaagaaagcagaatgggaggaagtcaccaacactgctgtagagaaaagatatgggatctggaaacttatccccaatggtcagtatgagttccgagtcagggcagtgaataaatatggaatcagtgatgagtgcaaatcagataaagtagtcattcaagatccttatcgccttcctggacctccaggaaaaccaaaagttttggcacgcaccaaaggatcaatgctagtgagctggactcctcctttggacaatggtggctctccaattactggctactggctggagaaaagagaagagggaagtccttattggtcacgtgttagccgagcaccaataaccaaagtgggattgaaaggcgtggaatttaatgttcctcgtttgcttgaaggcgttaaataccagttcagagccatggcaataaatgctgcaggaattggtcctcccagtgaaccatcagatccagaggttgcaggagatcccatatttccaccggggccaccttcttgcccagaagttaaagataaaacgaagtcaagcatctcactaggatggaaacctccagccaaagatggtggcagcccaatcaaaggatacattgtagaaatgcaagaagaaggtactactgactggaaaagagtaaatgaaccagacaaacttataactacctgtgaatgtgtggtgcctaatctgaaagagctcaggaagtacagattcagagtgaaagctgtcaatgaagctggtgaatctgaaccaagtgatacaactggggagatccctgccactgatattcaagaggaaccagaagttttcattgacattggagcacaggactgtctggtttgtaaagctggctcacagattaggattcctgctgtcatcaagggacgcccaacaccaaaatcatcttgggaatttgatggaaaggcaaagaaagcaatgaaggatggagttcatgacatacccgaagatgcacagctggagactgctgaaaactcctcagtaattattattccggagtgtaaacgatctcatacaggcaaatacagcatcacagccaagaataaagcaggacaaaagactgcaaattgcagagttaaagtcatggatgtaccaggcccacccaaagatctgaaagtcagtgatatcacaaggggtagttgcagactttcatggaagatgccagacgacgatggaggagacaggatcaaaggctatgttattgagaagaggactattgatggaaaagcctggaccaaagtcaatccagactgtggaagcaccacatttgtagtgcctgatctcctctctgaacagcaatatttcttccgtgtgcgagcagaaaaccgttttggtattggcccacctgtggaaaccattcagaggaccactgccagagatccgatatatcctcctgatcctcctattaaactcaagattggcctcatcacaaagaacacagtgcatctgtcatggaaacccccgaagaatgatgggggctcccctgttacccactatattgttgagtgccttgcatgggaccctactgggacaaagaaagaagcctggaggcagtgcaataagcgtgatgtggaagaactgcaatttactgttgaagacctagtagaaggtggggaatatgaattccgagtcaaagctgtcaatgctgcaggagtcagcaagccttcagccactgttgggccctgtgactgtcaaagaccagacatgccaccatcaattgatctaaaagaattcatggaggttgaagaaggaaccaatgttaacattgtggccaaaattaaaggtgtgccattcccgacactaacctggtttaaagctcctccaaagaagcctgataacaaagaacctgttctctatgacacccatgtcaacaaactggtggtagatgatacttgcactttagttattccgcagtctcgcaggagtgacactggcttatataccatcacagctgtaaataatctgggaacagcatcaaaggagatgagactgaatgtcctgggtcgtcctggccctccagtgggacccataaaatttgaatctgtttcagcagatcaaatgacactatcttggtttccacctaaagatgatggtgggtctaagattacaaactatgtaattgagaaaagagaagctaacaggaagacatgggtccatgtctccagtgaacctaaggagtgcacgtacacgattcccaaattgctagaaggccatgaatatgtattccgaatcatggcccagaataaatatggcattggagaacctcttgacagtgaacctgaaacagcaagaaacctcttctctgtccctggagcaccagataaaccaacagttagcagcgtgactcgtaactccatgactgtcaactgggaagagccagaatatgatggaggctctcctgtgacagggtactggctggaaatgaaagacaccacttcaaagagatggaagagagttaaccgagatcctatcaaagccatgactttgggtgtttcttataaagtgactggtcttattgaaggttccgactatcaattccgggtatatgcaatcaatgctgctggcgtgggtccagcaagtctgccatcagacccagcgactgctagagatccaattgcccctcctggtcctccatttcccaaagtgacagattggactaaatcatctgcagatctggagtggtctcccccactaaaagatggtggatccaaagtaactggatacatcgttgaatataaagaagaaggaaaagaagaatgggaaaagggtaaagataaagaagtgagaggaacaaagctcgttgtgacaggattaaaggaaggagcattctacaaatttagagttagtgcagtcaacattgctggcattggagaacctggagaggtcacagatgtcattgaaatgaaggacagacttgtttcacctgaccttcagctagatgccagtgtcagagatagaattgttgtccatgctggaggggtgatccgaatcattgcctatgtgtctggaaagcctcctccaaccgtcacctggaacatgaatgaaagaaccttacctcaagaagccaccattgagaccacagccattagctcatccatggtcatcaagaactgccagaggagccatcaaggcgtctattctcttcttgccaaaaatgaagccggagaaagaaagaagacaattattgttgatgtattagatgttccaggtcccgttggaacaccattcctagctcacaacctaaccaatgagtcctgcaaactgacatggttttctccagaagatgatggaggctctccaatcaccaattatgtcattgaaaagcgtgaatctgaccgcagagcatggaccccagtgacatatacagttacccgacaaaatgctactgtccagggtctcattcaaggaaaagcctactttttccgaattgcggctgaaaatagtattggcatgggtccatttgttgagacatcagaggcacttgttatcagagagccaataactgtaccagagcgtcctgaagacctggaagtcaaagaagttactaaaaatactgtaactttgacttggaatcctcctaagtatgatggtgggtcagaaattattaactatgtcctagaaagtcggctcattgggactgagaagttccacaaagttacaaatgacaacttgcttagcagaaaatacactgttaaaggcttaaaagaaggtgatacctatgagtaccgtgtcagtgctgtcaacattgttggacaaggcaaaccatcattttgcaccaaaccaattacttgcaaggatgagctggcacccccaacgcttcacctcgacttcagagataagctcacgattcgagttggtgaagcttttgccctcactggccgttactcaggcaaaccaaagcctaaggtttcctggttcaaagatgaagctgatgtgctggaagatgatcgcactcatataaagactacaccagcaacacttgctttagagaagatcaaggccaaacgttcagattccggcaaatactgtgtggttgtggagaacagtacaggctctaggaaaggtttctgtcaagttaatgttgttgaccgtcctggaccaccagtaggaccagttagttttgatgaggtgaccaaagattacatggttatctcttggaagcctcctttagatgatggaggcagtaaaatcaccaattatattattgagaagaaggaagtgggtaaagacgtctggatgccagtgacatctgcaagtgctaaaacaacatgcaaagtttctaaactacttgaaggaaaagattatattttccggatacatgctgaaaatctgtatggaataagtgatcctctggtgtctgattcaatgaaagccaaagatcgtttcagggttcctgatgcacctgatcagccaattgttacagaagttaccaaagactctgcattagtaacctggaataagccacatgatggaggaaaacccatcacaaactacatcctggaaaagagagaaactatgtctaaacgatgggctagagttaccaaagatcctattcatccatacactaaatttagggttcctgatcttctagaaggatgtcagtatgaattccgggtttctgcagaaaatgaaattggtattggagatccaagcccaccatccaaaccagtctttgctaaagatccaattgctaaaccaagtccacctgttaatcctgaagcaatagatacaacatgcaattcagtcgatctaacttggcagccaccacgtcatgatggtgggagcaagattctgggttatattgttgagtaccagaaagttggagatgaagagtggagaagagccaatcacacccctgagtcatgtcctgaaactaaatataaagtcaccggtcttcgggacggtcaaacctataagtttagagtgttagcagtcaatgcagctggtgaatcagatccagctcatgttccggagccagtcctagtaaaagacaggcttgaaccccctgagttgattcttgatgccaacatggcaagagaacaacacattaaagttggtgatactctaagacttagtgccatcatcaaaggagtgccattcccaaaagtaacttggaaaaaagaagacagagatgctccaactaaagcaagaattgatgtgactccagttggtagcaagcttgaaattcgtaatgctgcccatgaagatggtggaatttattctttaacagtggagaatccagctggttcaaaaactgtctcagtaaaagtacttgtattagataaacctgggccacctagagatctggaagtcagtgaaattaggaaagattcatgttaccttacttggaaagaaccactggatgatggtggttctgttattaccaattatgtggttgagaggagagatgttgccagcgcccagtggtcacctctctcagctacatcaaagaaaaagagtcacttcgctaagcatctgaatgaaggcaaccagtacctcttccgagtagctgcggagaaccagtatggacgtggtccttttgttgaaacaccaaaaccaatcaaggctttggatcctctccatcccccagggccacccaaggacctgcaccatgtagatgttgacaagactgaagtctccctagtctggaataagccggatcgtgatggtggttctccaatcactggatatttggtagaatatcaagaagaaggcacccaggactggattaaatttaagactgtgacaaacttagagtgtgtggttactggactacaacaaggaaagacctatagattccgtgtaaaagctgaaaacattgtgggtcttggtctccctgacacaactatcccgatagaatgtcaagaaaaactagtgcctccatccgtggagctagatgtgaaattaattgaaggtcttgtggtaaaggctggaaccacagtcagattccctgctattataagaggtgtgcctgttcctactgcaaagtggacaaccgatgggagtgagattaaaaccgatgagcactacacagttgaaacagacaacttctcatcagtacttaccattaagaactgcttaaggagagacactggggaatatcaaatcacagtttccaatgcagccggtagcaaaacagtagccgtacatcttactgttcttgatgttcctgggccaccaacaggtcctattaatattctggatgttactcctgaacacatgactatctcatggcagccacctaaggatgatggaggaagccctgtgataaattatattgttgagaaacaagatacaaggaaagacacgtggggtgttgtctcttccggaagcagtaagacaaagctgaaaatcccacatctgcagaagggctgtgaatatgttttccgagttagagcagagaataagataggtgttggtcctccccttgactccacacctactgttgctaagcataaatttagtcctccgtctcctcctggtaaaccagtggttactgacattactgaaaatgcagcaacagtgtcttggaccctgccaaaatctgatggtggcagtccaataactggctactatatggaacgtcgagaagtaactggcaaatgggtgagggtcaacaaaacacctatcgctgacctgaagttcagagtgactggactctatgaaggaaatacatatgagtttagagtttttgctgaaaatcttgcaggactaagcaaaccatccccaagttctgatccaataaaagcttgccggcccatcaaaccacctggaccacctattaatcctaaactgaaagacaagagcagagaaacagctgatttggtgtggacaaagcctctcagtgatggtggtagccccattctaggatatgtagtggaatgtcagaaacctggcacggcacaatggaacaggattaataaagatgaactcattaggcaatgtgcctttagggtacctggactaattgaaggaaatgagtacagattccgtataaaggcagctaatattgtaggagagggtgagccaagagaactagcagaatctgtgattgcaaaagatatccttcatcctccagaagtagaacttgatgttacttgtcgtgatgttattaccgtgagagtaggccaaactatccgcattctagctcgagtcaaaggcagacctgaaccagacataacttggactaaggaaggcaaagtattggtccgagaaaagagggtggaccttattcaggatctacctcgtgttgagttacaaattaaagaagctgttagagctgatcatggcaagtatatcatctcagctaagaacagcagtggacatgcccaaggttcagccatcgttaacgtccttgacagacctgggccttgccagaatttgaaggttaccaatgtaaccaaagagaactgtacaatttcttgggaaaacccactagataatggtggctcagaaataacaaacttcatagtagaatatcgcaaaccaaaccagaaaggctggtcaattgttgcatcagatgtcactaaacgattaatcaaggccaaccttttagccaacaatgaatactatttccgagtttgtgcagagaataaagtaggtgttgggccaaccatcgaaacaaaaactcccattctggctattaaccctattgacagaccaggtgagcctgaaaaccttcacattgcagataaaggaaagacatttgtctatctaaagtggcggaggcctgactatgatggtggcagtccaaatctgtcatatcatgttgagagaaggcttaagggctccgatgactgggaaagagtgcataaaggaagcattaaagaaactcactacatggttgacagatgtgttgaaaaccagatttatgagttcagagtgcaaacaaagaatgaaggtggggaaagtgactgggtgaagacagaggaagttgttgtgaaagaagacttacaaaaaccagtacttgatctgaaattaagtggggtcctaactgtcaaagcaggggacaccattaggcttgaggcaggggttagaggcaaaccattcccagaagttgcatggaccaaggacaaagacgctacagacttaacaagatcaccaagggtcaagattgatacccgtgctgattcatctaaattttctcttactaaagcaaagcgaagtgatgggggtaaatatgtagttacggcaactaacacggctggcagttttgtggcctatgccactgtcaatgttttagataagcctggtcctgtgagaaatctgaaaattgttgatgtgtccagtgataggtgtactgtttgctgggatccaccagaagatgatggtggctgtgaaatccaaaattatattctagaaaaatgtgagacaaagcgaatggtttggtctacctattctgctactgtcttgacacctggtactacagtaacacgtctcatagaaggaaatgaatatattttcagagtccgtgcagaaaataaaataggcacagggcctccaacagaaagtaaaccagtcatagccaaaaccaagtatgataaacctggtcgccctgatcccccagaagtcactaaagtaagcaaagaagagatgactgtggtttggaatccacctgaatatgatggtggaaagtctataactggatactttttggagaaaaaggaaaagcattcaacacgatgggtccctgtcaacaagagtgcaatccctgagagacgtatgaaagtacagaatctcctcccagaccatgaatatcagttccgtgtcaaggcagaaaatgaaattggaattggagaaccaagcttgccttcaagaccggtggtggcaaaagaccccatagagccacctggtccaccaaccaatttcagagtggttgatacaaccaaacattccataactcttgggtggggaaaaccagtctatgatggtggtgcaccgatcattggatatgttgtggaaatgagaccaaaaatagcagatgcgtctcctgatgaaggctggaaacggtgtaatgctgcagcacagcttgtacgcaaggaattcactgttaccagcttggatgaaaaccaggaatatgagttcagggtgtgtgcccaaaaccaagttggtattgggcgccctgcagagctaaaggaagctatcaaacctaaagaaatactagaacctccggagattgatttggatgccagcatgaggaaactggtcatagtgagagcaggatgccctattcgtctctttgctatagtgagaggacgaccagcccctaaagtcacttggcgaaaagttggcattgataatgtggtcagaaaaggacaagttgatctggttgacactatggccttccttgtcatccccaattctacccgtgatgactcaggaaaatattccttaacacttgtgaacccagcaggagaaaaggctgtattcgtaaatgtcagagtattagacactcctgggcctgtgtctgatttaaaagtttcagatgtcactaaaacatcatgccatgtgtcctgggcccctcctgaaaacgacggtgggagccaagtgacacattatatcgtggagaaacgtgaggcagacagaaagacatggtcgaccgttaccccagaagttaagaaaacaagcttccatgtaaccaatcttgtccctgggaatgagtattacttcagagtaactgctgtcaacgaatatggccctggcgtcccaacagatgtcccaaaaccagtgcttgcatcagatcctctaagtgagccggatcccccaaggaaattagaagtgactgaaatgaccaagaacagtgccaccttagcctggttacctcccctacgtgatggaggtgctaaaatcgatggctacatcactagttacagagaagaagagcagcctgcagatcgctggacagagtactcagtggtaaaagatctgagccttgttgtcactggcctaaaggaaggaaagaaatacaaatttagagtagcggccagaaatgctgttggagtcagtttgccaagagaagctgaaggagtgtatgaagccaaagaacaactgttgccaccaaagatccttatgccagagcaaataactatcaaagctgggaaaaaactccgaattgaagcccatgtgtatggaaagcctcatcccacctgtaaatggaaaaaaggagaagatgaagttgtcacatccagccacctggcagtgcataaagcagacagctcttcaattctgatcataaaagatgtgactaggaaagacagtggttactacagcctcacagcagagaacagttctgggacagacactcagaaaatcaaagttgtagtcatggatgcccccggcccccctcagcctccatttgacatttctgatatagacgctgatgcttgctccctgtcatggcacatccctctggaggacggaggcagtaacatcaccaattatatagtggagaagtgtgatgtaagccgaggtgactgggtcacggctctagcttcagtcacaaaaacttcctgcagggttggaaagctgatcccaggccaggagtacatcttccgggtccgtgctgaaaaccgatttggcatttcagagcctctcacatctccaaagatggttgcgcagttcccatttggtgttcctagtgaaccaaagaatgcacgagtcaccaaagtcaacaaggactgtatttttgttgcttgggacagaccagatagtgatggagggagccccattattggttatctgattgaacgcaaggaaagaaacagtttgctgtgggtgaaagccaatgatactcttgtccggtcaactgaatatccttgtgctggccttgtagaaggtcttgagtattcattcagaatctatgccctaaacaaagctggatccagcccacccagcaaacccacagaatatgtaactgcaagaatgccagttgatcctcctgggaaacctgaggttattgatgtcaccaagagtactgtatctctgatctgggctcgtccaaagcatgatggaggcagtaaaattattggctatttcgtagaagcttgcaaacttcctggtgataaatgggtacggtgcaatactgcacctcaccagattccccaggaagagtacacagctactggcctagaagagaaagctcagtatcaatttagagctattgccaggaccgcggtaaacattagcccaccttctgaaccttctgatccagtgactatcctcgcagaaaatgtccctcccaggatagacctgagtgtggctatgaaatctttgcttactgtgaaagctggaactaatgtctgcttggatgctactgtttttggtaaaccgatgccaacagtttcttggaaaaaagatggcacactgctaaaaccagcagaaggcataaagatggccatgcagcggaatctgtgcaccttggagctattcagcgtgaaccggaaggactcaggagactataccattactgctgaaaattcaagtggttctaaatcagccaccattaagcttaaagtgttagataaaccgggtcctccagcatctgttaaaatcaacaaaatgtattcagatcgtgctatgctttcttgggaaccgcctcttgaagatggaggctcagaaatcaccaactatattgttgacaaacgtgaaacaagcaggcccaactgggctcaagtctctgcaactgtgcctatcaccagctgcagcgtggagaaacttatagagggccatgagtatcagttccgtatttgtgctgaaaataaatatggagtaggcgatccagtcttcactgaaccagcaattgccaaaaacccatatgacccaccaggacgctgtgatcctcctgttattagcaacataaccaaagatcacatgacagtcagctggaagccaccagcagatgatgggggctcacccatcactggctatttgcttgaaaagcgggaaacccaggctgttaactggactaaggtcaacagaaaacctattatagaaagaacattaaaagcaacaggtcttcaagaaggtaccgaatatgagttccgtgttacagctataaataaagctggaccaggcaaacccagtgacgcatccaaggccgcttatgctcgggaccctcagtatcctcctgcgccaccggctttccctaaagtatatgatacaactcgcagctctgtgagtctatcttggggcaagccagcctatgacggcggcagccctatcattggttatctcgttgaagtaaaacgggctgactccgataactgggtgaggtgcaacttaccacagaatctacagaaaacccgctttgaggttactggcctgatggaagacacacaatatcaattccgtgtgtatgccgttaataagattggatacagtgaccccagtgatgtgccagataaacactatcccaaggacatcttaattccacctgagggagaacttgatgcggacttaaggaagacactcatattacgtgctggagttactatgagactatatgtaccagtaaaaggacgcccacctccaaagattacttggtctaaaccaaatgtcaatctaagagacaggattggactggacataaagtcaactgactttgacactttcttgcgctgtgaaaatgtgaacaaatatgatgcaggaaaatatatcttaaccctggagaacagctgtggtaaaaaggaatataccattgttgtgaaagtgcttgatactcctgggccacctgtcaatgtgactgttaaggaaatatccaaagactctgcttatgttacctgggagcctcccattattgatggcggaagccccatcataaactatgtggtacaaaaacgtgatgcagagaggaaatcctggtctacagtgacaactgagtgctccaaaacaagcttcagagtagctaatttggaggagggaaaatcctacttcttccgagtgtttgctgaaaatgagtatggcattggtgatcccggtgaaactcgtgatgctgtcaaagcttcccaaactcctggaccagttgtggacctgaaagtgaggtctgtatctaagtcatcctgtagcattggctggaaaaagcctcacagtgatggtggaagtcggattattggatatgtagttgatttcctgactgaagaaaataagtggcaacgagttatgaaatccttaagcctacagtactctgcaaaagatttgactgaagggaaggaatataccttcagagtgagtgctgagaatgaaaatggagaaggaaccccaagcgaaatcactgttgtggcaagggatgatgttgtggctcctgatcttgacttaaagggtctacctgatttgtgctacttggctaaagaaaacagcaacttccggcttaagatccccataaaaggcaagccagctccatcagtctcctggaagaaaggggaagatcctctagcaactgacactagagtcagtgttgagtcatctgcggttaacacaactcttatagtgtacgattgccaaaaatctgatgctggaaaatacacaatcacacttaagaatgttgctggcaccaaggaaggaactatctccataaaggttgttggcaagcctggcatccccactggaccaatcaaatttgatgaagtcacagcagaagccatgaccttaaagtgggctcctccaaaggatgatggaggttctgaaatcaccaactatatcctagagaagagggattctgtgaacaacaagtgggtgacgtgcgcctcagctgtccagaaaaccacctttagagtaaccagacttcatgagggcatggaatataccttcagggtcagtgccgaaaataaatatggtgtaggggaaggcctgaaatcggagccaattgttgcgagacatccatttgatgtgcctgatgctcccccacctcccaatattgtggatgtcagacacgattcagtatctctaacttggactgaccccaagaaaactggtggttctccaattacagggtatcatctcgagttcaaggaaagaaacagccttttgtggaagagagctaacaagactccgataaggatgagagactttaaagtgacaggattaactgaaggtcttgaatatgaattccgagttatggcaatcaatttagcaggtgtgggcaagccaagcctaccatcagagcctgttgtggcactggacccaattgatcctcctggaaaacctgaggttattaacataacaaggaattcagtgactctcatttggactgaacctaaatatgacggtggtcataagttaactggatatatagtggagaagcgagatctaccttcgaagtcttggatgaaagccaaccatgttaatgtcccagaatgtgcctttactgtaactgaccttgttgagggtggaaaatatgaattcagaattagagcaaagaatacagcaggtgctatcagtgctccatcagaaagtacagaaaccattatttgcaaggatgaatacgaggcaccaacaattgtccttgatcccacaataaaagatgggctaacaattaaagcaggggataccattgttttgaatgccattagcattcttggcaaaccccttccaaaatcaagttggtccaaggcaggaaaagacattagaccatcagatatcactcagataacttcaaccccaacatcttccatgcttactatcaagtatgccactagaaaagatgcgggtgaatataccatcactgctaccaatccttttggcacgaaggtggaacatgtgaaggtaacagtccttgatgtacctggtcccccaggtcctgttgaaatcagtaatgtttctgctgaaaaagcaacacttacatggacacctcccttggaagatggcggctcaccaattaagtcctatatacttgaaaagagagaaaccagccgacttttgtggacagtggtttctgaagatattcagtcttgcaggcatgtggcaaccaaacttatccaaggaaatgagtacatcttccgggtctcagctgtaaaccactatggcaaaggagaacctgtacagtctgaacctgtcaaaatggtagacagatttggtccccctggccctcctgaaaaaccagaggtatcaaatgtcactaagaacactgccactgtcagctggaaaaggccagtggatgatggtggcagcgaaattacaggatatcatgtagaaaggagagaaaagaaaagcctgcgatgggtgagagcaataaaaacaccagtttccgatctcaggtgcaaagtaacaggactgcaagaaggaagcacctacgaattccgtgtcagtgcagaaaacagagcaggaattggtccacccagtgaggcttcagattctgttctgatgaaagatgcagcatatcctccaggaccaccttcaaatccgcatgtcactgatactaccaagaaatctgcttctttggcatggggcaagcctcattatgatggtggacttgaaatcactggctatgtcgtggagcatcaaaaagtaggagacgaggcctggataaaagataccacaggaaccgccctcagaatcactcagttcgttgttcctgatcttcagactaaagaaaaatacaacttcagaatcagtgccatcaacgatgcaggtgttggggagccagcggtgattccagatgttgaaatcgtagaacgggagatggctcctgattttgaactagatgccgagcttcgaagaacacttgttgttagagcaggactcagtattaggatatttgtgccaattaaaggtcgtcctgctcctgaagtgacatggaccaaagataacatcaacctgaaaaaccgagccaacattgaaaatacggaatcatttactcttctgattatcccagaatgtaacagatatgataccggtaaatttgtcatgaccattgaaaacccggctgggaagaaaagtggctttgtgaacgtcagagtcttggacacgccaggcccagtcctcaacctgcggcctacagacatcacaaaggacagtgtcaccctgcactgggacctccctctgatagatggaggctcacgtataacaaactacattgtagagaaacgtgaagcaacacggaaatcttattccacagccaccactaagtgccataaatgcacatataaagttaccggcttgtctgaagggtgtgaatatttcttcagagtgatggcagagaatgaatatggaattggtgagccaacagaaactacagagcccgtaaaagcctctgaagcaccatctccaccagacagccttaacatcatggacataactaagagcaccgtcagcctggcatggcctaagcccaaacacgatggtggcagcaagatcactggctatgtgattgaagcccaaagaaaaggctctgaccagtggacccacatcacaaccgtgaaagggttagaatgtgttgtgaggaatctaactgaaggagaggaatataccttccaagtgatggcagtgaacagcgcggggagaagtgcccctagagaaagcagacccgtcattgtcaaggagcagacaatgcttccagagctggatctccgtggcatctatcagaaactggtcattgccaaagctggtgacaacatcaaagttgaaattccagtgctcggtcgaccgaagcccacagtgacatggaaaaaaggagaccaaattcttaaacagacacagagagttaattttgaaaccacagcgacttcaaccattttaaatatcaatgagtgtgtcagaagtgatagtgggccctatccattaacagcaaggaacattgtaggagaggttggtgatgtcatcaccattcaagtccatgatatcccagggccacctactggaccaatcaaatttgatgaagtttcatctgattttgtaaccttctcttgggacccacctgagaacgatggtggtgtaccaataagcaactatgtagtggaaatgcggcagactgacagtactacctgggttgagttagcaaccaccgttatacgtactacctataaagccacccgccttactactggattagagtatcagttccgtgtaaaagctcagaatagatatggagttggaccaggcatcacatcagcatgcatagttgccaactatccatttaaggttcctggacctcctggtacccctcaggtaactgcagttaccaaggattcaatgacaattagctggcatgagccactttctgatggtggaagccccattttaggatatcatgttgaaagaaaagaacgaaatggtattctctggcagactgtgagcaaagctttagtaccaggcaacattttcaaatcaagtggacttacagatggtattgcttatgagttccgggtgattgcagaaaacatggcaggcaaaagtaagccaagcaagccatcagaacctatgttggctctggatcccattgacccacctggaaaaccagtacctctaaatattacaagacacacagtaacacttaaatgggctaagcctgaatatactgggggctttaaaattaccagttatatcgttgaaaagagagaccttcctaatggacggtggctgaaggccaacttcagcaacattttggagaatgaatttacagtcagtggcctaacagaagatgctgcatatgaattccgtgtgatcgccaaaaatgctgcaggtgccatcagtccaccatctgagccatctgatgctatcacttgcagggatgatgttgaggcaccaaagataaaggtggatgttaaatttaaggacacggttatattaaaagcaggtgaagcattcagactggaagctgatgtttcaggccgcccacctccaacaatggaatggagcaaagatggaaaagagctggaaggcacagcaaagttagaaataaaaattgcagatttctctactaatctggtaaacaaagattcaacaagaagggatagtggtgcctatacccttacagcgactaatcctggtggctttgctaaacacattttcaatgtcaaagttcttgacagaccaggcccacctgaaggacctttggctgtaactgaagtgacatcagaaaagtgtgtactatcatggttccctccactggatgatggaggtgccaaaattgatcattacatagtacagaaacgtgaaaccagcagattggcatggacaaatgtagcctcagaagtccaagtaacaaagctaaaggtcactaaactcttgaaaggcaatgaatacatattccgtgtcatggctgtaaataaatatggagtgggagagccactggaatcagagcctgtgcttgcagtgaatccttatggaccccctgatccgcccaaaaaccctgaagtgacaactattactaaagattcgatggttgtctgctggggacatcctgattctgatggtggaagtgaaatcatcaattatattgtggaacggcgtgataaagctggccaacgctggattaaatgcaacaaaaaaactcttactgatttaagatataaagtgtctggactgacagaaggacatgaatatgagttcaggattatggctgaaaatgctgctggaattagtgcaccaagtcctaccagtccattttacaaggcttgtgacactgtgtttaaacctggaccaccaggtaacccacgtgttctggatacaagcagatcatccatttcaatcgcttggaataaacctatctatgatggtggttcagaaatcactgggtatatggttgagattgccctgccagaggaagatgaatggcagattgtcactccaccagcaggactcaaggcaacttcgtatactatcactggcctcacagagaatcaggaatataagatccgcatctatgccatgaattccgaaggacttggggaacctgcccttgttcctggaactccaaaggctgaagacagaatgctgcctccagaaattgaactggatgctgacctgcgcaaagttgttactataagggcctgctgcaccctgagactttttgttcccatcaaaggaaggcctgcacctgaggtgaagtgggcccgggaccatggagaatctttagataaagctagcatcgaatccacaagctcttacaccctgcttattgttggaaatgtaaacagatttgacagtggcaaatatatactaactgtagaaaatagttcaggcagcaagtctgcatttgtcaatgttagagttctcgatacaccaggccccccacaggatctgaaggtaaaagaggtcactaagacatctgtcacactcacatgggacccacctctccttgatggaggttcaaaaatcaagaactatattgttgaaaagcgggaatcaacaagaaaagcatattcaactgttgcaacaaactgccacaagacttcctggaaggtagaccagcttcaagaaggctgtagctactatttcagggttctcgcagaaaatgaatatggcattgggctgcctgctgaaaccgcagaatctgtgaaagcatcagaacgacctcttcctccaggaaaaataactttgatggatgtcacaagaaatagtgtgtcactctcttgggagaaaccagagcatgatggaggcagccgaattctaggctacattgtggagatgcagaccaaaggcagtgacaaatgggccacgtgtgccacagtcaaggtcactgaagccactatcactggattaattcagggtgaagaatactctttccgtgtttcagctcagaatgaaaagggcatcagtgatcctagacaactgagtgtgccagtgatcgccaaagatcttgtcattccaccagccttcaaactcctgttcaatactttcactgtactggcaggtgaagacctaaaagttgatgttccattcattggccgccctaccccagctgtaacctggcataaagataatgtaccactgaagcagacaactagagtaaatgcagagagcacagaaaataattcactactgacaataaaggacgcctgccgagaagatgttggccattatgtggttaaactgactaactcagctggtgaagctattgaaacccttaatgttatcgttcttgacaaaccagggcctccaactggaccagttaaaatggatgaagtgacagctgatagtattactctttcctggggcccacccaagtatgatggtggaagttctatcaataattacattgttgagaaacgggacacttccacaaccacctggcaaattgtatcagctacagttgcaaggacaacaataaaggcttgcagactgaagactggatgtgaatatcagtttagaattgcagctgaaaacagatatgggaagagtacctacctcaattcagagcctactgtagcccaatatccattcaaagttcctggtcctcctggcactccagttgtcacactgtcctccagggacagcatggaagtacaatggaatgagccaatcagtgatggaggaagtagagtcattggctatcatctagaacgcaaggaaagaaatagcatcctctgggttaagttgaataaaacacctattcctcaaaccaagtttaagacaactggccttgaagaaggtgttgaatatgaatttagagtctctgcagagaacatcgtgggcattggcaagccgagtaaagtatcagaatgttatgtggctcgtgacccatgtgatccaccaggacggccagaggcaatcattgtcacaaggaattctgtgactcttcagtggaagaaacccacctatgacggtggaagcaagatcactggttatattgttgagaagaaagaattacctgagggccgttggatgaaagccagttttacaaatattattgacactcattttgaagtaactggcctagttgaagatcacagatatgagttccgggttatagcccgaaatgccgcaggagtgtttagtgagccttcagaaagcacaggagcaataacagctagagatgaggtagatccaccacgaataagtatggatccaaaatacaaagacacaatcgtggttcatgctggtgaatcattcaaggttgatgcagatatttatggcaaaccaataccaaccattcagtggataaaaggtgatcaggagctttcaaacacagctcgattagaaataaagagcaccgactttgccaccagtctcagtgtaaaagatgcagtacgtgtcgacagtggaaattacatactgaaggccaaaaatgttgcaggagaaagatcagttactgtgaatgtcaaggttcttgacagaccagggccacctgaaggacctgttgttatctcaggagttacagcagaaaaatgcacactagcttggaaacccccacttcaggatggtgggagtgacatcataaattatattgtggaaaggagagaaaccagccgcttagtttggactgtggttgatgccaatgtgcagactctcagctgcaaggttactaagcttcttgaaggcaatgaatatactttccgtataatggcagtaaacaaatatggtgttggtgaacctcttgaatctgagccagtagttgccaagaatccatttgtagtaccagatgcaccaaaagctccagaagtcacaacagtgaccaaggactcaatgattgttgtatgggaaagaccagcatctgatggtggtagtgaaattcttggatatgttcttgagaaacgggataaagaaggcattagatggacaagatgccataagcgtctgattggagagttgcgcctgagagtaactggactcatagaaaatcacgattatgagttcagagtttctgctgagaatgctgctggacttagtgaaccaagccctccttctgcttaccaaaaggcttgtgatcctatttataaaccaggacccccaaacaaccccaaagtcatagacataaccagatcttcagtattcctttcttggagcaaaccaatatatgatggtggctgtgaaattcaaggatacattgttgaaaaatgtgatgtgagtgttggtgaatggacaatgtgcactccaccaacaggaattaataaaacaaacatagaagtagagaagctgttggaaaagcatgaatacaacttccgtatctgtgctattaataaagctggagttggagaacatgctgacgtccctggacctattatagttgaagaaaaattagaagcaccagacattgatcttgacctagaactaaggaaaatcataaatataagggcaggtggctccttaaggttatttgttcctataaaaggtcgtcctacaccagaagttaaatggggaaaggtggatggtgaaatccgagatgcagctataattgatgtcactagcagtttcacctctcttgttcttgacaatgtcaaccgatatgatagtggaaaatatacgcttacattagaaaacagcagtggaacaaagtctgcctttgttactgtgagagttctggacacgccaagtccacctgttaacctgaaagtcacagaaatcaccaaagactcagtatcaattacatgggaacctcctttgttggatgggggatccaaaataaaaaattacattgttgagaaacgtgaagccacaagaaaatcatatgctgctgttgtaactaactgccataagaattcttggaaaatcgatcagctccaagaaggttgcagttattactttagagtcacagctgagaatgagtatggtattggccttcctgcccagactgctgatccaattaaggttgcagaagtgccacaacctcctggaaaaataactgtggatgatgtcaccagaaacagtgtctctctgagttggacaaaacctgaacatgatggtggcagtaaaatcattcagtatattgtggaaatgcaagctaaacacagtgagaaatggtcagagtgtgctcgagtaaagtctcttcaggcagtaattaccaacctaactcaaggggaagaatatctttttagagttgttgctgtaaatgaaaaggggagaagtgatcctcggtcccttgcagttccaatagttgccaaagatctggtaattgagccagatgtaaaacctgcattcagtagttacagtgtacaggttggccaagatttgaaaatagaagtgccaatttctggacgtcctaagccaaccattacctggactaaagatggtctcccactgaagcagaccacaagaatcaatgttaccgattcactggatctcaccacactcagtattaaagaaactcataaggatgatggtggacaatatggaatcacagttgccaatgttgttggtcagaagacagcatccatcgaaattgtaactctagataaacctgatcctccaaaaggacctgttaaatttgatgacgtcagtgctgaaagtattacattatcttggaaccctccattatatacagggggctgccaaatcaccaactacattgttcagaaaagagatacaaccaccacagtatgggatgttgtttctgctactgttgctagaactacactcaaagtgaccaaactgaaaactggtacagaataccaatttagaatatttgccgaaaacagatatggacaaagctttgccttagagtctgatccaattgtagctcaatatccctacaaagaaccaggccctccaggtacaccatttgccacagccatttccaaagactccatggtcatacagtggcatgaaccagtcaacaatggtggaagccccgtcataggttaccacctggagagaaaagaaagaaacagtattttgtggacaaaggtcaacaaaactattattcatgacacccaattcaaagcacagaatcttgaagaaggcattgaatatgaattcagagtgtatgctgaaaatattgttggtgtaggcaaagcaagcaagaattctgaatgctatgtagccagagatccctgtgacccaccaggaaccccagaaccaataatggttaaaagaaatgaaatcactttacagtggaccaaacctgtgtatgatggtggaagtatgattacaggctacattgtagagaaacgtgatttgcctgatggtcgttggatgaaagctagctttacaaatgtcattgaaactcaatttactgtgtcaggtcttactgaagatcaaagatatgaattcagagtcattgcaaagaatgcagctggtgcaataagtaaaccctctgacagtactggaccaataactgccaaggatgaggttgaactcccaagaatttcaatggatccaaaattcagagacacaattgtggtaaatgctggagaaacattcagacttgaggctgatgtccatggaaagcccctacctaccattgagtggttaagaggagataaggaaattgaagaatctgctagatgtgaaataaagaacacagatttcaaggctttacttattgtaaaagatgcaattagaattgatggtgggcagtatattttaagagcttccaatgttgcaggttctaagtcattcccagtaaatgtaaaagtattagatagaccaggacctccagaagggccagtccaggttactggagtcacttctgaaaaatgctctttaacatggtctccaccacttcaagatggtggcagtgacatttctcactatgttgttgaaaagcgagaaaccagtcgacttgcctggactgttgttgcttcagaagttgtgaccaattctctgaaagttaccaaactcttagaaggtaatgaatatgttttccgtataatggctgtcaacaaatatggtgttggagagcctttggaatctgcaccagtactaatgaaaaatccatttgtgcttcctggaccaccaaaaagcttggaagtcacaaatattgccaaagactccatgaccgtctgttggaaccgtccagatagtgatggtggaagtgagattattggttacattgtagagaaaagagacagaagtggcattcgatggataaaatgtaataaacgccgcattacagatttgcgtctaagagtgacaggattaacagaagatcatgagtatgaattcagggtctctgcagaaaatgctgctggagttggggaaccaagtccagctacagtttattataaagcctgtgatcctgtgttcaaacctggcccacctaccaatgcacacattgtagacaccactaaaaattcaatcacacttgcctggggtaaacccatctatgatggcggcagtgagatcttgggatatgtagtagaaatctgtaaagcagatgaagaagaatggcaaatagttactccacagactggcctgagagtcactcgatttgaaatttcaaaactcactgaacaccaagagtataaaatacgagtctgtgccctcaacaaagttggtttaggtgaggctacatcagttcctggtactgtgaaaccagaagataaacttgaagcacctgaacttgaccttgactccgaattaagaaaaggaattgttgtaagagctggtggatctgccagaattcacattccattcaaaggtcgtccaacgcctgagatcacttggtctcgagaggaaggtgaattcacagataaggtccaaattgaaaagggagtaaactatacccaactatcaatagataactgtgatagaaatgatgctggaaaatacattcttaagttggaaaacagcagtggatcaaagtctgcttttgtaactgtgaaagttcttgacactccaggaccaccacagaatttggcagtcaaagaagtgagaaaagattctgccttcctggtatgggagccacccatcattgatggaggggcaaaggtcaagaactatgtgattgacaaacgtgagtcaaccagaaaagcgtatgctaatgtgagtagtaaatgcagcaaaacaagttttaaagtggaaaaccttacagaaggagccatttattacttcagagtcatggctgaaaatgaatttggagttggtgttccagtggaaactgttgatgccgtgaaagctgctgaacctccttccccaccaggaaaggttacactcactgatgtgtcccagaccagtgcatcacttatgtgggagaaacctgaacatgatggcggtagcagagtcctggggtacgttgttgaaatgcagcccaaaggaactgaaaaatggagcattgtggctgaatccaaagtctgtaatgcagttgttactggtttgagttctggacaagaatatcagttccgtgtcaaggcttataatgagaaaggaaaaagcgatccaagagtgttgggtgttcctgtcatagccaaggacttgactatacagcctagtttaaagttaccatttaacacatatagtatccaagctggagaagatcttaaaatagaaattccagttataggccgaccaagacctaacatttcttgggtcaaagatggtgagcctcttaaacagacaacaagagtaaacgttgaagaaacagctacctcaactgttttgcacattaaagaaggtaacaaagatgactttggaaaatacaccgtaacggcaacaaatagtgcaggcacagcaacagaaaatctcagtgttatcgttttagaaaagcctggacctccagttggcccagttcggtttgatgaagttagtgcagactttgtagtcatatcttgggaacctccagcctatactggtggctgccaaataagcaactacattgtagagaagcgagatacaaccaccaccacttggcacatggtatcagcaacagttgcaagaacaacaattaaaataaccaaactgaaaacaggcacggagtaccagtttagaatttttgctgaaaacaggtatggaaaaagtgccccactggattctaaggcagttattgtacaatatccatttaaagaacctggaccacctggaactccttttgtgacatcaatctcaaaagatcagatgcttgtgcaatggcatgagccagtgaatgatggaggcaccaaaattattggctaccatcttgaacagaaagaaaagaacagtattttatgggtcaagttaaataagacccccattcaggacaccaaattcaaaacaactgggcttgatgagggccttgagtatgagttcaaagtttctgctgaaaatattgttggcattggcaagcctagcaaagtgtcagaatgctttgttgctcgtgatccatgtgacccacctggtcgccctgaagccattgttattacaagaaacaatgtcacactgaaatggaagaaacctgcctatgatggtggtagcaaaataacaggttatattgtagaaaagaaagatctacctgatggccgctggatgaaagccagctttaccaacgtattagaaactgaatttacagtgagtggacttgtagaagaccaaagatatgaatttagagtaattgcaagaaatgcagctggaaactttagtgaaccatctgatagtagtggtgccattactgcaagagatgaaattgatgcaccaaatgcctctctggatccaaaatataaagatgtcatcgttgttcatgcaggagagacttttgttcttgaagccgacatccgtggcaaacctatacctgatgttgtttggtcaaaagatggaaaagaacttgaagaaacagctgctagaatggaaattaaatctactattcagaaaacaactcttgttgtcaaagactgtatacggactgatggaggacaatatattctgaaactcagcaatgttggtggtacaaagtctatacccatcactgtaaaggtacttgacaggccagggcctcctgaagggcctctgaaagttactggagttactgcggaaaaatgttacctggcatggaacccacctttgcaagatggtggtgctaatatttcacattacatcattgaaaagagggagacaagccgactctcttggacccaggtttcaactgaggtacaggcccttaactacaaagttactaaacttcttcctggtaatgagtacattttccgtgtcatggctgtgaataaatatggaattggagagcccttggaatctgggcctgttacggcctgtaatccttataagccaccaggtcctccctcaacacctgaagtctcagcaatcaccaaagattctatggtagtaacatgggcacgcccagtagacgacggaggtaccgaaattgagggctacattcttgaaaaacgagataaggaaggcgttagatggaccaagtgcaacaagaaaacattaacggatctgcggctcagggtaactggtcttaccgaaggccattcctatgaattcagagttgctgctgaaaatgcagctggtgtgggagaacctagtgagccatctgttttctaccgtgcgtgtgatgccttgtatccaccaggtcccccaagcaatccaaaagtgacggacacttccagatcttctgtctccctggcatggagtaagccaatttatgatggtggcgcacctgttaaaggctatgttgtagaggtcaaagaagctgctgcggatgaatggacaacctgcactccaccaacaggattacaaggaaagcagttcacagtgaccaagcttaaagaaaacactgaatataacttccgtatttgtgccatcaattctgaaggtgtaggtgaacctgcaactctacctggctcagtggttgctcaggagaggatagagccaccagaaatagaactcgatgctgatctcagaaaggtggtcgttctgcgtgcaagtgctactttacgcttatttgtcactatcaaaggtcgaccagaacccgaagttaaatgggaaaaggcagaaggcattctcactgacagggctcagatagaggtgaccagctcatttacaatgttggtgattgataatgttaccagatttgacagtggtcggtataatctgacattagaaaataatagtggctccaaaacagcttttgttaacgtcagagttcttgactcaccaagtgcccctgtgaatttgaccataagagaagtgaagaaagactcagtgacgttgtcctgggaaccaccacttattgatggtggagctaagattacaaactacattgtcgaaaaacgagaaactacaagaaaagcctatgctaccattacaaataattgcactaaaactactttcagaattgaaaatctacaagaaggatgttcttactacttccgagtcttggcttccaatgaatatgggattggtttgccagctgaaacaacagaacccgttaaagtgtctgaaccacccctcccacctggaagagtaactcttgttgatgtgacccgtaatacagctacaattaagtgggagaaaccagaaagtgatggtggcagcaaaattactggttatgtggttgaaatgcagactaaagggagtgaaaagtggagcacctgcacacaagttaagactctagaagcaactatatctggcttaactgcaggagaagagtatgtcttcagggtagctgcagttaacgaaaagggaagaagtgatccaagacaacttggagtgccagtaattgcaagggatattgaaataaagccttcagttgagcttcctttccatactttcaatgtaaaggctagagaacaacttaagattgatgtgccattcaaaggaagacctcaagctactgtgaactggagaaaagatggtcagactcttaaagagacaactagagtcaatgtttcttcttcaaagactgtaacatcactatctattaaggaagcttcaaaggaagatgttggaacttatgaattatgtgtttcaaacagtgctggatccataacagttcctattactataattgtccttgacagaccaggacctccaggtcctatacgtattgatgaggttagttgtgacagcataaccatttcttggaatcctccagaatatgatggtggctgccaaattagcaattacattgttgaaaagaaagaaaccacctctacaacatggcacatagtttcacaagcagttgcaagaacatccattaaaatagttcgcctgacaacaggaagtgagtatcagttccgtgtttgtgcagaaaaccgctatggaaagagctcctacagtgaatcttcagctgttgttgcagagtatccattcagtcccccaggtcctcctggtactcctaaagttgtgcatgccacaaaatctaccatgcttgtaacctggcaagtgccagttaatgatggaggaagtcgagtaattggctatcatcttgagtataaagaaagaagcagcattctttggtcaaaagcaaataaaatcctcattgctgatactcaaatgaaagtctccggccttgatgaaggactgatgtatgagtatcgtgtatatgctgaaaatattgctggaattggtaaatgcagtaaatcttgtgaaccagtccctgcaagagatccttgtgaccctcctggacaacctgaagtcacaaatatcacaagaaaatcagtgtcacttaaatggtctaaaccacattatgatggtggagctaagatcacaggatacattgttgaacgcagagaactaccagatggccggtggctgaagtgcaattatactaatatacaagaaacatactttgaagtaactgaacttactgaagatcagcgttatgaattccgggtttttgcaaggaatgctgctgactcagttagtgagccatctgaatccactgggcctattatagttaaagatgatgttgagcctccaagagttatgatggatgtcaagttccgagacgttattgttgtcaaagctggagaggtccttaagataaatgcagacattgcagggcgacctctgccagtaatttcctgggccaaggatggtatagaaattgaagaaagagcaagaacagaaatcatctcaacagacaatcatactttgttaacagttaaagactgtataagacgagacactgggcaatatgtactaacactgaagaatgttgccggcactcggtctgtggccgttaattgcaaagtacttgataagcctggtccaccagcaggaccacttgaaataaatggcctcactgctgagaaatgctctctttcctggggacgtccccaagaagatggtggtgcagatatcgactattacatcgtagaaaaacgtgaaacaagccaccttgcatggacaatatgtgaaggagagttacagatgacatcctgtaaagtaaccaagttactcaaaggcaatgaatatatatttagagtaactggtgttaataaatatggtgttggtgagcccctagagagtgtagctataaaggcactagatccatttacagttccaagtccacccacgtctttggaaattacttctgtgaccaaagaatctatgacactttgctggtcaagacccgagagtgatggaggtagtgaaatatctggatatataattgaaaggcgagagaaaaatagcctaagatgggtgcgtgtaaacaaaaaaccagtttatgatctaagagtgaaatcaacaggacttcgggaaggatgtgaatatgaatatcgtgtttatgcagaaaatgctgctggcctaagtcttccaagtgaaacctctcccttaattagggcagaagatccagtgttcctaccatctcctccatccaaacccaaaattgtggactcaggcaagacaactataactattgcctgggttaagccgctgtttgatggtggggccccgataactggatatactgtagaatacaaaaaatctgatgacactgactggaaaacttccattcagagcttacgagggacagaatatacaataagcggactaacaacaggagctgaatatgttttcagagtaaaatctgtcaataaggttggtgctagtgaccccagtgatagctctgaccctcagatagcaaaggaaagagaagaagaacctttatttgatattgacagtgaaatgaggaagaccttgattgtcaaggctggtgcctcatttaccatgactgtgcctttccgaggaagaccagtacccaatgtcttgtggagtaagccagacactgacctccgtactagagcttatgttgataccacagactcccgtacatcactgaccattgaaaatgccaacagaaatgactctggaaagtacacattaacaattcagaatgttttgagtgctgcttcactgaccttagttgtcaaagttttagataccccaggtcctccaaccaacattactgtgcaagatgtaaccaaagagtctgcagtgttatcctgggatgttcctgaaaacgatggtggagcaccagtgaagaattaccacatagaaaaacgtgaggccagcaagaaagcatgggtctctgtgaccaacaactgtaaccgcctctcctacaaagttaccaatttacaagaaggagctatctattacttcagagtctctggagaaaatgagtttggtgttggtataccagctgaaacaaaggaaggagtaaaaataacagaaaaaccaagcccacctgaaaaacttggagtaacaagtatatccaaagacagtgtttccctgacctggctgaagcctgaacatgatggcggaagcagaattgtacactatgtcgttgaagcactagaaaaaggacagaaaaactgggttaaatgtgcagtggcaaagtcaacccatcacgttgtttccggtctgagagagaattctgaatactttttccgagtgtttgctgaaaatcaagctggcctgagtgacccgagagagcttctgcttcctgttcttattaaggagcaactagaaccacctgaaattgatatgaagaatttcccaagtcacactgtatatgttagagctggttcaaaccttaaagttgacattccaatctctggaaaaccacttcccaaagtgaccttatcaagagatggtgtcccccttaaggcaaccatgagatttaataccgaaattactgctgagaacctgaccatcaatctcaaagaaagtgttacagctgacgctgggagatatgaaatcactgctgccaactccagtggtacaaccaaagctttcattaacattgttgtgctagacaggcctggtcctccaactggccctgttgttattagtgatataactgaagaaagtgtgactctcaaatgggagccacctaagtatgacggtggaagtcaagttaccaactacattctactcaaaagagaaacaagtactgcagtgtggactgaagtgtctgcaacagttgcaagaaccatgatgaaagtcatgaaactgaccacaggagaagaataccaattccgcatcaaggcagaaaaccgctttggcatcagtgatcatatagattcagcttgtgtgactgtcaaactaccatacacaacacctggaccaccatctacaccatgggtcactaatgttactcgagaaagcatcactgtgggctggcatgaaccagtgtcaaatggaggcagtgcagtcgtaggctatcacctggaaatgaaagacagaaacagtattttatggcaaaaagccaacaaactggtcatccgcacaactcacttcaaagtcacaacaatcagtgctggacttatttatgaattcagggtgtatgcagaaaatgctgctggagttggaaaacctagccatccttctgaaccagtcttggcaattgatgcttgtgaacccccaagaaatgttcgtatcactgatatttcaaagaactctgtcagcctttcatggcaacaaccagctttcgatggaggtagcaagattacaggctacattgttgagagacgtgaccttccagatggcagatggaccaaggccagcttcaccaatgttactgaaactcaattcatcatctctggcttgactcagaattcccagtatgaattccgtgtctttgctaggaatgctgttggttccattagcaatccatctgaggttgtagggcccattacttgcatcgattcttatggtggtcctgtaattgatttgcctctagaatatacagaagttgtcaaatacagagcaggtacatctgtgaagctcagagctggcatttctggcaaacctgcgcctactattgagtggtataaagatgataaagaattacaaaccaatgcactggtgtgtgttgaaaataccacggacctcgcatctatactcatcaaagatgccgatcgccttaatagtggatgctatgaattaaaactaaggaatgccatgggctcagcctcagccaccatcagagtacagatccttgacaaaccaggcccacctggtggaccaattgaatttaagactgtaactgctgagaagatcacccttctctggcggcctccagctgatgatggtggtgcaaaaatcactcactacattgtggaaaagcgtgagacaagccgcgttgtgtggtctatggtgtctgaacatttggaagagtgcatcattacaaccaccaaaattatcaaaggaaatgaatacatcttccgggtccgagccgtgaacaaatatggaattggcgagccactggaatctgattccgttgtagccaagaacgcatttgttacacctgggccaccaggcataccagaagtgacaaagattaccaagaattcgatgactgttgtatggagcaggccaattgcagatggcggtagtgatataagtggctatttccttgaaaaacgagacaagaagagcctaggatggtttaaagtactaaaagagactatccgtgacaccagacaaaaagtaacaggactcacagaaaacagtgactatcaatacagagtttgtgctgtaaacgctgctggacagggtccattttctgaaccatctgaattctacaaagctgctgatcctattgatcctccaggtccacctgctaagataagaatcgcagattcaaccaagtcatccatcacccttggctggagtaagcctgtctatgatgggggcagtgctgttactgggtatgttgtcgagataagacaaggagaggaagaggaatggactactgtctctaccaaaggagaggtcagaactacagaatatgtggtatccaacctgaaacctggagtcaattactacttccgggtatctgctgtaaactgtgctggacaaggagaacctatagaaatgaatgaacctgtacaagctaaagatatacttgaggcaccagagattgacctggatgtggctctcagaacttctgttattgccaaagctggtgaagatgtacaagtgttgattccctttaaaggcagacctccacctactgtcacatggagaaaagatgagaagaatcttggcagtgatgccagatacagcattgaaaacactgattcatcctcattactcaccattcctcaagttactcgcaatgatacaggaaaatatattctcacaatagaaaatggagttggtgaacctaagtcttcaactgtgagtgttaaagtgcttgacacaccagctgcctgccagaaactacaggttaaacatgtttctcgaggcacagtcactttgctctgggatcctcctctcattgatggaggatctccaataattaattatgtcattgaaaagagagatgccaccaagagaacatggtctgtcgtgtcacacaaatgttctagcacatccttcaagctaatagatttgtcggagaagactccattcttcttcagagttcttgcagaaaatgaaattggaattggggaaccctgtgaaactacagagccagtgaaggctgctgaagtaccagctcctatacgtgatctctcaatgaaagactcaacaaagacatctgtcatcctcagctggaccaaacctgactttgatggtggtagcgtcatcacagaatatgttgtagaaaggaaaggtaaaggtgaacagacgtggtcccacgctggcataagtaagacatgtgaaattgaggttagccaacttaaggagcagtcagtcctggagttcagagtgtttgccaaaaatgagaaaggactgagtgatcctgtcactattgggccaattacagtgaaagaacttattattacacctgaagttgacctgtcagatatccctggggcacaagtcactgtgagaattgggcacaatgtgcaccttgaattaccttataagggaaaacccaaaccatccatcagttggctgaaagatggcttgccactgaaagaaagtgaatttgttcgcttcagtaaaactgaaaacaaaattactttgagtattaagaatgccaagaaggagcatggaggaaaatacactgttattcttgataatgcagtgtgtagaattgcagtccccattacagtcatcacccttggcccaccatcaaagcccaaaggacccattcgatttgatgaaatcaaggctgatagtgtcatcctgtcatgggatgtacctgaagataatggaggaggagaaattacttgttacagcatcgagaagcgggaaacttcacaaactaactggaagatggtgtgttcaagtgttgccagaacgactttcaaagttcctaatctagtcaaagatgctgagtaccagtttagagtgagagcagaaaacagatacggagtcagccaaccacttgtctcaagcattattgtggcaaaacaccagttcaggattcctggtcccccaggaaagccagttatatacaatgtgacttctgatggcatgtcactaacttgggatgctccagtttatgatggtggttcagaagttactggattccatgttgaaaagaaagaaagaaatagcatcctctggcaaaaagttaatacatcaccaatctctggaagagaatatagagccactggactggtagaaggtctggattaccaattccgtgtatatgctgaaaattctgctggcctaagctcacctagtgacccaagcaaatttaccttagctgtttctccagtagacccacctggcactcctgactacattgatgtcacccgggaaaccatcacacttaaatggaacccaccattgcgtgatggaggcagtaagattgtgggctatagcattgagaaacggcaaggaaatgaacgctgggtgagatgcaactttactgacgtcagtgaatgtcagtacacagttacaggactcagtcctggggatcgctatgagttcagaataattgcaagaaatgctgttggaactataagcccgccctcacagtcttctggcattattatgacaagagatgaaaatgttccaccaatagtagagtttggccctgaatactttgatggtctcattattaagtccggagagagccttagaattaaagctttggtacaaggaagaccagtgcctcgagtaacttggttcaaagatggagtggaaatcgaaaagaggatgaatatggaaataaccgacgtacttggatccaccagcctatttgttagagatgctactcgggaccatcgtggtgtatacacagtggaagccaaaaatgcatctggttctgcaaaagcagaaattaaagtgaaagtacaagatacaccaggaaaagtagttgggccaataagattcaccaatattactggggagaagatgactctgtggtgggatgccccactcaatgacggttgtgctcccataacccactacatcattgaaaaacgggaaaccagcagacttgcctgggcactaattgaggataaatgtgaagcccaaagttacactgccattaaactaataaacggcaatgaataccaattccgtgtttctgcagttaacaagtttggtgttggcaggccacttgattctgatccagtggttgctcaaatacaatatactgttcctgatgcccctggcattccagaacctagcaacataacaggcaacagcattaccctgacatgggcaaggccagaatcagatggtggcagtgaaattcaacagtatatccttgaaagaagagaaaagaaaagcacaagatgggtaaaagtgatcagcaaacgaccaatctctgaaacaagattcaaagtcactggtctgacagaaggcaatgagtatgaattccatgtcatggctgaaaatgctgcaggagttggacctgcaagtggcatctcaagactcattaaatgtagagagcccgtcaacccaccaggtcctcccacagtggtcaaagtaacagacacatcaaagacaactgtgagcttagaatggtccaaaccagtgtttgatggtggcatggaaataattgggtatattattgaaatgtgtaaggccgacttaggagactggcacaaggtgaatgcagaggcatgtgtgaaaacaagatatacagtcactgatctacaagcaggtgaagaatacaaattccgagttagtgctatcaatggtgctggaaaaggcgacagctgtgaagtgactggcacaattaaagcagttgaccggttaacagctcctgagttagacatagatgcaaacttcaaacagactcatgttgttagagctggggccagtattcgcctcttcattgcctaccaaggtagacctactcctacagctgtgtggagcaaaccagactctaaccttagccttcgggctgatatccatacaacagattccttcagcaccctcactgtggaaaactgcaacagaaatgatgcagggaaatatacccttactgtggaaaacaacagtggtagtaagtcaatcacattcaccgtgaaagtgctagacactccaggcccacctggcccaattaccttcaaagatgtgacccggggatctgctacattgatgtgggatgcccctcttcttgacggtggtgcccgaatccatcattatgtggtagagaaacgagaggcaagtcgccgtagttggcaggttatcagtgaaaaatgcactcgtcagatcttcaaggtcaatgacctggccgaaggtgttccgtactatttccgtgtttctgcagtaaatgagtatggtgttggtgagccctatgaaatgccagaaccaattgtagccacagaacagcctgctccacctaggagacttgatgttgttgatactagcaaatcctccgcagtcttagcttggcttaaacctgaccacgatggaggcagccggatcactggctacctgcttgaaatgagacaaaagggatctgacttctgggttgaagctggtcacaccaaacagctaactttcacagtagagcgtcttgttgagaaaactgaatatgaattccgtgtgaaggccaagaatgatgctggctatagtgaacccagagaagccttctcttctgtcatcattaaggagcctcaaatcgagcccactgctgacctcactggaattaccaatcagcttataacttgcaaagcaggaagcccatttaccattgacgtaccaatcagtggtcgtcctgcccccaaagtaacatggaaactggaagaaatgagacttaaagagacagatcgagtgagcattacaacaacaaaagacagaaccacactgactgtaaaggacagcatgagaggtgactctggaagatacttcttgaccctggaaaatacagctggtgttaaaacatttagcgtcacagttgtggtcattggaaggccaggtccagtaaccggccccattgaggtctcatctgtctcagctgaatcgtgtgtcctgtcatggggagaacctaaagatggaggaggcactgaaattactaattacatagttgaaaagcgtgaatcgggtacaacagcttggcagcttgtcaattccagtgtcaagcgcactcaaattaaagtcactcatctcacaaaatacatggaatattctttccgtgtcagttcagagaacagatttggtgtcagcaaacctctagaatcagcaccaataattgctgaacatccatttgtcccaccaagcgctcctaccagacctgaggtctaccatgtgtctgccaatgccatgtctattcgttgggaagaaccctaccacgatggtggcagtaaaatcattggctactgggttgagaagaaagaacgtaatacaattctttgggtgaaagaaaacaaagtgccatgcttagagtgcaactacaaagtaactggtttagtagaaggactggaatatcagttcagaacttatgcactcaatgctgcaggtgttagcaaggccagcgaagcttcaagacctataatggctcaaaatccagttgatgcaccaggcagaccagaggtgacagatgtcacaagatcaacagtatcactgatttggtctgccccagcgtatgatggaggcagcaaggttgtgggctacatcatagagcgtaagccagtcagtgaggtaggagatggtcgctggctgaagtgcaactacaccattgtatctgacaatttcttcaccgtgactgctctcagtgaaggagacacttatgagttccgtgtgttagccaagaatgcagcaggcgtaattagcaaagggtctgaatctacaggccctgtcacttgccgagatgaatacgctccacccaaagccgaactggatgcccgattacacggtgatctggttaccatcagagcaggttctgatcttgttctggatgctgcagttggtggcaaacctgaacccaaaattatctggaccaaaggagacaaggagctagatctctgtgaaaaagtctctttgcagtatactggcaaacgagcaactgctgtgatcaagttctgtgacagaagtgacagtggaaaatacactttaacagtgaaaaatgccagcgggaccaaggccgtgtctgtcatggtcaaagtgcttgattcccctggcccatgtggaaagctcaccgtcagcagagtaacacaggagaagtgcactttagcctggagccttccgcaggaagacggaggagcagaaatcactcactacatcgtggaaagacgcgagactagcaggctcaactgggtgattgttgaaggcgaatgcccaaccctatcctatgtcgttaccaggctcatcaagaacaatgagtacatattccgagtgagggcagtaaacaaatatggccctggtgtgcctgttgaatcagagccaattgtagccagaaactcattcactattccatcaccacccggcatacctgaagaagttgggactggcaaagagcatatcatcattcagtggacaaaacctgaatctgatggtggcaatgaaatcagcaactacctagtagacaaacgtgagaagaagagcctgcgctggacacgtgtcaacaaagactatgtggtgtatgataccaggctgaaggtgaccagcctgatggagggttgtgattaccagttccgggtgaccgcagtgaatgcagctggtaacagtgagcccagcgaagcttccaacttcatctcatgcagagaaccatcatatacccctggaccaccttctgctccaagagttgtggataccaccaaacacagcattagtttggcatggaccaaacccatgtacgatggtggtactgacattgtaggatatgttctggaaatgcaagagaaggacactgatcagtggtaccgagtgcataccaatgccacaataagaaatactgaattcactgtgccagaccttaaaatgggccagaaatattccttcagagttgctgccgtgaacgtgaagggtatgagcgaatacagcgaatcaattgctgaaattgagcccgtggaaagaatagaaataccagatcttgagcttgcagatgatctaaagaagactgtgaccatcagggctggggcctccttgcgcttgatggtgtctgtatctggaagaccacctcctgtcataacgtggagcaagcagggcattgaccttgcaagccgggcaattattgacaccactgagagctactcattgctaatagtggacaaagttaatcggtacgatgctggaaaatacacaattgaagctgaaaaccaatctggcaagaaatcagcaacagtccttgttaaagtctatgatactcctggtccctgtccttcagtgaaagttaaggaagtatcaagagattctgtgactataacttgggaaattcccacgattgatggtggagctccagtcaacaattacatcgttgagaagcgtgaagctgctatgagagcattcaaaacagtaactaccaaatgcagcaagacactttacagaatttctggacttgtagaaggaaccatgtactatttcagagtgctgccagaaaatatttatggcattggagaaccttgtgaaacatctgatgcagtactggtctcagaagtgcctttggtgcctgcaaagctagaagtggtcgatgtcaccaaatccactgttacccttgcctgggaaaaaccactctacgatggtggtagccgactcactggatatgttctcgaggcctgcaaagctggcacagagagatggatgaaggttgtcaccttaaaacccacagtcctagagcacactgttacttccttaaatgaaggtgaacaatacttatttagaataagggcacaaaatgagaaaggtgtgtcagaaccaagagagactgtcacagccgtgactgtacaagacctcagagtgttgccaacaatcgatctttctacaatgcctcagaagaccatccatgtcccagctggcagaccagtagagctggtgatacctattgctggccgtccacctcctgctgcttcctggttctttgctggttctaaactgagagaatcagagcgtgtcacagttgaaactcacactaaagtagctaaattaaccatccgtgaaaccactatcagagatactggagaatacacacttgaattgaagaatgttaccggaactacttcagaaaccattaaagttatcattcttgacaagcctggtccaccaacaggacctattaagattgatgaaattgatgctacatcaattaccatttcctgggaaccacctgaattggacggtggtgctccactgagtggttatgtggtagaacaacgtgacgctcatcgtccaggatggctgcccgtttctgaatcagtgactaggtccacgtttaagtttaccagactcaccgaaggaaatgagtatgtgttccgtgtggctgcaacaaaccgcttcgggattggctcttacttgcagtctgaggtcatagagtgtcgcagcagcatccgtattcctggacccccagaaacattacagatatttgatgtttcccgtgatggcatgacacttacttggtacccaccagaggatgacggtggctcccaagtgactggatatattgtggagcgcaaagaagtgagagcagatcgatgggtccgtgtaaataaagtacctgtgacaatgacacggtaccgctccactggccttactgaaggcttagaatatgaacaccgtgtcacagccattaatgcaagagggtctgggaaaccaagtcgtccttccaaacccatcgttgccatggatccaattgctcctccaggaaagccacaaaacccaagagttactgatacaacaaggacatcagtctccctggcctggagtgttccagaagatgaaggaggatctaaagtcacaggctacttgattgaaatgcaaaaagtagatcaacatgaatggaccaagtgtaacaccactccaaccaagattcgagagtatactctaacacacctacctcagggtgcagaatacaggttccgcgtcctagcttgtaatgctggtggacctggtgagcctgctgaggtaccaggaacagtcaaagtcactgaaatgcttgaatatcctgattatgaacttgatgaaagataccaagaaggtatctttgtaaggcaaggtggcgtcatcagacttaccataccaatcaaaggaaaaccattcccaatatgtaaatggaccaaggaaggccaggatattagtaagcgtgccatgattgcaacatctgaaacacacactgagcttgtgatcaaagaagcagacaggggtgattctggcacttatgacctggttctggaaaataaatgtggcaagaaggctgtctacatcaaggtcagggtgataggaagtcccaacagtccagaagggccactggaatatgatgacatccaagtccgctctgtgagggtcagctggagacctcctgctgatgatggtggtgctgacatcttaggctacatcctcgagagacgagaagtgcctaaagccgcctggtataccattgattccagagtccgaggtacatctctggtggtaaaaggcctcaaagagaatgtagaataccatttccgtgtttcagcagaaaaccagtttggcataagcaaacccttgaaatctgaggaaccagtcacaccaaaaacaccattgaatcctccagaacctccaagcaatcctccagaagtactcgatgtaaccaagagttctgttagcttgtcctggtcccggcccaaagatgatggtggttctagagtcacaggctactacatcgaacgcaaagagacatccactgacaagtgggtcagacacaacaagactcagatcaccaccacaatgtacactgtcacagggcttgttcccgatgctgagtatcagttccgcatcatcgcacagaatgatgttggcctgagtgagaccagccctgcttctgaaccagttgtttgcaaagatccatttgataaaccaagccaaccaggagaacttgagattctttcaatatccaaagatagtgtcactctacagtgggagaaacctgaatgtgatggtggtaaagaaattcttggatactgggttgaatatagacagtctggagacagtgcctggaagaagagcaataaggaacgtattaaggacaagcaattcacaataggaggtttgctggaagctactgagtatgaattcagggtttttgctgagaatgagactgggctgagcagacctcgcagaactgctatgtctataaagactaaactcacatctggagaggccccaggaatacgcaaagaaatgaaggatgttaccacaaaattgggtgaagctgctcaactctcatgccagattgttggaaggcctcttcctgacattaaatggtacagatttggtaaagagctcatacaaagccggaaatacaaaatgtcttcagatggacgcacacacactcttacagtaatgacagaggaacaggaagatgaaggtgtttatacctgcatagccaccaatgaggttggagaagtagaaaccagtagtaagcttctcctgcaagcaacaccgcagttccatcctggttacccactgaaagagaaatattatggagctgtgggttccacacttcggcttcatgttatgtacattggtcgtccagtacctgccatgacttggttccatggtcagaaacttttgcaaaactcagaaaacattactattgaaaacactgagcactatactcatcttgtcatgaagaatgtccaacgtaagactcatgctgggaaatacaaagtccagctcagcaatgtttttggaacagttgatgccatccttgatgtggaaatacaagataaaccagacaaacctacaggaccaattgtgatcgaagctctattgaagaactccgcagtgatcagctggaaaccacccgcagatgacggaggctcctggatcaccaactatgtggtggaaaaatgtgaggccaaggagggggctgaatggcaattggtgtcttcagccatctcagtgacaacctgtagaattgtgaacctcacagaaaatgctggctattacttccgggtttcagctcagaacactttcggcatcagtgaccctctagaagtgtcctcagttgtgatcattaagagtccatttgaaaagccaggtgctcctggcaaaccaactattactgctgtcacaaaagattcttgtgttgtggcctggaagccacctgccagtgatggaggtgcaaagattagaaattactaccttgagaagcgtgagaagaagcagaataaatggatttctgtgacaacagaagaaattcgagaaactgtcttttcagtgaaaaaccttattgaaggtcttgaatacgagtttcgtgtgaaatgtgaaaatctaggtggggaaagtgaatggagtgaaatatcagaacccatcactcccaaatctgatgtcccaattcaggcaccacactttaaagaggaactgagaaatctaaatgtcagatatcagagcaatgctaccttggtctgcaaagtgactggtcatccaaaacctatcgtcaaatggtacagacaaggcaaagaaatcattgcagatggattaaaatataggattcaagaatttaagggtggctaccaccagctcatcattgcaagtgtcacagatgatgatgccacagtttaccaagtcagagctaccaaccaagggggatctgtgtctggcactgcctccttggaagtggaagttccagctaagatacacttacctaaaactcttgaaggcatgggagcagttcatgctctccgaggtgaagtggtcagcatcaagattcctttcagtggcaaaccagatcctgtgatcacctggcagaaaggacaagatctcattgacaataatggccactaccaagttattgtcacaagatccttcacatcacttgttttccccaatggggtagagagaaaagatgctggtttctatgtggtctgtgctaaaaacagatttggaattgatcagaagacagttgaactggatgtggctgatgttcctgacccacccagaggagtcaaagttagtgatgtctcacgagattctgtcaacttaacatggactgagccagcctctgatggtggcagcaaaatcaccaactacattgttgaaaaatgtgcaactactgcagaaagatggctccgtgtaggacaggcccgagaaacacgttataccgtgatcaacttatttggaaaaacaagttaccagttccgggtaatagctgaaaataaatttggtctgagcaagccttcagagccttcagaaccaaccataaccaaagaagataagaccagagctatgaactatgatgaagaggtagatgaaaccagggaagtctccatgactaaagcatctcactcttcaaccaaggaactctatgagaaatatatgattgctgaagatcttgggcgtggtgagtttggaattgtccatcgttgtgttgaaacatcctcaaagaagacatacatggccaaatttgttaaagtcaaagggactgatcaggttttggtaaagaaggaaatttccattctgaatattgctaggcatagaaacatcttacacctccatgaatcatttgaaagcatggaagaattagttatgatctttgagtttatatcaggacttgacatatttgagcgcattaacacaagtgcttttgaacttaatgaaagagaaattgtaagttatgttcaccaggtctgtgaagcacttcagtttttacacagtcataatattggacactttgacattagaccagaaaatatcatttaccaaaccagaagaagctctaccattaaaatcatagaatttggtcaagcccgtcagctgaaaccaggggacaacttcaggcttctattcactgccccagaatactatgcacctgaagtccaccagcatgatgttgtcagcacagccacagacatgtggtcacttggaacactggtatatgtgctattgagtggtatcaacccattcctggctgaaactaaccaacagatcattgagaatatcatgaatgctgaatatactttcgatgaggaagcattcaaagagattagcattgaagccatggattttgttgaccggttgttagtgaaagagaggaaatctcgcatgacagcatcggaggctctccagcacccatggttgaagcagaagatagaaagagtcagtactaaagttatcagaacattaaaacaccggcgttattaccacaccctgatcaagaaagacctcaacatggttgtgtcagcagcccggatctcctgtggtggtgcaattcgatctcagaagggagtgagtgttgctaaagttaaagtggcatccattgaaattggcccagtttctgggcagataatgcatgcagttggtgaagaaggaggacatgtcaaatatgtatgcaaaattgaaaattatgatcagtctacccaagtgacttggtactttggcgtccgacagctggagaacagtgagaaatacgaaatcacctacgaagatggagtggccatcctctatgtcaaagacattaccaaattagatgatggtacctacagatgcaaagtagtcaatgactatggtgaagacagttcttatgcagagctatttgttaaaggtgtgagagaagtctatgactattactgccgtagaaccatgaagaaaattaagcgcagaacagacacaatgagactcctggaaaggccaccagaatttaccctgcctctctataataagacagcttatgtaggtgaaaatgtccggtttggagtaactataactgtccacccagagcctcatgtaacatggtataaatcaggtcagaaaatcaaaccaggtgacaatgacaagaagtacacatttgagtcagacaagggtctttaccaattaacaatcaacagtgtcactacagatgatgacgctgaatatactgttgtggcaaggaacaaatatggtgaagacagctgtaaagcaaagctgacagtaaccctacacccacctccaacagatagtaccttaagacccatgttcaaaaggttactggcaaatgcagaatgccaagaaggccaaagtgtctgctttgagatcagagtgtctggcatccccccaccaacattaaaatgggagaaagatggtcagccactgtccctcgggcctaacattgaaattatccatgaaggcttggattattatgctctgcacatcagggacactttgcctgaagacacgggttattatagagtcacagccactaacacagctgggtccaccagctgccaggctcacctacaagtggaacgcctgaggtacaagaaacaggaattcaagagtaaggaggagcatgagcgacacgtacaaaaacaaattgacaaaaccctcagaatggctgaaattctttctggaactgaaagtgtaccactgacacaggtagctaaagaggctctgagagaagctgctgtcctttataaaccggctgtaagcaccaagactgtaaaaggggaattcagacttgagatagaagaaaagaaggaggagagaaaactccggatgccttatgatgtaccagagccacgcaagtataagcagactaccatagaagaagaccaacgcatcaagcagttcgtgcccatgtctgacatgaagtggtataaaaagatacgtgatcagtatgaaatgcctgggaaacttgacagagttgtacagaaacgacccaagcgcatccgcctttcaagatgggaacagttctatgtgatgcctcttccacgcattacagatcaatacagacctaaatggcgtattcctaaactgtcccaagatgatcttgagatagtgagaccagcccgccggcgtacaccttctcctgattatgacttttactaccgacctagaagacgttctcttggggacatctctgatgaagaattactcctccccattgatgactacttagcaatgaaaagaacagaggaagagaggctgcgtcttgaagaagagcttgagttaggtttttcagcttcacccccaagtcgaagccctccacactttgagctttctagcctacgttactcttcaccacaagctcatgtcaaggtggaggaaacaagaaaagacttcaggtattcaacctatcacatcccaacgaaggctgaagctagtacaagttatgcagaactgagggaacggcatgcccaggctgcgtacagacagccaaagcaacggcaaagaatcatggctgagagggaggatgaagagttgcttcgcccagttacgaccacccagcatctctcagaatacaaaagcgaacttgacttcatgtcaaaggaggaaaagtctagaaagaaatcaaggcgacaaagagaagtgacagaaataacagaaattgaggaagaatacgaaatctcaaaacatgctcaaagagaatcatcctcatctgcgtctagactactgagacgacggcgctccctgtctccaacttatattgagttaatgaggccagtgtctgagctgatccggtcacgtccacaaccggctgaggaatacgaagatgacacagaaagaaggtcacctactccagagagaactcgcccacgatcccccagccctgtgtctagtgagagatcactctcgagatttgagaggtctgcaagatttgatatcttttccaggtatgagtccatgaaagctgctttaaaaactcagaagacatcagaaaggaagtatgaagttttgagtcagcagcctttcacactggaccatgcccctcgaatcacactgagaatgcgctcgcacagggtaccatgtggccaaaatacacgttttattttaaatgttcagtctaagccaactgccgaggttaaatggtaccacaatggtgtggaactccaagaaagcagtaagattcattacaccaacacgagtggagtcctcaccctggaaattctggactgtcatactgatgacagtggaacctaccgtgctgtgtgcaccaactacaagggcgaagcttctgactatgcaacgttggacgtgacaggaggggattataccacctatgcttcccaacgcagagatgaagaggtccccagatctgttttccctgagctgacaagaacagaggcgtatgctgtttcatcatttaagaaaacatctgagatggaagcttcgtcttctgtcagggaagtgaaatcacagatgacggagacaagggaaagtctctcctcatatgaacactctgcatctgcagaaatgaaaagtgctgcattagaagaaaagtcactggaagaaaaatccacaaccagaaagatcaagacgactttggcagcaagaattctaacaaagccacggtccatgaccgtctacgagggcgagtctgcaaggttttcttgtgacaccgatggtgagccggtaccaactgtgacctggctgcgtaaaggacaagtgctaagtacttctgcccgccaccaagtgaccaccacaaagtacaaatcaacctttgagatctcttcagtccaggcttccgatgagggcaattacagcgtggtggtagaaaacagtgaagggaaacaagaagcagagttcactctgactattcaaaaggccagggtaactgaaaaggctgtgacatcaccaccaagagtcaaatccccagagcctcgggtgaaatccccagaagcagttaagtctccaaaacgagtgaaatctccagaaccttctcacccgaaagccgtatcacccacagagacaaaaccaacaccaacagagaaagttcagcacctcccagtctctgccccaccaaagattactcagttcctgaaagcagaagcttctaaagagattgcaaaactgacctgtgtggttgaaagcagtgtattaagggcaaaagaggtcacctggtataaagatggcaagaaactgaaggaaaatgggcatttccagtttcattattcagcagatggtacctatgagctcaaaatcaataacctcactgaatctgatcaaggagaatatgtttgtgagatttctggtgaaggtggaacgtctaaaaccaacttacaatttatggggcaagcctttaagagtatccatgagaaggtatcaaaaatatcagaaactaagaaatcagatcagaaaaccactgagtcaacagtaaccagaaaaactgaaccaaaagctcctgaaccaatttcctcaaaaccagtaattgttactgggttgcaggatacaactgtttcttcagacagtgttgctaaatttgcagttaaggctactggagaaccccggccaactgccatctggacaaaagatggaaaggccattacacaaggaggtaaatataaactctctgaagacaagggagggttcttcttagaaattcataagactgatacttctgacagtggactttatacttgtacagtaaaaaattcagctggatctgtgtcctctagctgcaaattaacaataaaagctataaaagatactgaggcacagaaagtctctacacaaaagacttctgaaattacacctcagaagaaagctgttgtccaagaggaaatttcccaaaaagccctaaggtctgaagaaattaagatgtcagaggcaaaatctcaagaaaagttagccctcaaagaggaagcttcaaaggttctgatttctgaagaagtcaagaaatcagcagcaacctccctggaaaaatccattgtccatgaggaaatcactaaaacatcacaggcatcagaagaagtcagaactcatgctgagattaaagcattttctactcagatgagcataaacgaaggtcaaagactggttttaaaagccaacattgctggtgccactgatgtgaaatgggtactgaatggcgtagagcttaccaactctgaggagtaccgatatggtgtctcaggcagcgatcagaccctaaccatcaagcaagccagtcacagagatgaaggaatcctcacctgcataagcaaaaccaaggaaggaatcgtcaagtgtcagtatgatttgacactgagcaaagaactctcagatgctccagccttcatctcacagcctagatctcaaaatattaatgaaggacaaaatgttctctttacttgtgaaatcagtggcgagccatcccctgaaatcgaatggtttaaaaacaacctgccaatttctatttcttcaaatgtcagcataagccgctccagaaatgtatactcccttgaaatccgaaatgcatcagtcagcgacagtggaaagtacacaattaaggccaaaaatttccgtggccagtgttcagctacagcttccttaatggtccttcctctagttgaagaaccttccagagaggtagtattgagaacaagtggtgacacaagcttgcaaggaagcttctcgtctcagtcagtccaaatgtctgcctccaagcaggaggcctccttcagcagtttcagcagcagcagtgctagcagcatgactgagatgaaatttgcaagcatgtctgcccaaagcatgtcctccatgcaagagtcctttgtagaaatgagttccagcagctttatgggaatatctaatatgacacaactggaaagctcaactagtaaaatgcttaaagcaggcataagaggaattccgcctaaaattgaagctcttccatctgatatcagcattgatgaaggcaaagttctaacagtagcctgtgctttcacgggtgagcctaccccagaagtaacatggtcctgtggtggaagaaaaatccacagtcaagaacaggggaggttccacattgaaaacacagatgacctgacaaccctgatcatcatggacgtacagaaacaagatggtggactttataccctgagtttagggaatgaatttggatctgactctgccactgtgaatatacatattcgatccatttaagagggcctgtgcccttatactctacactcattcttaacttttcgcaaacgtttcacacggactaatctttctgaactgtaaatatttaaagaaaaaaaagtagttttgtatcaacctaaatgagtcaaagttcaaaaatattcatttcaatcttttcataattgttgacctaagaatataatacatttgctagtgacatgtacatactgtatatagccggattaacggttataaagttttgtaccatttattttatgacattttacaatgtaagttttgaaactaactgttggtaggagaaagtttcttatggaacgaataccctgctcaacatttaatcaatctttgtgcctcaacatactgttgatgtctaagtatgcctcagtgggttgagaaaatccccattgaagatgtcctgtccacctaaaagagaatgatgctgtgcatatcacttgatatgtgcaccaatacctactgaatcagaaatgtaaggcattggtgatgtttgcatttaccctcctgtaagcaacactttaacgtcttacattttctctgatgatgtcacacaaaattatcatgacaaatattaccagagcaaagtgtaacggccaacactttgttcgctcattttacgctgtctctgacataaggagtgcctgaatagcttggaaaagtaacatctcctggccatcccttcatttaaccaagctattcaagtattcctatgccagagcagtgccaactcttggaggtcccagagtgcagccaatgcctttgtgtggtagttctaaattttaattgcacctgaaaaacctgggcacctaagcaatgagccacagcaaaaagtaaagaacaacaacaaaataaagctgttgttaaattttaaacaatattactaattgcccaaaatgtcaatttgatgtagttcttttcatgcaagtataaattcaattgttagttataattgttggacctccttgagatagtaacaacaaaataaagcaagctatctgcacctcaaaa

SEQ ID NO: 12701 - DNA, 1284 bp, Homo sapiens
agcgcccaccagtccctcagccaaagagcacactggaggcggagaggcagcatccatcagcccgctccccgcctccaggacagagcctcggtctgcatgggggtgacaggtgcccatggatttccatgctgcggcaaagggtcagtggaggttgcagagatgcgagatgacttaagtcaacaccagatacaagaggaacaggagctggaggcagacatgctagagcagaagccccaactccaagtggacctggacctggacccagacccagacccagacccagaactggagatcggacaggtgccggctttactggagtcagagctatacccagccctcaagcttgaagctgagctggacacggaagccaactcgaacgaggagtctgactttgaagaacccatgcagctggtatgcaagatagagtccgcccactccaacatggggctgcccacgccacagaccttcagaccgtggagtctgaattcaaactgccggagtttcacggaggagaaccacgtgtctgcctgccatcactccatcagtgcgcagacctccaagcacctcttctgggcaaacaagctcatccaggcctcagagcacagcctgcagcgggccatcaacatgcagctcaacaatggcagcgcaggccagcccatcagatccccgctccgggaggccatccccaccaacgccctgtgctccgaggagcagctccagatccctgatgcccactcagctcctccaaccacaagctcccaggcaccaagccccctcctgtcctcagatctcccgccacccattgacctgacagagctaatcacctttgcatcttccctggccatggcctcctccagcaggatggacctgcccagtttggaacacatgatgaaagctccaccccaggaggctctggagccttccacagagcccctcctgaccactgtggaggagcgagagccagaaaatcacgcagagaccctgccagagaaaccacgcgaagccagagcaccactgaaatcttggagtcaggaagacaagaacttcgctcaatcttactttgacttcagcaagccggggatcaagagggccaccatcaaagggcaaatccagcttctccagtcaccagccacgtcccctctgctgcagggaagcaaggaagactcagtgccgccaggaaaagagaaagagaatccattattggtgaaaatccattttaagctgtcagcccccacaatcccagagaaatgactagacagaaccaataaagcctccagtgctggc

SEQ ID NO: 12702 - DNA, 6485 bp, Homo sapiens
tgcagccatgctgaatcactgttgctgatcagatttcccactggtctgctgggagaatcaagaacagaactaggatccccgagtgcatacacagttcagcagctaccaccctggctgggcctcacacaatggagggtgaaagtgtcaagctgagctcccagactctgatacaggctggggatgatgagaagaaccagaggacgatcactgtcaaccctgcccacatggggaaagcattcaaggttatgaatgaactgcggagtaaacagctgttgtgtgacgtgatgattgtggcagaagatgtcgagatagaagcccaccgtgtggtcctggcagcctgcagcccctacttctgtgcgatgttcacaggtgacatgtctgagagtaaagccaaaaagatagaaatcaaggacgtggatgggcagacgctgagtaagctgattgactacatctatactgctgaaatcgaggtgactgaagagaatgtccaggtgctgctcccggcagccagcttgctgcagctcatggatgttcggcagaactgctgtgacttcctgcagtctcagttgcatcccaccaattgcctgggcatccgtgcgtttgcagatgtacacacctgcactgaccttctgcagcaggccaatgcctacgcagagcagcactttccagaggtgatgctaggagaagaatttcttagcctgagtctggaccaggtgtgcagcttgatatccagcgacaagctgaccgtttcttcagaagagaaggtgtttgaagctgtgatctcatggatcaattatgagaaagaaaaccgtttagagcacatggcaaagctgatggaacatgtccgacttcctctcttacctagggactacctagtccaaacggttgaagaagaagctttgataaagaataacaacacctgtaaagacttcctcattgaggccatgaaataccatctcctccctctggatcagagactattgattaagaacccaaggaccaagcccaggactccagtcagccttcccaaggtcatgattgtggttggcggccaggcacccaaggcaatccgcagtgtggagtgctatgatttcgaggaggaccggtgggatcagattgctgagcttccttccagaagatgcagagcaggtgtggtgttcatggctggccacgtgtatgccgtgggagggtttaatggctcactgcgggtgcggacagtggatgtgtatgacggcgtgaaggaccagtggacgtccattgccagcatgcaggagcgccggagcacactgggcgcagcggtgctcaatgacttgctctacgcagtgggaggctttgatggcagtactggcctagcatcggtggaagcctacagctacaagaccaacgagtggttctttgtggccccgatgaacacgcggcagagcagtgtgggtgtgggcgttgtggaggggaagctatatgctgttgggggttatgatggagcttcccgccagtgtctgagcactgtggaacagtacaacccagcgaccaatgaatggatatacgtggcggacatgagcacccgccgcagtggcgcaggggttggagtgcttagcggacagctgtacgccacaggtgggcatgatgggcctttggtgaggaagagcgttgaggtttacgatcctggaacaaatacctggaagcaagtggcagacatgaacatgtgccggcgcaacgcaggggtctgtgcagtaaatgggctcctgtatgtggttggaggggatgatggatcctgcaacttggcttcggtggagtactacaatcctgtcactgacaaatggacgctgcttccaacgaacatgagcacggggcggagctatgcaggtgttgccgtgattcacaagtccttgtgacccaaactcctactgccaggaggtggaggaaggagcaggtgctgcctgtgactctgaacagcaggaccttggtgactggattcaacttgcttgggagggtctgtgctgctgtgagaaccgctctcctctgacttggcagactggtgttgttcatcgcagtgtggacaccattacccacccccgttcccctgaggtgctctggcctatgccctgagcaaggggggtcttgacatccccaggcagcacctttgggctttgttttggtgtttctacagggacaatacagaccctggagtgtgtgtgtgtgtgtgtgtagaccatggtgtttctctatgtttctctaagttggggggtgagcgtgtgtgacagtctactggatttctttactactgatcctttcgctgtgttaaaaatcaagtcacagagacctctcttctggatttgtcccatggggaccctgagactactaaagctgctttcttctgaaggtccagttggacagtctgggaatgtccagaaataaccagtgagaggggcagttctctggccacacccacttatgtactttaactactgtgactttgtctgcagaagagctggaaaattctcgaagctgcaccgtgtcctctgtgtgctagaataagggacaaatgggttccctgtgcttctcagctcactgtttttccttgagttctcctacaggaagcagatgagaactgcccagtcttcaggtttaggccattggtctttgatgtcatagattccaggcctgggaggtgttatgtctcttcagctgggaaaactagctcttcagagaagcctcgggtaacactgaaaaacaaaacaaaacaaaacaaaaacaggaaaaaaacaaaaaaccaaagtggtaaggattcagttcctgcctataatggtctcagagagggtcctacttttaggttttcccaggacaggacagtccccatttatacttattatcccagtttaattattcacagcaccccattttactcagaagtgttctggtctggaggataaataagaggtcaccctcctccagacccaaagatagatttgtgcctgtgttggatggggtcgtgtgtgattcagatggacattggatggcttcaaaggaatataccactagagctggcccttggcactttgtgacagtggtcaagtctgtctaatgtccttgtcttctttttcttgtgctttccccctattccagggtgtgcaccctctccccaacccccaagaaccccactactgctttccctgtgaggtaggagatatcagtgggtcttggatttgaggcttcctaagatgtgcttgcattttaaaaagggagcttggtgagagctttgctaattcacaggtaaaaattattaacaatagaacttcaagcatcttgaggagcgggcatttgagggggcatggagtaatttgtatttaaaaaaccttaaagttgtgctgttcctaaactagcaaattgctcatgctgaaatttctggcataagcaggggaagtcttgtgtctggagaatagtctcataccttgcagtctgggacaccctccctactttgagaatccacctacaggaagccaaggaactttataaatcctgatgttggacttctgatacgactgggctacttccaagcaggtgctgcaggagattggcatcccccagcccctgcagttagaaaccccgaagtcttcccagccagtgagccactttgtgtatttactgtatatttattgtgccctaaatgtgcaactctcctaaagacaaaacttctctttctgatgttaagcacatgttacttcaacaagatgcttggagaacaacaaggtacccagaatttttagaagccttcagaagaggctaaaatatccagctttgggggacctggaagaaatgtctccaaaggaagcaaggcatgttttagttgagtgctctggtctcactatgaagtggggatgactgtggcttcataactctacctggctgtgggttggaagctgatggaatgagaaatgtcctttctccttctctgaggaaattttgagacttgtttcggtgtgtctgtgtgatggggatgaggctggggttgggatctgatgtatgccattcacagaagctctcaatttcagatgataggtgaattccctgcccctcccccaccactgagaagctagactttcatgcgggagaggctacttttatgtgtcgtcttccggggaagggtccctccactgaaagctagccagtcatgttttctgtttttggatttttgcaattggtttcacctcatgtctccctccctacaaagcactgcctctactgggcgtgctgccaaggccatgtgcactccatcctcatgtatcctttttcacggggaccagaacactggtacgtcatcaccaaagccaatctgctctagctgcccacagatgccaccaaaacctgctatctcttcatcaccaggtacgattctctttccacagtggacacagcaggctattttctagtttgtgctggtcacgtggtagatgaagcctcttactgccccacttagggtggccacggctgcttgtgaatgcagctttgccagtggcatatctgtcatctgattgcggtggtgaaatggaattgaggcccaaggttagaagcagccgagacgccacttggatactgatttgaacaatgtagaagtcagattctgaattccaaagttatttctcataagtacccaatggcatctctccatctacaaagttgcagtattatgcaaataaaactgacctcattttctgctatgcaataagaatacttaattctagttcccgacaagccagttgcaatatcccctaagatgctttttgagctgtcttactttgatatctgttgtgtaacgtttgtatatttctgagccagatcctttcaaagattgcctttttataaaattgaagctatagcttttaggctaaaattttaacgtagatatttttataagatatttttttcaagagtttgaatcgctttttattgtccatggtaatgaaatgttgtgttctttgcatcattcactctcaaacgtagttcatgcctgtagctctcttccttttgtttctcacccttcagaaacatatttttcagtagctccaggtagatgagcctttttttttttttttttaaataccatattcaagggagtctgctgaattttaaaacgcagtcactggtgtttcttgaattgctagggactgatgttatgttcgactcagcacttgcccgtctgtattgattgtgtctttttttttttttttggagtctgctttctgtgggggtgaggccgggctgtctcgtggtggctcccactgacgggcactgagcctggtaccctgtggcatggagaagcctcagggaaaggcctgcccccccagcacatactcccatagtgtcctaggtccagccgaccattccttattctcttctatctccttgttgatctgaagcttccaatagcttgaggcctttgctgctggatgatgccctttttgggagcatcttgtctctaacctttaaaagaggggtcaatcctcatgatccctgtgtgttaagcatatgctttgcaggtgctcacactacacttacaacttgcttcttgagctatgtctctactccaggctctgttttgtgtatttatctgccatttgcatcatggtttttaaaatttattattattattattattgttgggacaggtgccatttaaattgcctccatgctccccatttgcacctagctggatcaagttgggaggctgagcaaactcatattccagttagttggagtttttaaaggctctgtttgcctggagaagcaaggaggttagaatgtaatttttttaagcgtttgcactatttagagtcctaagcccctcatgttcagctgtgctgtgtttctactgaccaagcaggagagccagcagcacttccagcatttgggaatggaagagatttcttctgtagtggataattacagcctcatagcccctgtgcagccttcgtcatgggactcagtgactcatggatatagcatcagccatggcaggaatgcacaggactgtggcatttgcagcatcaaatcaccctagtgccatgtttggttatgagattgtaaattattcgctcccccgtcctcccctcccctcattttcagtggcaatagaggacccttgttgtacttcttgtttaatttgcatattatgtgtaaaatgctttcgttgaaagaaaactgaagacactgaatgtgtatgtctgtgtgggtgctctgtccctgtggttgtcatagccagtcagacttgatcactgacaccccgtacaacatattgcataggtaagatcctcgatctggtgttctctgcgtggctgttagggactgtatatcttgtaaaagaacacttgtcacatgcttgatcagttacagcaatagctgaagaaacatttcctcaaatgtattattttaacaggaatcatgttctaatttcccatcctttaattttaataaaagctgaactgtgtgaa

SEQ ID NO: 12703 - DNA, 9126 bp, Homo sapiens
ccagagccccctcgccccaaaggtcactgggactatttgtgcgaagagatgcagtggctctctgctgactttgctcaggagcgccgttggaaacggggtgtggcccggaaggtggtgcgcatggtgatccggcaccacgaggagcagcggcagaaagaggaacgggcccggagggaggagcaggccaagctgcgtcgaattgcttccaccatggccaaggatgtcaggcagttctggagcaatgtggagaaggtggtgcaattcaagcaacagtcccggcttgaggaaaagcgcaaaaaagccctggacctgcatttggacttcattgtggggcaaactgaaaagtactcggaccttctgtctcagagcctcaaccagccattaacctccagcaaagcaggctcttccccttgcctcggctcttcctcagctgcctccagtcctccaccccctgcttctcgcctggatgatgaagatggggactttcaaccccaagaggatgaggaagaggatgatgaggaaacgattgaagttgaagaacaacaggaaggcaatgatgcagaggcccagaggcgtgagattgagctgcttcgccgtgagggagaattgccactggaagagctgctccgttcccttccccctcagctgttggaagggccttccagcccctctcaaaccccctcatctcatgatagtgacacccgagatgggcctgaagaaggtgctgaagaagagccccctcaggtgttggagataaagcccccaccctctgctgtcacacagcgcaacaaacagccttggcatccagatgaagatgatgaagagtttactgccaacgaagaggaagcggaggatgaagaggatactatagcagctgaggaacagttggaaggggaggtggatcatgccatggagctgagcgagttggctcgagaaggtgagctttccatggaggagctattgcagcagtatgcaggagcctatgccccaggctctgggagcagtgaagatgaggatgaagatgaggttgatgctaatagctctgactgtgaaccagaggggcccgtggaagcggaagagcctcctcaggaggatagtagcagtcagtcagactctgtggaggaccggagtgaggatgaggaagatgaacattcagaggaggaagaaacaagtggaagttcagcatcagaggaatctgagtctgaagagtctgaggatgcccaatcacagagccaagcagatgaagaggaggaagatgatgattttggggtggagtacttgcttgccagggatgaagagcagagtgaggcagatgcaggcagtgggcctcctactccagggcccactactctaggtccaaagaaagaaattactgacattgctgcagcagctgaaagtctccagcccaagggttacacgctggccacgacccaggtaaagacgcccattcccctgcttctgcggggccagctccgggagtaccagcacattgggctagactggctggttaccatgtatgagaagaagcttaatggcattcttgctgatgagatggggcttgggaagaccatccagaccatctctctgcttgcccacttggcttgtgagaaaggtaactggggtccccatttaatcattgttcccaccagcgtgatgttgaactgggagatggagttgaaacgttggtgccccagctttaaaatcctcacttactatggagcccagaaagagaggaagctcaagcggcagggctggaccaagcccaatgcctttcatgtgtgtatcacatcttacaagctggtgctgcaggaccaccaggccttccgtcgcaagaactggcgctatctcattctggatgaggcgcagaacatcaagaacttcaagtcacagcgctggcagtcactcctcaacttcaacagccagagacgcctgctcctgacaggaactcccttgcagaacagcctcatggagctgtggtccttgatgcactttttgatgccccatgtcttccagtctcatcgcgagttcaaggagtggttctctaatcccctaactggcatgattgagggcagccaagagtataatgaaggtctagtcaaacgcctccacaaggttttgaggccttttttactgcgccgagttaaggtggatgttgagaagcagatgcccaaaaagtacgagcatgttatccgctgcaggctctccaagcgtcaacgctgtctctatgatgacttcatggcacagaccacaactaaggagacactagccacaggccatttcatgagcgtcatcaacattttgatgcagctgagaaaagtttgcaatcatccaaatctgttcgaccctcgaccggttacctcccctttcatcaccccaggcatctgcttcagcaccgcctctctggtgctaagggccacggatgtccatcccctccagcggatagacatgggtcgatttgaccttattggcctggaaggtcgtgtctctcgatatgaggcagacacatttctgccccggcaccgcctctctcgccgggtactgttagaagtggctactgctcctgaccccccaccccggcccaagccagtcaagatgaaggtcaacaggatgctgcagccagtacctaagcaagaaggccggacagtggtggtggtgaacaacccacgggcgcccctgggccctgtcccagttcgacctcctccaggtcctgagctctcagcccagcccacccctggcccagtcccccaagtgctgccagcatcactgatggtttcagcctcacctgccgggcccccgcttattcctgcatctcggcctcctggccctgtcctcttgcctccactgcagcccaacagtggttctctcccccaggtgttgccatcccccctgggggtcctgagtgggacctcacggcctcccacgccaaccttgtccctaaagccaacaccacctgccccagttcgcctgagcccagccccacctccaggctcctctagcctgttgaagcccctgacagtgccaccaggctacaccttccctcctgctgctgccaccaccacttctaccaccacggcaactgctaccaccacagcagtgccagctccgactcctgcaccacagcgcctcattctatctcccgatatgcaggctcgcctgccctcaggcgaagtggtcagcatcgggcagttagcctcactggcacaacgtccagtggctaatgcagggggaagcaaacctctcaccttccaaatccagggcaacaagctgactttgactggtgcccaggtgcgccagcttgctgtggggcagccccgcccgctgcaaatgccaccaaccatggtgaataatacaggcgtggtgaagattgtagtgagacaagcccctcgggatggactgactcctgttcctccattggccccagcaccccggcctccgagctctgggcttccagctgtgttgaatccacgccccacgttaacccctggccggctacccacacctactctgggtactgctcgagcccccatgcccacacccactctggtgaggcctcttctcaagctggtccacagtccttcacctgaagtcagtgcttcagcccccggagctgcccccttgaccatctcttctcctctccacgtgccatcctcactccctgggccagcctcttctccaatgccaattcccaactcctctccccttgctagtcctgtgtcctctacagtctcagttccattgtcatcttcactccccatctctgtccccaccacacttcctgccccagcctcggctccactcaccatccccatctcagcccccttgactgtttctgcttcgggcccagctctgttgaccagtgtgactccaccattggcacctgttgtcccagcggctcctggacctccctccttgcagccatctggtgcttccccgtcagcatcagccttgactctaggtttggccacagctccatccctgtcttcatctcagacacctggtcaccctctgttgttggctcccacctcttcacatgttccagggttgaactcaaccgtggccccagcatgctcacctgtcctggtgccagcttcggctctggccagtccttttccgtcagcaccaaatccagctccagctcaggcttcccttctggctccagcatcttctgcatctcaggctctagccacccctctggctcctatggcggctccacagacagcaattctggctccttctccagctcctcctctggctcctcttccggtcctggcaccatcgccaggtgctgctcctgtcctggcttcatcacagactccggttccagttatggctccatcgtctactccaggaacctctttagcctcagcttcaccggtaccagctccaacccctgtgttggctccatcatcaactcaaactatgctaccagccccggttccgtcacctctcccgagcccggcttctacgcagacactggccctagccccagctttagcacccactcttggaggctcatctccatctcagacactctctttgggaacggggaacccccagggaccctttccaactcagacattgtcattaactccagcatcatccctggtaccaactccagcccagacactgtctttggcaccaggaccaccactgggtccaactcagacgctgtctctggctccagcaccccctctggctccagcttctccagtgggcccagccccagctcacacgctgactttggctccagcatcgtcatctgcttcactcctggccccagcttcagtgcagacactgaccttgagccctgccccagttcctaccctgggcccggccgcagctcagaccttggcgctggccccagcctccacacagtccccagcttcccaggcatcttcccttgtggtttcggcatctggtgccgctcccttgcctgtcaccatggtatcccggctgcctgtttccaaggatgagcctgacacactgacattgcgctctggtccccccagccctccctccactgctacctcgtttggtggcccccggcctcgacgccagccccccccaccacctcgttcccctttttatctggactccctggaggaaaagcggaagcggcagcggtctgaacgcctggaacggattttccaacttagtgaggctcatggggccctggcacctgtgtatgggactgaagtcctggatttctgtaccctgccccaacctgttgccagccccatcggccctcgttctcctggccccagccaccccaccttttggacttataccgaggctgcccaccgggctgtactgtttccccagcagcgactagaccagctgtcagaaatcattgagaggttcatctttgtcatgcctcctgtggaggcacctcccccttccctgcatgcctgccacccacctccttggctggccccacgtcaggcagccttccaggagcaattggcctctgagctctggccccgggctcgtcctttgcaccgtattgtgtgtaacatgcgcacccagttccctgacttaagactcatccagtatgattgcggaaagttgcagacgttggcagtgctgttgcggcagctcaaggcagagggccaccgagtgctcatcttcacccagatgacccgaatgctggatgtattggagcagtttctcacctaccatggccatctctacctgcgcctggatggatctactagagttgaacagagacaggccttgatggaacggttcaatgcagacaaacgcatattctgcttcatcctttcaactcggagtgggggtgtgggcgtgaacctgacaggagcagacactgttgttttttatgacagcgactggaatcccaccatggatgctcaggcccaggaccgctgtcaccgaattggccagacccgggatgtccacatatataggcttatcagtgaacggacagtggaggagaacatcctaaaaaaggcaaatcagaagagaatgttgggggacatggccattgagggaggcaacttcaccacagcctatttcaaacagcagaccatccgagagctgtttgatatgcccctggaggaaccttctagctcatccgtgccctctgcccctgaagaggaggaagagactgtggccagcaagcagactcatattctggagcaggcattgtgtcgggcagaagatgaagaggatatccgtgcagccacccaggccaaggctgaacaggtggctgagcttgcagaatttaatgagaacgatgggtttcctgctggtgagggagaggaagctggccggcctggggctgaggatgaggagatgtcccgggctgagcaggaaattgctgccctcgtagaacagctgacccccattgagcgctatgccatgaaattcctggaggcctcactggaggaggtgagccgagaggagctcaaacaggcagaagagcaagtggaagctgcccgcaaagacctggaccaagccaaggaggaggtgttccgcctaccccaagaggaggaggaggggccgggggctggggatgagagttcctgtgggactggtggaggcacccaccggcgcagtaaaaaggccaaagcccctgagaggccggggactcgtgtcagtgagcgtcttcgtggagcccgggctgagactcaaggggcaaaccacactcctgtcatatccgcccatcaaactcgcagcaccaccacaccaccccgctgcagtcctgccagggagcgagttcccaggccagcacctaggcctcgacccactccagcttcagctccggctgcaattcctgcccttgttcctgtcccagtttctgccccagtacccatttcagccccaaatccaataaccattctccctgtccatatcttgccttctcctccccctccttcacagattcctccttgttcttctcctgcctgcacccctcctcctgcctgtacccctccaccagctcatacaccgcctccagcccaaacctgtcttgtaactccttcctctcctctcttgcttggtccaccttctgtgcccatctctgcctcagtcactaatctccccttgggcttgaggcctgaggcagagctgtgtgcccaggcattggcatctccagagtccctggagctggcttctgtggccagttcagaaacctcctcactttctcttgtgccccctaaagatctgttgccagttgctgtggagatcctgcctgtgtcagagaagaacctttctctcaccccttctgcacccagcctgaccttggaggctggcagcatccccaatggtcaagagcaggaggcaccagattctgctgaggggaccacccttacagtgctgcctgaaggtgaggagttgcccctgtgtgtgagtgagagcaatggcctggagctcccaccctcagcagcatctgatgagccacttcaggagccactggaggctgacaggacctcggaagagctgacagaggccaagaccccaacctccagcccagagaagccacaggaactcgttacagctgaggttgcagctccatccacctcatcttcagccacttcctcgcctgagggtccttcacctgcccgacctcctcggcgtcgcaccagtgctgatgtggaaattaggggtcaagggactggtcggccaggacaaccaccaggccccaaagtgcttcgaaagctgccaggacggctggtaactgtggtagaggaaaaggaactggtgcagcggcggcggcagcagcggggagctgccagcaccctagtgcctggggtctctgagactagtgccagcccgggaagcccgtctgtccgcagcatgtcagggccagaatcctcccctcccattggtgggccctgtgaagctgctccttcatcctcactgcccactccaccccagcagcccttcattgctcgccgtcacattgagctgggggtgactggtggtggcagccccgagaatggagacggagcactgctcgccatcaccccacctgctgtgaaacgtcggagggggaggccccccaagaagaacaggtctccagcagatgctgggagaggtgtggatgaggcaccctcatccaccttgaagggaaaaaccaatggggctgacccagtccctgggcctgagaccctaattgttgcagatcctgtcctggaaccacagcttattcctgggccccagcctcttggaccccagccagttcacagacccaatcccctcctgtcacctgtggagaaaagaaggcgaggacgaccccctaaagcacgagatttgcccatccctgggaccatttcctctgcaggggatggcaactccgaaagtcggacacagccacccccacacccatcacccctaaccccactcccaccactgctagtttgtcccactgctactgttgccaacactgtcaccactgtcaccatttcaacgtccccacccaaacggaagaggggccgacctcccaagaatcctccatcacctcggcccagccagctccccgtcttggaccgtgacagcacttctgttctcgagagctgtggattggggaggcgacggcaaccccagggccaaggggagagtgagggtagttcctctgatgaggatggaagccgccccctcacccgcctggcccgccttcggcttgaagcagaaggaatgcgaggacggaagagtggagggtccatggtggtggctgtaattcaggatgacctggacttagcagatagcgggccaggcgggttggaattgacaccacctgtggtctcactaaccccaaaactgcgctcgacccggctgcgtccagggtctctagtccccccactagagactgagaagttgcctcgcaaacgagcaggggccccagttggtgggagtcctgggctggcaaagcggggccgcctacagcccccaagtcccctggggcctgagggttcagtagaggagtctgaggctgaagcctcaggtgaggaggaggaaggggatgggaccccacgccgacgtcctggcccccgccggcttgttgggaccaccaaccaaggggaccagcgcatcctgcgcagcagcgcccctccctccctggctggccctgctgttagtcacagaggccgcaaggccaagacgtga

SEQ ID NO: 12704 - DNA, 7405 bp, Homo sapiens
gctatgccgctgcagggaaaatgctgagccctcccgggccgggtgggcggcggccggcgagggcggcgacggggacccgcttcccgagcgcggcggcggcggccatggcccggctggctgactacttcatcgtggtaggctatgaccacgagaagccaggatcaggagaaggtctggggaaaataatccagagatttccacagaaggactgggatgatacaccttttccacagggaattgagttgttttgtcagcctggcgggtggcagctgtccagagagaggaagcagccaacgttctttgtggttgtcctgacagacattgactcagatcgacattactgctcatgcctaaccttctatgaggcagagatcaatcttcagggaacaaagaaggaagagattgaaggtgaagcaaaagtgtctggtttaattcagcctgcagaagtgtttgctcccaaaagcctggtgttggtatccagattatattatccagaaatttttagggcttgcctgggtttgatctataccgtgtatgtggacagcctgaatgtctccttggaaagtctaattgcaaacctttgtgcctgccttgtcccagcggctggagggtctcagaagctgttttctttgggtgcaggagatagacagttgatccagactcctttacatgatagtcttcctatcacgggcactagtgtggctctcctgttccagcaattgggaattcaaaatgtcctcagcctcttttgtgcagtcctcacagaaaataaggttctcttccattctgcaagtttccagagacttagtgatgcttgtagagccctggaatctttaatgtttcctcttaaatatagttatccttatatccctattctcccggctcagctactggaagttctaagttccccaacgcctttcattattggagtacattctgtctttaaaactgatgtccatgaacttttagatgtaatcatagcagatttggatggaggcactattaaaattcccgaatgtattcacctctcttccctcccagaaccacttctacatcagactcaatcagctctttctttgattttacacccagatttggaagtagcagatcatgcttttcctcctccacgaacagctttatcccactcaaaaatgctggataaagaggtgcgagccgttttccttagattatttgcacaactcttccaaggatatagatcctgcctgcaacttataagaattcatgcagagccagtaatacatttccacaagacagcattcttggggcagcgtggtttggtcgagaatgatttcctcactaaagtactcagtggaatggcatttgcaggttttgtttcagaaagaggtcctccttatagatcttgtgatctctttgatgagttggtagcctttgaagtagagagaattaaagttgaagaaaataacccagtgaagatgataaagcatgtcagggaacttgctgagcaactattcaaaaatgagaatccaaatcctcatatggcattccagaaagttccacggccaacagaaggatcccatttgcgagttcatattcttcctttcccagagattaatgaagcccgggttcaggaattaatacaggaaaatgttgctaagaaccagaatgcacctcctgccacacgaatagaaaagaaatgtgttgtgccagcaggtccacctgttgtttcgataatggacaaggtgacgacagttttcaacagtgcacaaagactagaagttgtcagaaactgtatctcattcatatttgaaaataaaattttggaaactgaaaagacccttcctgctgcactcagagcccttaaaggaaaggcagcaagacagtgtctcactgatgaattgggtttgcatgtccagcaaaaccgggcaatattagaccatcaacagtttgactacataataaggatgatgaattgtactctacaggattgttcaagtttagaagaatacaacattgccgcagcattactccctttgaccagtgctttctataggaaacttgcccctggagtcagccagtttgcttacacgtgtgtacaagaccaccccatttggacaaatcagcaattttgggagacaaccttttacaatgcagtgcaggaacaggttcgctccctttatctctcagccaaggaagacaatcatgccccgcatctgaagcaaaaggataagcttcctgatgaccattatcaggagaagacagcaatggacctggcagctgagcaactacgcctttggcctaccctgagcaagtcaactcagcaagagctagtgcaacatgaggaaagcactgtctttagtcaggccattcactttgcaaacctcatggtgaacctgctagttccactcgacacaagtaaaaacaagctcctaagaacatcagcgccaggtgactgggagagcggaagcaacagcattgtcacaaacagtattgcaggaagtgtagctgagagctatgatacagagagtgggtttgaagattcagagaatactgacattgccaattctgttgtgcggttcattacccgatttattgacaaagtttgtacagagagtggagttactcaggatcacatcaagagccttcattgcatgataccaggaattgtagctatgcacattgagaccctagaagcagtacatcgagaaagcagaagacttccgcctattcagaagcccaagattcttagacctgctctgctgccaggagaagaaattgtctgtgagggtcttcgagtcttgctggatcctgatggaagagaagaagctactggaggtcttcttggaggccctcagctcctgccagcagaaggagccttgttcctcaccacatacagaattctcttcagaggaacaccccatgatcagttagtgggtgagcagacagttgtgcggagctttcccattgcctccatcaccaaggagaagaagattacaatgcagaaccagctacagcagaacatgcaagaaggactgcagatcacatcagcatcttttcagttgattaaggtagcatttgatgaagaagtcagtccagaagtagtagagatctttaagaaacagctgatgaagttccgttatcctcagtccattttcagtacctttgcttttgctgctggacaaactaccccacaaataattttaccaaaacagaaggaaaagaacacttcttttcgtaccttctcaaaaacaattgtgaaaggtgccaaaagggcagggaaaatgacaattgggcggcaatatttactgaagaagaagacagggacaattgtggaagaaagagtaaatcgtcctggatggaatgaagatgatgatgtatctgtttcagatgagagtgagctccccacaagtaccaccctgaaggcctccgagaagtctacaatggaacagttggtggaaaaagcttgtttcagagactatcagcgtttaggtttaggaaccataagtggcagctcttcccgttcaagacccgagtattttagaattactgcctccaacaggatgtattcactctgccggagctatcctggccttttagtcgtacctcaagctgtacaggacagtagtttaccaagagtagctcgctgctatcgacacaatcgcctgcctgttgtatgttggaagaactcaagaagtggtactctgctcctccgatctggaggattccatgggaagggagtcgttggtcttttcaaatctcagaactcccctcaggccgctcctacctcctctttagaatcttccagtagcatagaacaagagaaatacttgcaagccttactgaatgctgtttctgtccatcagaaactcagaggcaacagcactcttactgtcaggccagcctttgctctatctccaggtgtgtgggcaagtcttcgctctagcactcgcttgatcagctctccaacatccttcattgatgttggcgcccggctggcaggcaaggatcactcggcctccttcagtaacagcagctacctacaaaaccagctcttgaaacggcaagcagccctttacatatttggtgaaaagtcgcaactaaggaacttcaaggtagaatttgctttaaattgtgagtttgttcctgttgaatttcatgaaatccggcaagtgaaagccagttttaagaagctgatgagggcttgtatcccaagcaccatccctactgactcagaagtgaccttcctgaaagcgctgggagattctgagtggttcccacagcttcacaggataatgcagctggctgtggttgtatcagaagtacttgagaatggttcctcagttttggtctgtttggaggaaggctgggacatcactgcacaagtgacatccctggttcagttactcagtgatcccttttataggacacttgaaggcttccagatgttggttgaaaaagagtggctctcttttggtcacaaattcagtcagaggagcagcttgaccctcaactgtcaggggagtggttttgctccagtcttcttacagttcttagactgtgtacaccaggttcacaaccagtatccaactgagtttgaattcaatctctattacttaaagttcttggctttccactatgtgtctaatcgctttaaaacatttctcctggattcagactatgaaagattagagcacggaactttatttgatgataaaggagaaaagcatgccaaaaaaggagtctgtatttgggaatgtattgacagaatgcacaagaggagtcccattttctttaattatttatattcaccattggaaatagaggctctaaagcccaatgtaaacgtctctagcctcaagaagtgggattactacatagaagagaccctgtccacaggcccttcctatgactggatgatgctaacccccaagcacttcccctccgaagactctgacctggctggagaagctgggccacggagccagaggagaacagtgtggccatgctatgatgatgtcagctgtactcagcctgatgctctcaccagccttttcagtgaaattgaaaaattggagcacaaattgaaccaagcccctgagaagtggcagcagctgtgggaaagggtaaccgtggaccttaaagaagaaccaagaacagatcgctcccaaagacacctgtcgagatccccaggaattgtgtctaccaacctaccttcctatcagaagaggtctctgctacatctcccagacagcagcatgggggaggaacagaattccagcatctccccatccaatggagtggagcgaagagcagccacgctctatagccagtatacatccaagaatgatgaaaacaggtcctttgagggaacactttataaaagaggggctttgctgaaaggttggaagccccgttggtttgttttggatgtaacaaaacatcagctgcgctactatgactcaggtgaggacacaagctgtaaaggccacattgatctggctgaagtagaaatggtcatccctgctggccccagcatgggagccccaaagcacacaagtgacaaggctttctttgatctcaagaccagcaaacgtgtgtataacttctgcgcccaggatggacagagtgcccagcaatggatggacaagatccagagttgtatctctgatgcctgatgcccatggtcaacccacgcagaagaaacagaagaactcatgctgccagatagatagaaaaagaagcatggatccttgaggagctgacaacaagttatcccagggcctgaggttctcctgcccagtcccctcttgcaggggttgctatatctacttaacctgaataggtgtttcacacaggtctggtcaacagccccatgcactccctgtatcttgcactaaatttttctaacagggtcttagtggttaatgatcagaagatgtctcctgagccaactgtgaacctcacccaggcaaaatggctaccacctacttgggtccttcttcatgaaagctatagatccttttttgttctctgaggtcataatttcctcggagacctgtttaacaagcaaaaatcaaaaccctccaagattgtctcatattctacctggactaggtttcctatgagagacatctacttgtaatgcctgacctttgagatgctcagttctctggtgctgccaaaagatgcttccatggtccgtgctctgccagtggggttcacaacaagagacgtcattgttcagtagcaggcaaagagggagcacacagcattattctgatggaaaaagattatccagggaatggtacaacaatgaccagcccaatgcaggaaaacactacttccaaaacactgaattctctagaccagaggtgctctgaggatccagggccttgtgttcttatgtatcttctgcttcctgacagcttctttttcaaaataacatgcaaaaaaagctgaatgcactaactcacaaaacaaacacttgcactgaattcccaatgaagtgaagatgttggaaagacagaggccagctatttaggaccatacgcacctgtgacaagggctgtgttgaccacagtcacactgtggcatgactggatacccaaactacacttctacacatgaaaagtaagaactgtctttagattttctttactttgataacttgtgattgtttagcttaagacccaagaaatgctgtttgctcatggtaaacagaaacagcatcttcgctacaaccactgacaccagctggcgtcataggtagctagatcattgcatttgttttgaaatgttaatatgttaaatactaaactaatatttcaaaaatgtgtatatatgatttctatatccttgtttttcagatagcctgcttataatttaatataaattaactgatgcattcataagatttcaataatgaaatggttcccttttaaaaaataaaaatactttgtagattaaaaataaatcagaatttcaaatttaaaattgtccacacactaggaaatagaactgtgttaatatataagaaatctggggataattaagaatgaaggacttttctatcatttccattttataaattgccacctgtgaaaatggtttttgcacattatttgtatttttctttgtatatgaaataattttttgtactttgtaaaatatggagcccattgtaccttcagctatttgagactatacacagtgcttcttttgtaactggattactttaactttcgtgaaggcattacattgcctcacattcactaaccaccttgaattaaatttatttcttaagaaaaagcatccctcatttactgtgaactaaagttcattctgtagtgcacagcattcaggagggtaacactcaggattcatacatgggactaaaggttcaagaataaaacaaagcatgacccac

SEQ ID NO: 12705 - DNA, 7235 bp, Homo sapiens
actccggccgggctctgctggctgcggcgggagctggacgcgggaggaggcggcggcggcgctggaacagtgaaccatggagctgtatttcggtgaatatcaacatgtgcagcaggaatatggggtccatctgagactcgcaagtgatgatacccaaaaatcaaggagttcccagaactccaaggcaggctcctacggtgtcagtattcgggtccagggaattgatggtcacccctatattgtcctgaataacacagaacggtgcctagcaggcacatcgttttctgaaaatgggccaccctttccacctccagtgataaataacctgcctctacattccagcaatggttctgtgccaaaggagaacagtgaagaacttcagcttccagaaaacccatacgcccagcctagcccaataagaaacctgaaacagcccctgctccatgagggcaagaatggagttctagatcgcaaagacgggtctgtgaagccatctcacctgctgaactttcagaggcatccagagcttttgcaaccctatgaccctgaaaagaatgagttgaatttacaaaatcaccagccttctgagagtaattggctaaaaacgttgacagaagaaggcatcaacaataagaagccttggacttgctttcccaaacctagcaattcccagcctaccagtccctccttggaagacccggccaaatctggtgtgacagctattcgtttatgcagctccgtggtcatagaggaccccaaaaagcagacctcagtgtgtgtaaacgttcagagctgcaccaaggagagggtgggagaggaggcccttttcactagcgggaggcccctgactgcccacagcccacatgcccaccctgaaaccaagaaaaccaggccagatgttcttcccttccggcgacaggattcagcgggacccgtcctggatggagctcggtcccggaggtcctcctcgtcatccacaactcccacgtcagccaactctttgtacaggtttttactggatgatcaggaatgtgccatccatgccgacaacgtcaatcgtcatgaaaacagaaggtatattcccttcctgccaggaactggacgggatattgatacaggatcaattcctggtgtggatcagttaattgaaaaatttgatcaaaaacctgggcttcagagaagaggaaggtctgggaagcgaaacagaattaatacagatgacaggaaaagatccagaagcgtggatagcgcctttccttttggcctccaagggaactcggagtacctgattgaattcagtaggaacttgggcaagtcaagcgaacacctcctccggccttcccaggtgtgcccgcagcggccactgtctcaggagcgccgtgggaaacagagcgtgggccgcacctttgcaaagctgcagggagcagcgcacggggcttcatgtgcccactccaggcctccccagccgaacatagatgggaaagttctggaaaccgaaggtagtcaggaaagtacagtgatccgtgcgccctcccttggtgcacagagtaaaaaggaggaggaggtgaaaacagccaccgctacgctgatgttacagaaccgggcaacagcaacttcgcctgattctggtgccaagaaaatttccgtgaagacatttccttcggcctcaaatactcaggccacaccggatctcttaaagggccagcaagagctcactcagcaaaccaatgaggagacagctaagcagattctctacaattacctcaaagaaggaagcactgataatgacgatgctactaaaaggaaagtcaacttggtctttgagaaaatccagaccttaaagtctcgagcagctgggagcgcccaaggaaataaccaagcttgtaattccacatctgaagtcaaagatctattggaacagaaaagcaagttgaccatagaagtggctgaacttcagagacagcttcaactggaagtcaagaatcaacagaacattaaagaagagagagagaggatgagagcaaacctagaagagctccgaagccaacacaacgaaaaggtggaggagaactccacattgcagcaacgactggaagaaagtgaaggggagctccggaagaatctggaggagctattccaggtgaagatggaacgggagcagcatcagactgagatcagggatctccaggaccagctctcagaaatgcacgatgaactggacagtgcaaagcgatcggaggacagggagaagggagctctgattgaggagctcttacaggcaaaacaggatcttcaagatctgctgattgccaaagaggagcaagaagacctcttgagaaagcgagagcgtgaactcaccgccctgaagggagccctgaaagaagaggtttccagccatgatcaggagatggacaagctgaaggagcaatatgatgctgagttgcaggccctgagggagagtgtggaagaagcaaccaagaatgtcgaggtcttggcgagcaggagcaacacttcagagcaagaccaggcggggactgaaatgcgcgtgaagcttctgcaggaggagaatgagaagctgcagggaagaagcgaagagctggagcggagagttgctcagcttcaaaggcagatcgaggacctgaaaggcgatgaagccaaggcgaaggaaacgctgaagaagtacgagggagaaatacgacagttagaggaggcccttgtgcacgccagaaaggaagaaaaagaagctgtgtcagccagaagggccctggagaatgaactggaggctgctcagggaaatctgagtcagactacccaggagcagaagcagttgtctgagaagctcaaagaggagagtgagcagaaggagcagctaagaaggttgaagaacgagatggagaatgagcggtggcacctgggcaaaaccattgagaaactgcagaaggagatggcagacattgttgaggcctcccgtacctcaaccctggagctccagaaccagctggatgagtataaggagaaaaaccgcagggagctcgcagaaatgcaaagacagttgaaggagaaaacgctggaggcagaaaagtcccgactgacagccatgaaaatgcaggatgagatgcgtctgatggaggaagagttacgggactaccagagagctcaggatgaagcactcacaaaaaggcagcttctggagcagacgctgaaggacctggagtatgagctggaagccaagagtcacctcaaagatgaccgcagcaggctggtcaagcagatggaggacaaggtgtctcaactggagatggaactggaagaagagagaaacaactcagatttgctgtctgagaggatcagtaggagcagggaacagatggagcagttgaggaatgagctacttcaggagagagctgcgagacaagacttggagtgcgacaagatttccctggagaggcagaacaaggacttaaagagccggattatccacctggaaggttcctacaggtccagcaaagaggggctggttgtgcagatggaggccaggatcgcggagctggaggaccgcctggagagtgaggagagggatcgggccaatcttcagctcagcaaccggcggctggagcggaaagtgaaggagctggtgatgcaggtggatgatgagcacctgtcattgactgatcagaaggaccagctgagcttgcgtttgaaagccatgaagcggcaggtggaggaggctgaggaggaaatcgacagactggaaagttctaaaaagaagctgcagagggagctggaggagcagatggacatgaatgagcatctgcaggggcagctcaactccatgaagaaggacttaagactgaagaagctgccgagtaaagtgctggatgacatggatgacgacgatgacctcagcacggatgggggaagcctctatgaggcgcctgtgagctacacattctccaaggacagcaccgtcgccagccagatctgagtgctctcccgggctgtggaagtacctgtcattcctgcaggagctgcagccacccaaagtgggaggcagggaggggagcatctgtctgccactgagaccaatcacagcctctttgcacagcatgccagctcctcagtgttacattcctcgccagggtctctcagtgggtcttcgacagagagcttttgcagtttaaaatgttgggatgcctgaggaccaggagccaccacccactggggtgttgtgagagatacactttggtaggctgaggcccctgttccacagccactatttgcattgctgtccctgccccctcatcactccccctgccaagacaaagggtccagaaggctaggacttacttaatagcactgtgcagggaggaaaccatgtatagcttgtacatattttaaaccagaccttctcacgaactgctgctgttgggtttggaatgtgatggaggcttggtagggtggctggtttgtaaagttcatgcatctatattgagtattctttttttttttttttgagatggagtttcattcttgttgccgaggctggagtgcaatggcgcaaccttggctcactgcaacctctgcctccctggttcaagtgattctcctgcctcatcctcccaagaagctgagattacagatgaccaccaccactcctggctaattttttgtatttagtagagacggggtttcaccatgttggtcaggctggtcttgaactcctgacctcaggtgatccacctgcctcagcctcccaaagtgctgagattacaggcatgagccaccacgcccagccattgagtattcttttttaaaatatgaagctattagattttaagtgttgaggagcagaggtgagaagagagagagagagagaaagtcaaataaagtcaaagaccagtttggaaaccaaagttggaaaagaagaattgtagtggtcatggacagctaagactgagcatagcagttcacatggtctgggtaaacaagtcactggcacaggggaaagccagaaggttgcttgtgtctgtgactgcagctatggccttgtttgcttagtttatctggaattctgttataatttctgaactgttctgagacctgttcccagtcactgattgcaatttcttttacacaggttgggtagggagagttgtaggtaaggccttaaacaaatgaggccgtttctggaaggatagggctgtgtggtcatgtcccacagcaagcttttgggatcgggggaataagagggtatgggggaaaggttcatagacttaggtgtgagaatgaggtgggaggtgtctggtaaggtcatgggggaagggagatgagagaggagataggcagatgtgggtatggggcccagtgtgagaaggaagacagagaagttcttgaaagctgggggatgtgtgggcaagaggtggattgagcaggatctcagggttatgtcgaggaagggaagaaagaaacagaagtcaggcagaggcgtgtctgtgcaaactggaggactccttccaacttcctggaacaaagcgacatcgccagcagcaggctggcagggagtggttgaggtctgggggccaggccacatggctggagaggaatttcagggagcatagcatcgggaggatgctacatatccagggactccctcctggccttcctgtgtcacttcacaatgtgacagtccccaggcatgcccacaggccaggcccagtcacagctgggcttccacaggtcagaatatgggacaggacatggtcagggagaggaccctgtgagttggtgacatatatgtggcagagatggtagtgttcagctgcttcagcagtgtccccaaccatcccaatagggtgggggcctgtgggccagaggactccatgacagtagccatggagtcccacctgtgccaggtcagagcccacccggcaggtttcagagtggtcagcccagtttaagggtgggagtctggagccagacagccaagccccttccacatctacagggtcactgtcatcctcaccacagccaggggtgattctcacctctgcctgcttatgtggggtgtggccgattcctccctttagtcattcattcatttagcacatatttattgggcatcggtgatgtgtcaggcacagtccttggcacacagaatacagcagtgaattaaacaggcaaaaattcctcccctcctggagctcagtgtcaggaaagggggtgataaatgacaatcaaatcgacatggaggttgagcacctctgtactcagccctctgtctgtccttctgaggacgcaacaagcctggttccctagagctcactttgaccctcaatatgttcataatttccctgctgcttctcccatcgttagacatctgccagtaagcctgctgagagaagcctcagcccactcatacctagagacgctgctggggaaggtcagcacacccaagaactttgggagtgtgtgtctgttttggtttgtgagaaagtagctgcccctcattctggccagttctttccagtagccatggggctggctacaagaagcaaaactgcccatgcaaagagaacacaggtcacttttcaaaacacttgcatcattaccctaaaaataggctgttatgcgttttgacaattgcgctatcctacactctgagggagttggcaacgcatgcggtatagtggagtgggaagagttgagactgaaagttaagagaagggttttcaagtcccggctcatctcaccccagtgactttgacagtgtgctcactctcagagccatggattacctggaacaaagtgcagattagtgcccacggtcctttccaggtataacatgctatcgttctttaattttattatatatacatacttttcttctgttttttgctttaagaactaaccccgatcaagagtattttctttagctagcttaaaaagaaaacatatattttatgtaaaaacacatacatggccaaatgcaatactgaagagacaatcatcctgtatcttttatggtttttcctgcttctgagtgtcgttctacaatgcccgttgacttattccattgcgtctctgctttagggtatggtttggtcgctttggttgtcatgagaaagagacattctccttgcagctacctccatgtgagtgaattcctggataaagcaagatttcctttcaataaacgctgtcacccaatgggaattttgaaaaaaaaaaaaaaaaaa

SEQ ID NO: 12706 - DNA, 2177 bp, Homo sapiens
gcactagggggcccggcctctggcgctaccatggcgtttggcaagagtcaccgggatccctacgcgacctccgtgggccacctcatagaaaaggctacatttgctggagttcagactgaagattggggccagttcatgcacatctgtgacataattaacactacccaggatgcgccaaaagatgcagtgaaagctttgaagaaaaggatttccaaaaactacaatcataaagaaatccaacttaccttgtcacttattgacatgtgtgtgcagaactgtggtccaagtttccagtctctgattgtgaagaaggaatttgttaaagagaatttagttaagctactgaatcccagatacaacttgccattagacattcagaatagaatcttgaatttcattaagacttggtcacagggcttcccaggaggtgtggatgtaagcgaagtcaaagaagtatacctcgacctggttaagaaaggcgttcagtttcctccctcagaagcagaggctgaaacagcaagacaagagactgctcaaatctcatcaaatcctccaacatctgtccctactgcaccagctctttcttctgtaattgctccaaagaactcgactgttacattggtcccagaacagattggaaaactgcacagtgaattggatatggtgaaaatgaatgtgcgagtgatgtccgccatattgatggagaatactcctgggtctgaaaaccatgaagacatagagcttctgcagaaactctataaaacaggtcgggagatgcaggagaggatcatggacctgcttgtggtggtggagaacgaagatgtaactgttgagctaattcaggtgaatgaggatttgaataatgctatccttggatatgagaggtttactagaaaccaacaaaggattttggagcaaaataagaaccagaaggaagccaccaatactaccagtgagccttctgccccatctcaagatctcctcgacctaagtcccagtccccggatgcctagggccactctgggagaactcaacaccatgaataatcaactttcaggcttaaatttcagccttccaagttctgatgtaacaaacaacttaaaacccagtcttcatccacagatgaacttgctagccttggagaatacagagatacccccgtttgcccaaaggaccagccaaaacctcacctcaagccacgcatatgataattttctggaacattcaaattcagtgtttctacagccagttagtctacaaaccattgcagcagcaccatcaaaccagagtctgccacctttgcccagcaatcatccagcgatgacaaaaagtgatctccagccacctaattactacgaggtaatggagtttgatcccttagctcctgctgtcactacagaagctatttatgaagaaattgatgctcaccagcacaaaggagctcaaaatgatggtgactgagaagaaagtggatgatcagctcactaccacatcaaaggtgccaactctctaaaacgtagactctgtgcagctttgaagcctggaagacaatacctaccaacatgtcaaagccatggtggcacatttctgctataatgaagattaaatagaataacagttccaggataacactgattcctgacaacagcgtgagatttcaacagaacttgtttggaacaaatactcacttaaaacttcagcagaagaaaaattacttagtccttaggccaaccaatttaactgcagtgtcatgtttcacaggccttcctacatttagaaatcgtcacacagctgtgataagagtagattattttactatgaaataattctgaatagatgaaagcataaaatgtgagaaactgaatgtattattcaggaagaatactgagtgccttcatttaactaaagttgaatgtaaaagtcaatttgcacttctttataatcctctggtttagaattataaattgttaaaaccttgataattgtcatttaattatatttcaggtgtcctgaacaggtcactagactctacattgggcagcctttaaatatgattctttgtaatgctaaatagcctttttttctctttttactgcaacttaatatttctatttagaacacagaaaatgaaaatatttagaataagttgtacatttgatgacaaataaatcactatt

SEQ ID NO: 12707 - DNA, 1710 bp, Homo sapiens
gggaggggcggggcctccgccaccacctcagctgcggaccgaggcgagatggcggccaccgagggggtcggggaggctgcgcaagggggcgagcccgggcagccggcgcaacccccgccccagccgcacccaccgccgccccagcagcagcacaaggaagagatggcggccgaggctggggaagccgtggcgtcccccatggacgacgggtttgtgagcctggactcgccctcctatgtcctgtacagggacagagcagaatgggctgatatagatccggtgccgcagaatgatggccccaatcccgtggtccagatcatttatagtgacaaatttagagatgtttatgattacttccgagctgtcctgcagcgtgatgaaagaagtgaacgagcttttaagctaacccgggatgctattgagttaaatgcagccaattatacagtgtggcatttccggagagttcttttgaagtcacttcagaaggatctacatgaggaaatgaactacatcactgcaataattgaggagcagcccaaaaactatcaagtttggcatcataggcgagtattagtggaatggctaagagatccatctcaggagcttgaatttattgctgatattcttaatcaggatgcaaagaattatcatgcctggcagcatcgacaatgggttattcaggaatttaaactttgggataatgagctgcagtatgtggaccaacttctgaaagaggatgtgagaaataactctgtctggaaccaaagatacttcgttatttctaacaccactggctacaatgatcgtgctgtattggagagagaagtccaatacactctggaaatgattaaactagtaccacataatgaaagtgcatggaactatttgaaagggattttgcaggatcgtggtctttccaaatatcctaatctgttaaatcaattacttgatttacaaccaagtcatagttccccctacctaattgcctttcttgtggatatctatgaagacatgctagaaaatcagtgtgacaataaggaagacattcttaataaagcattagagttatgtgaaatcctagctaaagaaaaggacactataagaaaggaatattggagatacattggaagatcccttcaaagcaaacacagcacagaaaatgactcaccaacaaatgtacagcaataacaccatccagaagaacttgatggaatgcttttattttttattaagggaccctgcaggagtttcacacgagagtggtccttccctttgcctgtggtgtaaaagtgcatcacacaggtattgctttttaacaagaactgatgctccttgggtgctgctgctactcagactagctctaagtaatgtgattcttctaaagcaaagtcattggatgggaggaggaagaaaaagtcccataaaggaacttttgtagtcttatcaacatataatctaatcccttagcatcagctcctccctcagtggtacatgcgtcaagatttgtagcagtaataactgcaggtcacttgtatgtaatggatgtgaggtagccgaagtttggttcagtaagcagggaatacagtcgttccatcagagctggtctgcacactcacattatcttgctatcactgtaaccaactaatgccaaaagaacggttttgtaataaaattatagctgtatctaaaaacaaaaaaaaaaaaaaaaaa

SEQ ID NO: 12708 - DNA, 3829 bp, Homo sapiens
gggggagaggaggggaaagctagacctgcagagtgaagaaagctggtaatagatgtctgacaaactaaagaaagacttgtgttaccacaattcagacagcccggaatatcaagattcatctttttcactaattgtggcattcacagatgcaaagtattgttcctgggtgtgtctgtgagagtattgccaaaggagagcagtgaactgggaaaagcagacccacctcaatgtgggtgggcaacatccaatcggctgccagctagaataaaccaggcaggagaagatggaagagccgacttgctgaatcttccagccttcatctttctcgtgtgctggatgcttcctgccctcaaacatcagactccaggttcttcgtcttttggactctcggatttacatcagtggtttaccaggtgctctcaggccttcagccacacactgaaggctgaattgtcggcttcccgacttttgagattttgaaacttggactgagctactgctggcttccttgcttctcaacttacagatgggacttcacctatagatcatcaaaggtggacttctgagtcatggacaaaccagaattcttgcccaccagtggtcccacgacttgatttgggaagccttgttgactctgatgatgaggatcagaacataatacctgaaaatttgccagcaccaacagacaaatgtaaactaaaatatcagcaatgtaaaactgaaattaaagagggctataagcagtatagtcagagaaatgcagaaaatacaaaatcaaatgttacacataaacagtctccaagaaacaagatagatgaaaagtgtgtgcaagatgaagaagccaacacagatgaccttacgactctggataggaaagccatcttacagcaaggttatgcagacaactcttgcgataaacaacagagggcaagaaaatttgatgcagtaagttgtcagcatttttacttatttggaaattgtggctgcagagaagaagaaacagattgttgcagagcaagtgatgatagaccacttatctagggctgtcatcagtgatccagagcaaaatttagccattgagcaaaaagaaagtgatcatatccttccagattcaaagatgacacctcttcgatttagaaaaagaacactacatgaaacaaagataagaactcattctacattaactgaaaatgtgctttctcataaattacagtttgatggtaggatcgtatcacgtaatggacgtgatgcttgcagagagctcattgggttctttttcactcatgaccaatcccttacaatttatgaatatcgacaatttgggaaaaatagaacaaatgtgcttccttttattcaaaaaagcatttatagtcatcagtgtggacgaagaaaaggaaaacaataccgacttggtgatttttatgttggtgcaaccttgacatttttgagttctgatcatctcagccttccagaaagcatcaaagaaaacacattacttaaactccgaatcacaaatattgatcaaatagctttggattctctcaaaactgcttctatggaacaggaggatgatataatcattcaagaaaccaatgataggctggtcttcaaagcaattcaagatgtgctaaaagaaaaactacataaaagaggtgttcgtattttgactggattgggaaaatattttcaacagttggacaaggaaggaaatggacttttagataaggcagattttaagcaagctctaaaagtgtttcacttagaagtgtctgaaaaggattttgagtctgcatggctaattctgaatgacaatggcaatggcaaggttgattatggagaattcaaacgtggtattattggtgaaatgaatgaatacaggaaatcatatgttcgaaaggcctttatgaaactggatttcaacaaaagtggcagtgtgcctattataaacataagaaaatgttactgtgcaaagaagcattctcaagtaatttcaggccattcaacagaggaagaaatcaaatcatcctttctagaaacattaaaagttgcctgcagcaagtctgatgaagtgtcatatggtgaatttgaagattactatgaaggtttaagtataggaatagtagatgatgaagactttgttaacatcttacgtactccatgggggatttagtctttaataatacatatgtcatcaacactaagcattttattggagagatgatatcaatgtaaaggatgatcaaacactggaatatattttcctaggacttcctttattctggtttcttgtttgtttgttttgttttgttttgttttctcaaaaatgttgaatttggaaagagaactatccagaaagatagatgtaggggtgtgttagtgtttgtgcatgtgtatgcctgttcacatgtccttacatttgtaaagatatctttttggtttattacttatcttgcgtatattttagaggtcattttttattaacttcagtaggaaagttacatctgcatcaaacaatatggcaacatctatttattaaccaagtttcctgtcctttcacattgttttttgctacctcttcctcagaatatatttgccaccatggcaatttgataaattagaattgggcccaaagccagtgagataattcaatgtgtttttaacacatgaaatattaaaggatatgcaagagaaatttttcaagcagtgtgattatagatgttttctgtatatagaatatttcaaatgatggaggtttaccccatgatgctcatttaaatactgacttgtcttttaaatctgtcttctaaattatgtactgttgttggttaaatagagcacaatgtagttattctaatgcccagttgtatttgttcttttattctgctttttaactgtaatcctttttaccagcatacgattgttattgagcaatatgaaagggaaatgttctttattaaaatcaatacattatcttattaaacaaagatcctaaaagtatattgttgcatatatgaatccaaggaatagttcagtaattattgcctaaaatgtgaaagcatattttgtatcctaaaatgaatgtatgatattctaaacatctgttttagtataacaaacaattgaaacatttccttctaaatatatgttatttaatagttacatgtattataatcattctttctaaattctttgctagtcatttcttcctgggaatacagagaaaagagacaactttatgagttgttttcaacttcataattttaaattttctatgttaatataacataaattagaaaaaataagtgattcaaaatgaaaatatttactttgtagaatatgactttagacatatcactgtatccatctatacttggcagcaacatgagaagtgtgatacatgtgaacccaacaaattcaaagttgcacttttcaagatgtgagaaggtactaaaacttaatactaaaacatgagagggaaaatatgtgtaaacctctagtgctattttcactggctaaattctttatttcttgatttttttaaaaattaggttattaaaattaaaacaatatgctagaagacattttggcagaaataagtctataacactatttttgtcacatatctttttcttggaaaaatttatccaactatagacatcttaaaccctacaaattgttcttgttaaaaatgactaatactgggggtgctcaatatgcatatagtgtttttcattgataatttttatttagttcttaagaaacctgttcttaatgttggcatgtcacatttttctgttactataatcagaaaatgtatagtctgttatac

SEQ ID NO: 12709 - DNA, 2556 bp, Homo sapiens
acgaccaacagctgagaacgcggcgagtatggaagctgcgtcttaggagcctgggaaagcacttcgacgagaatagtttggtttcgtacacaggaaaatgtctaatcgacaggagaagtatgaagctcagaatatagtcaattcaacagaagagagtgatgatgcttttgatactgtcactattccagttccctcagaagagcctcaagagtcagatcaaactgaagagcatgaatctggaatagaacaattcagtgagagccatgcaatacatgttgaggagcagagtgaccaaagcttttcaagcctggaaccagacaatgaacaactcatggaagaggttatatcaccaagacaagtttcatatactccgcaacatcatgaaaagcaatatgcaatgcagaggccaaatgatgatagtttggcatttctggataaaataaagtctgtaaaggaatctttgcaagaatcagtggaagattctctagcaacagtaaaagttgtacttattccagtgggccaggaaattgtaataccttttaaggttgataccattcttaaatatcttaaggaccatttttcacacttattaggtatcccacattctgtactgcagataagatactcaggaaaaattcttaaaaataatgagactctagtacaacatggagttaagccacaggaaattgtacaagtggaaatcttttctacaaatccagatctgtatccagtcagaagaatagatggattaactgatgtctctcaaatcataactgtcactgtccaaactggacttgatcaataccagcaggtacctgttgagattgtcaaatctgactttcacaaaccatctcttggtggattcagacataaagtaacaggagtagagtatcacaatgctggaacacaaactgtacctaaaaggattcccgaaagactcagtatattttgtagggatacgcagacagtttttcagaaaaaaaatctccaacaaactacaaatacaacatccacacagatgactaacattggtgtatatgtatcaaatatgactgataaactggtaacaccaggaaagtatttttcagcagcagaataccatgctcaaagactaaaggcggtgacagtgatacagacttactacaggcaatggcatgctaaaatcttcgtagagaatttaagaagacagaaaagcttaagactggaatgggaaacacagcaagaactaaggaagataagagaaaaagaagaatggataaaattggactatcaccggaggcataatcctaaaacaaatgaagattttgaatttctttataatgcattagaattctggcggcaagaagaacttacacgtattaaccaatcttttactggagctgaaaggaaagctgctctgtgtgaacttctggaaaaagagactcagataattgcttccattgggagacatagatacattgcttatatggcaaatcaggaagcagcaatacaagcttttttggataagtgttcagctccaaaaatatggagaacccctaatggcaaaacaattgagatggatacgcagttcaccatcagagccagagagctgcaaaatatctataagtgcattatgctgaaaaatatctcccaagatgagaggctggatgtgctgttaactcttaaacacactgtaaaggaacatgaatgtaaactaactcaggaaattctagaattgattgacagagaggttgaccttatgatgagaggagtcaaacatcataaccttgaaggactcagaaaaagaattgcgacactcttttttcattatatcaaaacacctctgtttaatcctgaagttgcaaaataccttaaggtccctcaagacccattgaaattttataagaagatttacttttgccacagttgccagctttatttgccttctacagaattttctgtatcatccacctcacgccgcatataccggtgtcgtaactgcattaaccttcagaatgaggctcaaaaacgagaatcatttttgaagtacaaatgtttacttcaacagctctactatacagaagctgattatgaagatgattctaaaattgctttcttgatgcagctacaagacattcagtacctgacagagaacatctgggcgtcccagtcagtcctcagtgcttgcgacaatctcagtgatctggtcatggtcagatggaataaatccctggagtggtccccctggaactgcattcttcttaccaaagatgaagcagctgctcatctcaagctaacaagtattgaagagggatatgaacgctcatttattcacaagatcaaacacaaacatatcctggctaagaactatttttctcaggttccagtgctggcttcatttatacttgatgatggtgaaattgatgagatcagatggaagtatcactcagacacaacacctaagattatagaatcccagaggcctcctcattaggtgatccaggagtatttgtttgatgatcggcattttgttcactgctaatagggtaatacagaggtcacagagtatggaaatgg

SEQ ID NO: 12710 - DNA, 971 bp, Homo sapiens
gtccgggtgacgtctcccgagggcgtcggcagggtcggcggcgtcggcagcagtgtcgacggcagcggcggcggcgggtgggaaatggcggagtatctggcctccatcttcggcaccgagaaagacaaagtcaactgttcattttatttcaaaattggagcatgtcgtcatggagacaggtgctctcggttgcacaataaaccgacgtttagccagaccattgccctcttgaacatttaccgtaaccctcaaaactcttcccagtctgctgacggtttgcgctgtgccgtgagcgatgtggagatgcaggaacactatgatgagttttttgaggaggtttttacagaaatggaggagaagtatggggaagtagaggagatgaacgtctgtgacaacctgggagaccacctggtggggaacgtgtacgtcaagtttcgccgtgaggaagatgcggaaaaggctgtgattgacttgaataaccgttggtttaatggacagccgatccacgccgagctgtcacccgtgacggacttcagagaagcctgctgccgtcagtatgagatgggagaatgcacacgaggcggcttctgcaacttcatgcatttgaagcccatttccagagagctgcggcgggagctgtatggccgccgtcgcaagaagcatagatcaagatcccgatcccgggagcgtcgttctcggtctagagaccgtggtcgtggcggtggcggtggcggtggtggaggtggcggcggacgggagcgtgacaggaggcggtcgagagatcgtgaaagatctgggcgattctgagccatgccatttttaccttatgtctgctagaaagtgttgtagttgattgaccaaaccagttcataaggggaattttttttaaaaaacaacaaaaaaaaaaacatacaaagatgggtttctgaataaaatttgtagtgataacagtaaaaaaaaaaaaaaaaaaa

SEQ ID NO: 12711 - DNA, 5538 bp, Homo sapiens
gccccagatcggaagtgacggagacgtgctagcgcgtcgaaggtagctctatggttttcctcgcgttcttgagtcgggaaatggccgctgtgtggttgcaacggagataaattcccggaaccgcgattcggcgtgtcaggaattcgaatttagagtttaatttctcagagcattctctccaggaagaatttttacagtatctcaaagacttcacttgacttcttgatcctgcataaaaccaaggagaaaagaaatgggtcgctccaattctagatcacattcttcaaggtcaaagtctagatcacagtctagttctcgatcaagatcaagatctcattctagaaagaagcgatacagttctaggtctcgttccagaacatattcaaggtctcgtagtagagatcgtatgtattctagagattatcgtcgcgattacagaaataatagaggaatgagacgaccttatgggtacagaggaaggggtagagggtattatcaaggaggaggaggtagatatcatcgaggtggttatagacctgtctggaatagaaggcactctaggagtcctagacgaggtcgttcacgttccaggagtccaaaaagaagatccgtttcttctcaaagatccagaagcagatctcgccggtcatatagatcttctaggtctccaagatcatcctcttctcgttcttcatccccatatagcaaatctcctgtttctaaaagacgagggtctcaggaaaaacaaaccaaaaaagctgaaggggaaccccaagaagagagtccgttgaaaagtaaatcacaggaggaaccgaaagatacatttgaacatgacccatctgagtctatcgatgaatttaataagtcatcagccacatccggtgatatttggcctggcctttcagcttatgataatagtcctagatcaccccatagtccttcacctattgctacaccacctagtcagagttcatcttgctctgatgctcccatgctcagtacagttcactctgcaaaaaatactccttctcagcattcacattccattcagcatagtcctgaaaggtctgggtctggttctgttggaaatggatctagtcgatacagtccttctcagaatagtccaattcatcacatcccttcacgaagaagtcctgcaaagacaatcgcaccacagaatgctccaagagatgagtctaggggccgttcctcgttttatcctgatggtggagatcaggaaactgcaaagactgggaagttcttaaaaaggttcacagatgaagagtctagagtattcctgcttgataggggtaataccagggataaagaggcttcaaaagagaaaggatcagagaaagggagggcagagggagaatgggaagatcaggaagctctagattacttcagtgataaagagtctggaaaacaaaagtttaatgattcagaaggggatgacacagaggagacagaggattatagacagttcaggaagtcagtcctcgcagatcagggtaaaagttttgctactgcatctcaccggaatactgaggaggaaggactcaagtacaagtccaaagtttcactgaaaggcaatagagaaagtgatggatttagagaagaaaaaaattataaacttaaagagactggatatgtagtggaaaggcctagcactacaaaagataagcacaaagaagaagacaaaaattctgaaagaataacagtaaagaaagaaactcagtcacctgagcaggtaaagtctgaaaagctcaaagacctctttgattacagtccccctctacacaagaatctggatgcacgagaaaagtctaccttcagagaggaaagcccacttaggatcaaaatgatagcgagtgattctcaccgtcctgaagtcaaactcaaaatggcacctgttcctcttgatgattctaacagacctgcttccttgactaaagacaggctgcttgctagtacacttgtccattctgtcaagaaggagcaagaattccgatccatctttgaccacattaagttgccacaggccagcaaaagcacttcagagtcatttattcaacacattgtgtccttggttcatcatgttaaagagcaatacttcaagtcagctgcaatgaccctaaacgagcggttcacttcgtatcagaaagccactgaagaacatagtactcggcaaaagagccctgaaatacacaggagaattgacatctcaccaagtaccctgaggaagcatacccgtttagcaggggaagagagagtttttaaagaagaaaatcaaaagggagataaaaaattaaggtgtgactctgctgaccttcggcatgacattgatcgccgtagaaaagaaagaagtaaagaacggggagattccaagggctccagggaatccagtggatcaagaaagcaggaaaaaactccaaaagattacaaggaatacaaatcttacaaagatgacagtaaacataaaagagagcaagatcattctcgatcttcatcctcttcagcatcaccttcttctcccagttctcgagaagaaaaggagagtaagaaggaaagagaagaagaatttaaaactcaccatgaaatgaaagaatactcaggctttgcaggagttagccgaccacgaggaaccttttttcgaattagaggcagaggaagagccagaggagtttttgctgggacaaatactggtccaaacaactcaaatactacttttcaaaagagaccgaaggaagaggaatgggatccagaatataccccaaagagcaagaagtacttcttgcatgacgacagagatgatggtgtggattattgggccaaaagaggaagaggtcgtggtacttttcaacgtggcagagggcgctttaacttcaaaaaatcaggtagcagtcctaaatggactcatgacaaataccaaggggatgggattgttgaagatgaagaagagaccatggaaaataatgaagaaaagaaggacagacgcaaggaagaaaaggaataataaatatgaagtaagattacaacagagcagaacttgcacccaccattttttttacctgatttttgttttcaaataagaatgtaagcattttacttaaattttactgtttgcaagtagtctatagaaattttgttttaagtcttcaaatatcttgagaaatagtagactgtatgttgaaaattgtactgaaataaagtagaaaattgttacgtaccatatttgtaactatcaacttttaaaacttttaacgtttttgttacatgcattgtaattctgctttgtctataagatatggtcaagtacagctctgtgaaagttctgattctcttccttccctgtttgtcaatgttttattctgaagtaaacgttagctctacatataaatcctggaacagaaattgtttatagagactacactaattattttaactgtatacatctgtttaatttgaacacactacatcgtagggtgactgatttttgaagtataccacagacaaaaagttgttactatggtaaactaagctagtttaacacttgagcaaatgcttaagaaggaattaaaaaaaaaaagctttgccaatagctaaaaagtacaagctattaaaaatcagattgaaaagttttgagaaaatgttatttttactgaaagcaagcagtggcctataaagaacattcttaggagccttttctatttgcgttcaaaactgtgtgttctctttctattcctatttgatagtttgagtcatggtcttagatattagctatttgtgagaggaaactggtttgtaacaatactgcaaatagaaaccccatttctactgaacatcctagttttaaacagaagaaaaactgtaatcctggggttggtatgtaggaggtctatcctgcagaataagttgatacattagtacctgatttcatatcttacatatttatttgagctgaacattagtttgtagtgtaactattagtaaaaatagagaaacacagcatactgttcattaatagtattttaaaaaaattgtttttcaaatgtcaccaataaaagttttggcaggaagcttgttgcggcattgatctaacctttttcccccccatttcagttgcagtttttgtagaatggctttttctttttcctcttaagagttctattcttcaggtagataatttttcaaatgtgaattatcttttgtgtctatattgatagctcttaaaggagtgaaaatctaaaatagtaaatttcaatgttaagtgtctgctttatgggcatatataaaagtagacacatttcatttgttaatttagttgtgtgtgtgtgttaaaaggagctaatgcttattctgttaatgtaaacttttgaagatcttaagtgtattgctctttcatcttaaacactttcgaggatttgcagtgcgtctagcacctagattacagccaggaacattggttaagaactgttggaaacaaaactaaaagcaaactcaacatatgtgatgtttatggccctcagatccttagtattgtgtgattttcccccgttaacatgtctttctaaaattgtctattaaagcagaggaaatacctgccaaaggaagtatgtattgcattaatcagggcataactaatattctcctgttcagaataatacttatttacgtgtgaaagcaacatggatgtgattcccaacacagaattttcatgacccttttattgtatacaaataaataccataacagttacttggttagacatcaaatctgtgtgcatgactatgtgcttatccacttaagacaataggtaaaaggggatctgagaaattatgtaatagggagtgggaataaaactacttaattcctgtgggcaggttatattttaagttcaaatgcattgctttaacctttggttacttttattctgttaaacagaattgaagaaagagtattataccagagtgtagtaggctagggtgattgtaagaactctgtaatagaatgtcattgtggatgttacctttttcagatccaagcatataaaaagcctgtatattttttaaaaacacatcttaactccacgctttacgatattataaaagttgaatggttcctcttggtaaggatatttgcttacaagtgctaggaaataactcactgatacctgcgttaacatactttgttttgcctagagaggggcaataaaaatgaaccaaaggatatttccagaaaggattaagaaagctgtttaagaaggccatgactctttaggtgtgtatgtgtacctttcagcatcctaggaatttttatactaaaagcaaaatgttttttccagttagtcttcttcaaggaattactattgttccttttgtcacaggtaaaatcagtgttgggaattataatttgagaaaaatattacccagtaacattgaatgtagatggctaaacgattcttactcagtgtgatgtataatgatgcaacagggacccttgtaaattgtcatacgccaataaaatgtcacaagtaat

SEQ ID NO: 12712 - DNA, 3494 bp, Homo sapiens
gcctactttggtgcagaggcgtggggggcgggacgcgtctttcccgttcggatcgcggggaaagcagtggctccaagtgagccagaggagagctgaggagaggagggggaggccgacgacctgggccctgggcctctgaaggcctactttaaggctggccaattctgcaagaaaggcaaggaggaggagactggctcacagctctggaggacccccttctgtcagctgtggggcttgacaccacttgaacaagaaaaggagggggaaactgcaccacatcagtgaagatccacctccagtggctgctctgctggtggtggagttgctgctgacaaccaccctcaacgggtctgcacccatccaggaaatatctgtcttcctttagcttggttgtacctgttctcactctatctgtattattgaattattgactgagactgtgtttgggaaggaggctgagtgactactggactggatattgactctaactcttattcccaagcttatatccttaatcacctaaagatcagagtgtgaagaaacaaacctgtgacagatctgtggttgaggtttagactacgggaggagtatattacctgactttctttgtaacttgtaccatgactggggcagagattgagcctagtgcccaggccaagcctgaaaagaaggctggggaagaggttatcgctgggcctgagagagagaatgatgtccctctggtggtcagacccaaggttaggacccaggcaactactggggcaaggcccaaaactgagaccaagtctgtgcctgcggcaaggcccaaaactgaggcccaagcaatgtctggggcaaggcccaaaactgaggtccaagtaatgggtggtgcaagacccaaaacggaggctcaaggaatcacaggggccaggcccaaaaccgatgccagggcagtaggtggcgctcgttctaaaactgatgccaaggcaatccctggagcaaggcccaaggatgaggcccaggcatgggcccagagtgaatttgggactgaagcagtgtcacaggcagaaggagtgtcccagactaatgccgttgcttggccactggccactgctgagtctggatcagttactaaatctaagggcctgtctatggatagagaactagtcaatgtggatgctgaaacctttcctggcacccagggtcagaaaggaatccagccctggtttggaccaggggaggagactaatatggggtcttggtgctattccaggcccagggccagagaggaggcctctaatgagtctgggttctggtcagcagatgagacctctacagcgtcttctttctggactggagaagagacaagtgtcagatcatggcccagggaagagtccaataccaggtccaggcacagggctaaacatcagactaatcccaggtccaggcccagatccaagcaagaagcctatgttgattcctggtctggatctgaggatgaggccagcaacccattctccttctgggttggagaaaataccaataacttgttcaggcccagagtcagggaggaggcaaatatcaggtccaagctcaggacaaatagagaagattgttttgaatctgagtctgaagatgagttctataagcagtcctgggttttgcctggagaagaggccaatagtagattcaggcacagagacaaagaagatcctaatactgccttgaaactcagggcccagaaagatgttgacagtgatagggtcaaacaagaacccaggtttgaggaggaagtcattattgggtcctggttctgggcagaaaaagaggccagtttggagggtggagcttcagcaatctgtgaatctgagccaggaactgaggagggggccattggcggatccgcgtactgggctgaggaaaagtccagtttgggggctgtggccagagaagaggccaagccggagtctgaagaagaggccatatttgggtcctggttctgggacagagatgaggcctgctttgacctaaatccctgtcctgtgtacaaggtcagtgataggttcagagatgcagctgaggagcttaatgcatcctccaggccccaaacctgggacgaggtcactgttgaattcaaacctggtctttttcatggggttggcttccgatccacaagcccctttggaattcccgaagaggcttctgaaatgcttgaggcaaagcccaagaacctggaacttagcccagaaggagaagagcaggaatctttgcttcagcctgatcagcctagtcctgagttcacatttcagtatgatccttcctaccggtcagtccgggaaattcgagagcatcttagggccagggagagtgcagagtctgagagttggtcctgcagctgcatacaatgtgagctgaaaattggttctgaagagtttgaagaattccttttattaatggacaaaattcgggatccttttattcatgaaatatctaaaattgcaatgggtatgagaagtgcttctcaatttacccgagatttcattcgagattcaggtgttgtctcacttattgaaaccttgcttaattatccatcctctagagttaggacaagttttttggaaaatatgattcacatggctccaccttatccaaatctaaacatgattgagacattcatatgtcaagtgtgtgaggaaacccttgcacatagtgtggattcccttgagcagctgactggaataaggatgcttagacacctcactatgactattgactatcacacactgattgccaactatatgtccgggtttctctccttattaaccacagccaatgcgagaacgaagtttcacgttctgaaaatgctattgaatttgtctgaaaatcctgctgtggcaaaaaaactattcagtgccaaagctctttcaatatttgtgggtctctttaacatagaagagacaaatgataatattcaaattgttattaaaatgtttcagaatatcagtaacattataaaaagtggaaagatgtccttaattgatgatgatttcagtcttgagccgcttatttctgcatttcgtgaatttgaggagttagctaagcaactacaagcccaaatagacaaccaaaatgatcctgaggtgggacaacaaagttaatatgattaaccacctgccgctgatcagccttatgttcccaaagagccctgagtagtgctttggtgttcacagtctgtttttttgttgtaacttatattttttaatgctgatgttaactttgtcaaactcttgttttgagctggatcattttgtggatgccaaatgaatatcaaaactgaaaacacatttgttgatatttgtcttgctgtccagattgcggtatttttcagtattaagttttcaatgaactgtgtcacctaagtaagctaccctgctattcgttgtttaaatatatggttctctatttgagtctgtgttttcaataaagttctatgttaaaattggcaaaaaaaaaaa

SEQ ID NO: 12713 - DNA, 2957 bp, Homo sapiens
cgggtggctttgcgggcgctcgcggtaagtttgcgccaagtgcgcggcagccgggacgcagacggcggcggcggcgagaggcggagcccggggaccaccccccatcaccctccccccagtcacctcacgtaccacaacctcacgtaacctctcaccccccctccgatacccccagccccgggatggcagcgcccgccagccttcccggccggaccggctgtcgccagtgccggctttagcctgtgggactaggccccgccgaggcctgacccccggagccgggacccactgtgcagccagcagccgggccgggactgaggggccgctcccccctcgcggcccgtcgggaggacgctgtcgtcccggggactgggggccggggggtgggggggagccagggcgaggaagtcgggacccgtattgggaaaaaagcggggccggggtcaggagcgccccctcccctcacctcccccctccccccggggttgggggggccggagcagagagcacccagcccgggaggtggatgaatgtgggagaaaatggagaccaagacgatcgtgtacgacttggacacatcaggggggctgatggagcaaatccaagctctgctggctccccccaagacggacgaggcagaaaagcgcagtcggaagcctgagaaggagccccggagaagcggcagggccaccaaccacgacagctgcgatagctgcaaggaaggtggagatctcctgtgctgcgaccactgcccggctgccttccacctccagtgctgtaaccctccactgagtgaagaaatgttgcctcctggagagtggatgtgtcaccggtgcactgttcgccgaaagaaacgagagcagaaaaaggagctgggtcatgtcaatggactggtggacaaatctggcaaacggactacatcccccagcagtgacactgacttgttggacagatcggccagcaaaactgaactaaaggccattgcccatgcccggatcctggaaaggagagccagcaggcctggcacacccacatccagcgccagcacagagactcccacctctgagcagaatgatgtcgacgaagacatcattgacgtggatgaggaaccagtagcagcggagccagactatgtgcagccccagctgaggcggccctttgagctgctgattgctgccgccatggagcggaaccccacccaatttcagttgcccaatgaactgacttgtaccactgcactaccaggttctagcaagaggagaagaaaggaggaaaccacagggaaaaatgttaagaagacacagcatgaattagatcacaatggtctcgttcccttacccgtcaaagtctgcttcacgtgtaacaggagttgccgtgtggctcctctcatccagtgtgactattgccctctcctgtttcacatggattgcctcgagccgccgctcactgccatgcccctgggcagatggatgtgtccgaatcacatcgaacatgtggtgctgaaccagaagaatatgacactgagcaatcggtgccaggtgtttgatcgtttccaggacaccgtttcgcagcatgtcgtcaaagtggacttcctgaaccgaatccacaagaagcacccccctaaccggcgtgtgctccagtcggtcaaaagaagaagcttgaaggttcctgatgctataaaatctcagtaccagtttccaccccctctcattgcacccgcggccattcgggacggggagctgatctgcaatgggatccctgaggaatcacagatgcaccttttgaactctgagcacttagccacccaagcagagcagcaagagtggctctgtagtgttgttgcgctccagtgcagcatattgaaacatttatctgctaagcagatgccttcgcattgggactctgaacagacagagaaggctgatattaagcctgttattgtgactgacagctcagtcaccacctccctgcaaacagctgacaagacacctacaccttcccactaccccttgtcctgcccctcagggattagcacccagaattccctgagctgctctccaccccaccagtccccagccctagaggacatcggctgcagttcttgtgcggaaaaatccaagaaaaccccttgtgggactgccaatgggccagtgaacacagaggtgaaagctaatggcccacacctctacagcagccctactgattccacggacccccggcgacttccaggcgctaacaccccactaccaggcctctcacaccggcaaggctggccccggcccctcacgccaccagcggctgggggccttcagaaccacaccgtcggcatcattgtgaagacagagaatgccactggccccagctcttgcccccagaggagtttggttcctgtcccaagcctgcccccttccattcccagctcttgtgccagcatcgagaacaccagcactttgcaaagaaagactgtccaatcacagataggacctccgttgacagattcaaggccactgggctcacccccaaacgccacccgggtgctcactcccccgcaagcagcaggagatggtatcttggccacaacagccaaccaacgattcagctcaccagcgccatcgtcaggtgagtgctgctcagccttgggttgatttggaataattttatgctctttctggcaaataagattctaaaagcacttatatccctgtgaatacttcagaggactttggcctttgtattgtttgtcttactctcatttccgtaatagaagaggaagcacatgttaacttgtcccgtttataaatgggactgcttaggctctgaaagcttcagtgatttccttaaaatgacctactgagtcagtggcaggattggaaccacagcccaggtctcctgactccatcccataccttccaggcctaggcctctgcctgttttgttctgtcaccttaaaagaaggc

SEQ ID NO: 12714 - DNA, 2233 bp, Homo sapiens
cgattggagcgggccgcagccagcgcacccagaccctgcgctgccctcggacggccgggcgcggagccccagctgcggaggccgacggcacccggccccgagcgcctcgacgccgagccgcgcgcgccttctccgccaggcccggcgggcgggagcgggggcgagggagcaggagcggccagtgcccccgacacccccggcccggcacccccggcccggcatcccccgccgccgccgccgccgcctcaaggccgcccgctccccgcaggtggacgcggccatgggccgaggggtgcgcgtgctgctgctgctgagcctgctgcactgcgccgggggcagcgagggcaggaagacctggcggcgccggggtcagcagccgcctcctcccccgcggaccgaggcggcgccggcggccggacagcccgtggagagcttcccgctggacttcacggccgtggagggtaacatggacagcttcatggcgcaagtcaagagcctggcgcagtccctgtacccctgctccgcgcagcagctcaacgaggacctgcgcctgcacctcctactcaacacctcggtgacctgcaacgacggcagccccgccggctactacctgaaggagtccaggggcagccggcggtggctcctcttcctggaaggcggctggtactgcttcaaccgcgagaactgcgactccagatacgacaccatgcggcgcctcatgagctcccgggactggccgcgcactcgcacaggcacagggatcctgtcctcacagccggaggagaacccctactggtggaacgcaaacatggtcttcatcccctactgctccagtgatgtttggagcggggcttcatccaagtctgagaagaacgagtacgccttcatgggcgccctcatcatccaggaggtggtgcgggagcttctgggcagagggctgagcggggccaaggtgctgctgctggccgggagcagcgcggggggcaccggggtgctcctgaatgtggaccgtgtggctgagcagctggagaagctgggctacccagccatccaggtgcgaggcctggctgactccggctggttcctggacaacaagcagtatcgccacacagactgcgtcgacacgatcacgtgcgcgcccacggaggccatccgccgtggcatcaggtactggaacggggtggtcccggagcgctgccgacgccagttccaggagggcgaggagtggaactgcttctttggctacaaggtctacccgaccctgcgctgccctgtgttcgtggtgcagtggctgtttgacgaggcacagctgacggtggacaacgtgcacctgacggggcagccggtgcaggagggcctgcggctgtacatccagaacctcggccgcgagctgcgccacacactcaaggacgtgccggccagctttgcccccgcctgcctctcccatgagatcatcatccggagccactggacggatgtccaggtgaaggggacgtcgctgccccgagcactgcactgctgggacaggagcctccatgacagccacaaggccagcaagacccccctcaagggctgccccgtccacctggtggacagctgcccctggccccactgcaacccctcatgccccaccgtccgagaccagttcacggggcaagagatgaacgtggcccagttcctcatgcacatgggcttcgacatgcagacggtggcccagccgcagggactggagcccagtgagctgctggggatgctgagcaacggaagctaggcagactgtctggaggaggagccggcactgaggggcccagacacccgctgccccagtgccacctcaccccccaccagcaggccctcccgtctcttcgggacagggccccagccgtcccccctgtctgggtctgcccactgccctcctgccccggctttccctgcccctctcccacagcccagccagagacaagggacctgctgtcatccccatctgtggcctgggggtccttcctgacaacgagggggtagccagaagagaagcactggattcctcagtccaccagctcagacagcacccaccggccccacccatcaagcccttttatattattttataaagtgacttttttattactttaattttttaaaaaaaggaaaataagaatatatgatgaatgatattgttttgtaactttttaaaaatgattttaaagagacaaaaaagaaaaaaaaaaaaaaa

SEQ ID NO: 12715 - DNA, 3736 bp, Homo sapiens
agttgggggaagtgcactgagcgagtggcggccgggggacagtacctgcttgccttattgggcaaatacagccttccaaggtggagtctaacgccgtggtgtgaactggccacccgaacagggagtaaatagtgctttgtatctttaaggaagcccttttttaaatttaaaaaaaaagtcttaattataagactctttaaatgcccaactgcatacttggagctttgggactgaatttggaactttcctgtcaagcgacctcccacgactttactgctgagcctgtgcacgtgtgtgtaaggggagaaatccaggcatctagatgcagacttgtacccagttacttggggtcgcgtgcgctcagctgggacctgggctcgtgcgcttagtccggagccctgatctgcgaacaggatattaaaacttttagtacaattgattggactacttgaaccatcgggatttggggaggaactccagatttttcatttttaaactctaaatgtatgaggaatttacagaatggagaacgaaaaggaaaatctcttttgtgagccacataaaaggggactaatgaaaacacctctgaaagaatccaccacagcaaatatcgtgttggcagagatccagcctgactttggccctttaaccacacctaccaagcccaaggaaggctctcagggagagccgtggacaccgacagccaacctgaaaatgctcatcagtgctgtgagccctgagatccgcaacagagatcagaaaaggggtttgtttgacaacagaagtggattacctgaggccaaagactgtatacacgaacacttatctggagatgaatttgagaaatcccaaccaagtcgaaaagagaaaagtttaggattattgtgtcataagttcttagcacgatatcctaattatcccaaccctgctgtgaataatgacatctgccttgacgaagtggcagaggaacttaatgttgaacgtcgacgcatttacgatatcgtgaacgtcctagagagtttacatatggtgagccgcctcgccaaaaacaggtacacttggcacgggcgacacaatctcaacaaaacccttggcaccttgaagagcatcggggaggagaataagtacgccgagcagattatgatgatcaaaaagaaagaatatgagcaagagtttgactttattaagagttacagtatagaggatcatatcatcaaatcaaacactggcccaaatggacacccagacatgtgttttgtggaactccctggagtggaatttcgggcagcttctgtaaacagccgcaaagacaagtctttaagggtaatgagccagaaatttgtgatgctgtttttggtgtcaacgcctcagatagtaagcctagaagttgctgccaagattttaattggggaggaccatgtggaagatttggataaaagcaagtttaaaacaaaaattaggaggttgtatgatatagctaatgttctgagtagcctggatcttatcaagaaagttcatgttacagaggaaagaggccgaaaaccagctttcaaatggaccggcccagaaatcagtccaaataccagtggctccagcccagtcattcattttactccctctgatttggaggtgagacggtcttcaaaagagaactgtgccaaaaacctcttttccacacgtgggaaaccaaactttactcgacacccatctcttatcaaattggtaaagagtatagaaagtgatcggagaaagataaattctgcgcccagtagccctatcaagaccaacaaagctgagagttctcagaattctgcacccttcccaagtaaaatggctcagctcgcagctatttgtaaaatgcagttagaagagcaatcaagtgaatccagacagaaagtgaaagtacagctggcaagatctggaccctgcaaaccagtagcccctctggaccccccagtgaatgctgagatggagctgacagcaccgtccctcatccagcccctgggaatggttcccctgatccccagccccttgtcatcagcagtgcccctgatcctacctcaggccccttcaggcccatcctatgccatctacctgcagcccactcaagcccaccaaagtgtgacgccaccccaaggcctgagcccaacggtgtgcaccacccactcttctaaagctactggctcaaaagactccacagatgccaccactgagaaggcagccaatgatacctcaaaggccagtgcctctaccaggcctggaagcttgctgccagcaccagagaggcaaggggcaaagagccgaaccagggagccagctggagaaagaggctcaaagagggcaagcatgctcgaggacagtggttccaaaaagaaatttaaagaggacctaaaaggacttgaaaatgtctccgcaaccttgttcccatcaggatacctaatccctctcacgcagtgctcatccctgggggcagagtccattttgtctggtaaagaaaactcaagtgctctttccccaaaccacaggatttacagctccccaattgcaggtgttattccagtgacatcatctgaactcactgctgttaattttccctcttttcatgtaacaccgttgaagctaatggtctcaccaacttccgtggcagccgtacctgtcgggaacagcccggctctcgcttcaagccaccctgttcccatccagaacccaagctcagccattgtaaacttcaccctgcagcacctgggactcatctcacccaatgtgcagttgtctgccagccctgggtctggaatcgttcctgtgtctccaagaatagagtctgttaatgtcgcaccagaaaatgcaggcactcagcaaggaagggccaccaactatgactcaccagtcccaggccagagccagccaaatggacaatcagttgctgtgacaggggcacaacagcctgttcctgtgacacccaaagggtcacaattagtggccgaaagtttcttccgtaccccaggtggacccaccaagccaaccagctcatcctgcatggattttgagggtgctaataaaacctccttaggaactctctttgtcccacagcgaaaactggaagtctcaacagaggatgtccattaatcaacagatgttggcttagtttaattttctaaagagttgtttaatagagaaaatgtacacagactgatttggagaacacattctctgaaaatactgtaaatacgttggggatttgttcaatgtgaaatcagatagttgttttcatacatatatatatatacacacacacacacacacacacacacacatatatttgtataaagctaagtttagctttcaatcctacaaaataaaagtaaaatgttgaactctaagatatattaacttctagggggaaaaatccattattttagctatgcctatactattatgcaaagtaactgtattaaagtttacttccctctaagcaaatatgcttgacatgcctaacacagcattcccttaaacattttgcacaaagaaaatgctgtgtgatgtataatgttgtatttttaaataggggtatagctatattttttgtaatttctttaatctgttgttgcagtgtatctttttgtaaagtttgcaacaatcctcaatcaagtctatggaaaaattatttataaaatgtatttttaatcataagttgttcaaattaaaacttttctaaaaaataaaaaaaaaaaaaaaa

SEQ ID NO: 12716 - DNA, 3293 bp, Homo sapiens
ggaggcgaactgtgggccccggccattcattgccgtggccggcgggcactggggccccgtgttttcagagtcatggaggcgctaattcctgtcataaacaagctccaggacgtcttcaacacggtgggcgccgacatcatccagctgcctcaaatcgtcgtagtgggaacgcagagcagcggaaagagctcagtgctagaaagcctggtggggagggacctgcttcccagaggtactggaattgtcacccggagacctctcattctgcaactggtccatgtgacacaagaagataaacggaaaacaacaggagaagaaaatggggtggaagcagaagaatggggtaaatttcttcacaccaaaaataagctttacacggattttgatgaaattcgacaagaaattgaaaatgaaacagaaagaatttcaggaaataataagggagtaagccctgaaccaattcatcttaagattttttcacccaacgttgtcaatttgacacttgtggatttgccaggaatgaccaaggtgcctgtaggtgatcaacctaaggatattgagcttcaaatcagagagctcattcttcggttcatcagtaatcctaattccattatcctcgctgtcactgctgctaatacagatatggcaacatcagaggcacttaaaatttcaagagaggtagatccagatggtcgcagaaccctagctgtaatcactaaacttgatctcatggatgcgggtactgatgccatggatgtattgatgggaagggttattccagtcaaacttggaataattggagtagttaacaggagccagctagatattaacaacaagaagagtgtaactgattcaatccgtgatgagtatgcttttcttcaaaagaaatatccatctctggccaatagaaatggaacaaagtatcttgctaggactctaaacaggttactgatgcatcacatcagagattgtttaccagagttgaaaacaagaataaatgttctagctgctcagtatcagtctcttctaaatagctacggtgaacccgtggatgataaaagtgctactttactccaacttattaccaaatttgccacagaatattgtaacactattgaaggaactgcaaaatatattgaaacttcggagctatgcggtggtgctagaatttgttatattttccatgagacttttgggcgaaccttagaatctgttgatccacttggtggccttaacactattgacattttgactgccattagaaatgctactggtcctcgtcctgctttatttgtgcctgaggtttcatttgagttactggtgaagcggcaaatcaaacgtctagaagagcccagcctccgctgtgtggaactggttcatgaggaaatgcaaaggatcattcagcactgtagcaattacagtacacaggaattgttacgatttcctaaacttcatgatgccatagttgaagtggtgacttgtcttcttcgtaaaaggttgcctgttacaaatgaaatggtccataacttagtggcaattgaactggcttatatcaacacaaaacatccagactttgctgatgcttgtgggctaatgaacaataatatagaggaacaaaggagaaacaggctagccagagaattaccttcagctgtatcacgagacaagtcttctaaagttccaagtgctttggcacctgcctcccaggagccctcccccgctgcttctgctgaggctgatggcaagttaattcaggacagcagaagagaaactaaaaatgttgcatctggaggtggtggggttggagatggtgttcaagaaccaaccacaggcaactggagaggaatgctgaaaacttcaaaagctgaagagttattagcagaagaaaaatcaaaacccattccaattatgccagccagtccacaaaaaggtcatgccgtgaacctgctagatgtgccagttcctgttgcacgaaaactatctgctcgggaacagcgagattgtgaggttattgaacgactcattaaatcatattttctcattgtcagaaagaatattcaagacagtgtgccaaaggcagtaatgcattttttggttaatcatgtgaaagacactcttcagagtgagctagtaggccagctgtataaatcatccttattggatgatcttctgacagaatctgaggacatggcacagcgcaggaaagaagcagctgatatgctaaaggcattacaaggagccagtcaaattattgctgaaatccgggagactcatctttggtgaagagaactatgtaatactgagactttgttgactcaaaacttgctagttactgcctacctgagtagaatcttatttatgaactcctgtgtattgcaatggtatgaatctgctcatgtggagactggctataaactgaaaagtgtattccaaattgcagaacacatcacacatttaatccaaataataaatggctgtttctaaagtttcccagtatatataaaatacatcaagtctgtcttgtgacagtttcatctgaacttaacttaaaaacaactgttaatgttctagttgtgcaaagcagtttgcctgtggataagatgacctgtgtaataatctttgttagtagtcttaaagctgctgccatagtcctccaagaagaaagcaccaagacaacatttcatatgactataatgcatgtactatataagctgatctggctttgaaagatgtgagttggcaagttcctcacatagagtcattgtattccacctgtccttcaatttagttttttctgagcttctttgcagcctttgatgtgtttttaagaaagctgaatgcacaagaggatctgtgacactgacatggctgtggtgtgcatactgtgtagttacatagcccttccaattctgggtccatttgcactagcaaattaaaatatgctttgattcatacttaaacctgaaagcaggaatgcctacattaattcctacattaaaaacagccatctacccttgattatctagaaagacttggtaatgatggtcagttccttttagatttcagaaaatcaaatgatgacctaaatttcccttaatttgcaaatacagtagtaattaaggtacatctctaaagtggagcacttacaccaggctctaagattcactttgaggtggaacttaaaaccagtgtactgtatgtatgcattggtaatagctacttttgcttcatagcttcataccaacaaaatatatttattagaatagtatgaaagtactgaaggagttgaaaga

SEQ ID NO: 12717 - DNA, 2415 bp, Homo sapiens
ggaggcgaactgtgggccccggccattcattgccgtggccggcgggcactggggccccgtgttttcagagtcatggaggcgctaattcctgtcataaacaagctccaggacgtcttcaacacggtgggcgccgacatcatccagctgcctcaaatcgtcgtagtgggaacgcagagcagcggaaagagctcagtgctagaaagcctggtggggagggacctgcttcccagaggtactggaattgtcacccggagacctctcattctgcaactggtccatgtgacacaagaagataaacggaaaacaacaggagaagaaaatggggtggaagcagaagaatggggtaaatttcttcacaccaaaaataagctttacacggattttgatgaaattcgacaagaaattgaaaatgaaacagaaagaatttcaggaaataataagggagtaagccctgaaccaattcatcttaagattttttcacccaacgttgtcaatttgacacttgtggatttgccaggaatgaccaaggtgcctgtaggtgatcaacctaaggatattgagcttcaaatcagagagctcattcttcggttcatcagtaatcctaattccattatcctcgctgtcactgctgctaatacagatatggcaacatcagaggcacttaaaatttcaagagaggtagatccagatggtcgcagaaccctagctgtaatcactaaacttgatctcatggatgcgggtactgatgccatggatgtattgatgggaagggttattccagtcaaacttggaataattggagtagttaacaggagccagctagatattaacaacaagaagagtgtaactgattcaatccgtgatgagtatgcttttcttcaaaagaaatatccatctctggccaatagaaatggaacaaagtatcttgctaggactctaaacaggttactgatgcatcacatcagagattgtttaccagagttgaaaacaagaataaatgttctagctgctcagtatcagtctcttctaaatagctacggtgaacccgtggatgataaaagtgctactttactccaacttattaccaaatttgccacagaatattgtaacactattgaaggaactgcaaaatatattgaaacttcggagctatgcggtggtgctagaatttgttatattttccatgagacttttgggcgaaccttagaatctgttgatccacttggtggccttaacactattgacattttgactgccattagaaatgctactggtcctcgtcctgctttatttgtgcctgaggtttcatttgagttactggtgaagcggcaaatcaaacgtctagaagagcccagcctccgctgtgtggaactggttcatgaggaaatgcaaaggatcattcagcactgtagcaattacagtacacaggaattgttacgatttcctaaacttcatgatgccatagttgaagtggtgacttgtcttcttcgtaaaaggttgcctgttacaaatgaaatggtccataacttagtggcaattgaactggcttatatcaacacaaaacatccagactttgctgatgcttgtgggctaatgaacaataatatagaggaacaaaggagaaacaggctagccagagaattaccttcagctgtatcacgagacaagttaattcaggacagcagaagagaaactaaaaatgttgcatctggaggtggtggggttggagatggtgttcaagaaccaaccacaggcaactggagaggaatgctgaaaacttcaaaagctgaagagttattagcagaagaaaaatcaaaacccattccaattatgccagccagtccacaaaaaggtcatgccgtgaacctgctagatgtgccagttcctgttgcacgaaaactatctgctcgggaacagcgagattgtgaggttattgaacgactcattaaatcatattttctcattgtcagaaagaatattcaagacagtgtgccaaaggcagtaatgcattttttggttaatcatgtgaaagacactcttcagagtgagctagtaggccagctgtataaatcatccttattggatgatcttctgacagaatctgaggacatggcacagcgcaggaaagaagcagctgatatgctaaaggcattacaaggagccagtcaaattattgctgaaatccgggagactcatctttggtgaagagaactatgtaatactgagactttgttgactcaaaacttgctagttactgcctacctgagtagaatcttatttatgaactcctgtgtattgcaatggtatgaatctgctcatgtggagactggctataaactgaaaagtgtattccaaattgcagaacacatcacacatttaatccaaataataaatggctgtttctaaaaaaaaaaa

SEQ ID NO: 12718 - DNA, 2445 bp, Homo sapiens
ggaggcgaactgtgggccccggccattcattgccgtggccggcgggcactggggccccgtgttttcagagtcatggaggcgctaattcctgtcataaacaagctccaggacgtcttcaacacggtgggcgccgacatcatccagctgcctcaaatcgtcgtagtgggaacgcagagcagcggaaagagctcagtgctagaaagcctggtggggagggacctgcttcccagaggtactggaattgtcacccggagacctctcattctgcaactggtccatgtgacacaagaagataaacggaaaacaacaggagaagaaaatggggtggaagcagaagaatggggtaaatttcttcacaccaaaaataagctttacacggattttgatgaaattcgacaagaaattgaaaatgaaacagaaagaatttcaggaaataataagggagtaagccctgaaccaattcatcttaagattttttcacccaacgttgtcaatttgacacttgtggatttgccaggaatgaccaaggtgcctgtaggtgatcaacctaaggatattgagcttcaaatcagagagctcattcttcggttcatcagtaatcctaattccattatcctcgctgtcactgctgctaatacagatatggcaacatcagaggcacttaaaatttcaagagaggtagatccagatggctgcagaaccctagctgtaatcactaaacttgatctcatggatgcgggtactgatgccatggatgtattgatgggaagggttattccagtcaaacttggaataattggagtagttaacaggagccagctagatattaacaacaagaagagtgtaactgattcaatccgtgatgagtatgcttttcttcaaaagaaatatccatctctggccaatagaaatggaacaaagtatcttgctaggactctaaacaggttactgatgcatcacatcagagattgtttaccagagttgaaaacaagaataaatgttctagctgctcagtatcagtctcttctaaatagctacggtgaacccgtggatgataaaagtgctactttactccaacttattaccaaatttgccacagaatattgtaacactattgaaggaactgcaaaatatattgaaacttcggagctatgcggtggtgctagaatttgttatattttccatgagacttttgggcgaaccttagaatctgttgatccacttggtggccttaacactattgacattttgactgccattagaaatgctactggtcctcgtcctgctttatttgtgcctgaggtttcatttgagttactggtgaagcggcaaatcaaacgtctagaagagcccagcctccgctgtgtggaactggttcatgaggaaatgcaaaggatcattcagcactgtagcaattacagtacacaggaattgttacgatttcctaaacttcatgatgccatagttgaagtggtgacttgtcttcttcgtaaaaggttgcctgttacaaatgaaatggtccataacttagtggcaattgaactggcttatatcaacacaaaacatccagactttgctgatgcttgtgggctaatgaacaataatatagaggaacaaaggagaaacaggctagccagagaattaccttcagctgtatcacgagacaaggttgcatctggaggtggtggggttggagatggtgttcaagaaccaaccacaggcaactggagaggaatgctgaaaacttcaaaagctgaagagttattagcagaagaaaaatcaaaacccattccaattatgccagccagtccacaaaaaggtcatgccgtgaacctgctagatgtgccagttcctgttgcacgaaaactatctgctcgggaacagcgagattgtgaggttattgaacgactcattaaatcatattttctcattgtcagaaagaatattcaagacagtgtgccaaaggcagtaatgcattttttggttaatcatgtgaaagacactcttcagagtgagctagtaggccagctgtataaatcatccttattggatgatcttctgacagaatctgaggacatggcacagcgcaggaaagaagcagctgatatgctaaaggcattacaaggagccagtcaaattattgctgaaatccgggagactcatctttggtgaagagaactatgtaatactgagactttgttgactcaaaacttgctagttactgcctacctgagtagaatcttatttatgaactcctgtgtattgcaatggtatgaatctgctcatgtggagactggctataaactgaaaagtgtattctaaattgcagaacacatcacacatttaatccaaataataaatggctgtttcaaaaaaaaaaaaaaaaaaaaaaaaaaaaaaaaaaaaaaaaaaaaaaaaaaaaaaaaaaaaaaaaaaaaaaaaaaa

SEQ ID NO: 12719 - DNA, 3795 bp, Homo sapiens
atttcctcccagcctcgtgcgggaaatggctttaattctgacggcagggctgtgagggactagcgggaacccgagccttttgtcaaggaactgcggcgtcggtggccagtcatccccgccgccgcggagccgctgcactgctgggggatctcccagcagctctgacgagcgcgggctgcagcatgggcagaaaacgctgccctgcagattagctgggtggattttttaagcgcaccccaccccccaaacccataaaataacaaaaccaacccgcagtggccgaccggagatagctaagatgccgcgcaggagtttccacctggatgtttgaggttgtgtagatgtggccggcacccttgagagtggagctagggggtgcagactgagcagtgaacagaaggagccttggacagggctgggccagcctcccgagttccaggagcgaattgcaaacccaccgggaaaatgagcgaagagacggtccccgaggctgcctcgccgccgcccccgcaggggcagccttactttgaccgcttctcagaggacgaccccgagtacatgcgccttcgcaaccgggcggcggacctgcggcaggacttcaacctgatggagcagaagaagcgcgtcaccatgatcctgcagagtccctctttcagggaggagctggaaggcctcatccaggagcagatgaagaaggggaacaactcctccaacatctgggccctgcgacagatcgcggacttcatggccagcacctcccacgcagtcttcccgacatcttccatgaatgtctccatgatgacgcctatcaatgacctccacacagctgactccctgaacctggccaaaggggagcggctcatgcggtgcaagatcagcagtgtctaccgactcctggacctctatggctgggcccagctgagtgacacctatgtcacgttgagagtcagcaaggagcaggaccacttcctgatcagccctaagggagtttcttgcagtgaagtcacagcgtccagcctgatcaaggtgaacattctgggagaggtggtggagaagggcagcagctgcttcccagtggacaccacaggcttctgtctgcactcggccatctatgcagcgaggcccgacgtgcgctgcatcatccacctgcacacaccggccacagcagcggtgtcggccatgaagtggggcctcctgcctgtctcccacaatgccctgctggtgggggacatggcctattatgacttcaatggggaaatggagcaggaagccgatcggatcaacctgcagaagtgccttggacccacctgcaagatcctggtgctaagaaaccatggagtggttgctctgggtgacacggtagaggaggcattttacaagatcttccacctgcaggctgcatgtgagatacaggtgtcggctctgtccagtgccgggggagtggagaacctcatcctcctggagcaggagaagcaccggccccatgaggtgggctccgtgcagtgggccgggagcacctttgggcctatgcagaagagtcggctgggggagcatgagtttgaggccctcatgaggatgctggacaacctgggctacagaacaggttacacgtatcgccacccctttgttcaagagaaaaccaaacacaaaagtgaggtggagattccagccacggtcacagccttcgtgtttgaggaggacggtgccccggtgcccgccctgcgacagcatgcccagaagcagcagaaggagaagacccgctggctcaatacgcccaacacctacctgcgggtcaatgtggccgatgaggtccagaggagcatgggcagcccccgacccaagaccacgtggatgaaggctgacgaggtggagaaatccagcagtggcatgccgattcgcatcgaaaacccaaaccaatttgtgcctctctatactgacccccaggaagtactggagatgaggaacaagattcgagaacaaaaccgacaagatgtgaagtcagcggggcctcagtcccagctcctggcgagcgtcattgccgagaagagccgaagcccggtagagcagaggctgcccctgactggcggggaaacgtgtttgccttcggggtcttctgtgcctggggctgggttgcaggacccctgagtcctcatacccaccttcccctgtgatcttgggtgccggtgctcttgctgcaaaatggaggccaacctcacaggggtgctgtgaggaccagggaggacaatgtctgatggcccctgtgggcactgggctggagaacagcagcccagcctgcctgcaggagtgatgcggccggcttccgtacctcctgccatggaactccactctgtcctcccttactaccccgtgaagtggggactcataggcttggggctggagactcccaggtgccccaggtgtgcccagccctgagagtctctgacctctgagcctggtatgacatcatccaaccagagctctggaaagatgatcatgtacccatagagaaggggtatatagacaggacccatgctcctacaggatgggaagggacaatattacccacacaaacccacattgagttagaaagtattgtaattgtttttgtgcttgagatagaacagtgttttgtctagtgcttagcaaaaggggtgaagttcagaattctggcatgtgtttgaaatcactgctgctccttgcaaggtagcaatgggcatgacattttccttagcagtaaaaattggggaaatacaggaaatgttcctctctgcagggcaaattgtgatgatgcaatgatttcaggtcaagactgcagcccacagggtgggtgcccattggcaggagaagtgtgaaagttgtatcatcacacttacctccccccaaccccaactcagccaagatggggaacactgaatatcccgcagggtcaagtatagaaatagccatgttctggcgggaggtgagagttcattacaatgagcaacactgttaaaaaaacaaacaaaaatctcccctgccatttataccaagtgctcttctcggagtccctcttcttgggtttttggtcttggattctcggttgactccatgattccctacattaggcctactgtggcctcccttttggaaggggcccaggggcagaagacctggcgggccagggcagggaggactggcagcctccaggctcacctccctttggcttcactctctttgctcctcagcttcagagcactgcatcctcaaaggccaagatgaggatgctgaattaggaaaaaaggctgtggagtctgaattttagttcctatcttgggctagaggggtcaaagaattcctgaagcttatgtaagggccggctggtcagctccctagaaccacgggctccacagaggtggcaaaacccagtgattttgccagtatccctgcagggacctgcggtacaggcaggttgaagatctgagactcaggaaccttggcccctttgtcacttacaactgtgtgtgaaacaggactaacagtttggactgagagcactgaagctgctgtgtgttgtgcatataacttaatgctgtgtgttgtggcttgcactgctgtgggggcggggagggcagtggtggggaatggctggcatgaagcttgcttgagccaatgctatgcttgctgggctttggctgactggctttgggccaccaactgtatttgcatagtgatggcttggaagtgtccatagaagggattgcaataaaggtgtgtcttccttctgaaaaaaaaaaaaaaaaaaaaaaaaaaaaaaaa

SEQ ID NO: 12720 - DNA, 3039 bp, Homo sapiens
atttcctcccagcctcgtgcgggaaatggctttaattctgacggcagggctgtgagggactagcgggaacccgagccttttgtcaaggaactgcggcgtcggtggccagtcatccccgccgccgcggagccgctgcactgctgggggatctcccagcagctctgacgagcgcgggctgcagcatgggcagaaaacgctgccctgcagattagctgggtggattttttaagcgcaccccaccccccaaacccataaaataacaaaaccaacccgcagtggccgaccggagatagctaagatgccgcgcaggagtttccacctggatgtttgaggttgtgtagatgtggccggcacccttgagagtggagctagggggtgcagactgagcagtgaacagaaggagccttggacagggctgggccagcctcccgagttccaggagcgaattgcaaacccaccgggaaaatgagcgaagagacggtccccgaggctgcctcgccgccgcccccgcaggggcagccttactttgaccgcttctcagaggacgaccccgagtacatgcgccttcgcaaccgggcggcggacctgcggcaggacttcaacctgatggagcagaagaagcgcgtcaccatgatcctgcagagtccctctttcagggaggagctggaaggcctcatccaggagcagatgaagaaggggaacaactcctccaacatctgggccctgcgacagatcgcggacttcatggccagcacctcccacgcagtcttcccgacatcttccatgaatgtctccatgatgacgcctatcaatgacctccacacagctgactccctgaacctggccaaaggggagcggctcatgcggtgcaagatcagcagtgtctaccgactcctggacctctatggctgggcccagctgagtgacacctatgtcacgttgagagtcagcaaggagcaggaccacttcctgatcagccctaagggagtttcttgcagtgaagtcacagcgtccagcctgatcaaggaagtactggagatgaggaacaagattcgagaacaaaaccgacaagatgtgaagtcagcggggcctcagtcccagctcctggcgagcgtcattgccgagaagagccgaagcccgtctacagagagccagctgatgtccaagggagacgaggataccaaagacgattcagaggagacggtgcccaaccccttcagccaactcactgaccaggagttggaggagtacaagaaagaggtggagaggaagaaactagaacttgatggagagaaagaaactgccccagaagagcctggctcacctgcaaagtctgcacctgcttctccagtgcagagcccagcgaaggaggcagagacaaagagccctttagtctctccttccaagtctttagaggaaggtactaagaagacagaaacaagcaaagccgccaccacagagcccgaaacaacccagccggaaggggtggtggtcaacgggagggaggaggagcagacggcagaggaaatcctcagcaaaggcctgagccagatgaccaccagtgctgacacggatgttgatacctctaaggacaaaaccgagtcggtcaccagcggccccatgtccccagagggctcaccttccaagtctccctcaaagaagaaaaagaaattccgaaccccctccttcctgaaaaagagcaaaaagaaggagaaagtggagtcctgattcatgacacccttgggctccctcctgcctcctctctctcctccccttcccttctcccatctctgtccctgcaagcacagggctaaggagggatagagtaggaccctggaccacattcggaaggggaacttagagatcacccgaccaacccttcgttttacagttgcccaagagaaatcaggtgacttgcccaaggtcacacagctagttagcggcagagcctgcactcgaattcaggtctcctgacttccagtccagtgctccttctactacacaacactgcctagttgtgggctgcctttgtttggatgctgtccaccaatctgagcctagggcaagaaggccagaaatgggccgtgagctctcacaggctcagactaaatcagaggtcaaggcttcccctgagtaaggtccatttcttcccaggaatccaatctcctgtggatggagctatctctacatttaaaaatctcttctcttttccactttgggtccctgccctgctgctcaaagtgactagccaaattgacccctccaacagaaagtaatctttgttcccaagggctgatggcttagcttgtactaccccaaacattaaccctgagctttcttcatggaacctcttgaatgatggatggaagagctataagaggtggtaggcataggggcaagccatgtaagctgaggattggggatggtttcatcaacataagaggccaggaacttgacccctttgaattgtgcatctcaggcacttcaaaactaaaaccaaatttagcataggaaaaagttgtttaatgctcagggcagaaatttggggaagttgaaatcctctgttggctttgggttgtataaggaggatcaaaacaacagaggaaatgctgactttctagctttgcatgacacctggagcaatgcactgtacctgcctcactcctgtccagtggtcaggtttcccctgaccttccctcacccccagaaacacttgcttacagaccgaaactggcatcttactcttggcaccttgacttgcaccctctgaggttccaactcagtcattctttgtccagcagaggagaatcagaaatgagcccttcaggattaatcctcttgcaccagctctcagagaaatgctgggtatccctgtccttgtccctatctgtccatcctggggcctggtaatggccacagttattgttttaaatgccaacactgtcttctcatgttcttccgtggggcattgattaatgagcatttgttggctcctaaaaattagacaatccattctcttgaaaaaaaaaaaaaaaaaaa

SEQ ID NO: 12721 - DNA, 4043 bp, Homo sapiens
atttcctcccagcctcgtgcgggaaatggctttaattctgacggcagggctgtgagggactagcgggaacccgagccttttgtcaaggaactgcggcgtcggtggccagtcatccccgccgccgcggagccgctgcactgctgggggatctcccagcagctctgacgagcgcgggctgcagcatgggcagaaaacgctgccctgcagattagctgggtggattttttaagcgcaccccaccccccaaacccataaaataacaaaaccaacccgcagtggccgaccggagatagctaagatgccgcgcaggagtttccacctggatgtttgaggttgtgtagatgtggccggcacccttgagagtggagctagggggtgcagactgagcagtgaacagaaggagccttggacagggctgggccagcctcccgagttccaggagcgaattgcaaacccaccgggaaaatgagcgaagagacggtccccgaggctgcctcgccgccgcccccgcaggggcagccttactttgaccgcttctcagaggacgaccccgagtacatgcgccttcgcaaccgggcggcggacctgcggcaggacttcaacctgatggagcagaagaagcgcgtcaccatgatcctgcagagtccctctttcagggaggagctggaaggcctcatccaggagcagatgaagaaggggaacaactcctccaacatctgggccctgcgacagatcgcggacttcatggccagcacctcccacgcagtcttcccgacatcttccatgaatgtctccatgatgacgcctatcaatgacctccacacagctgactccctgaacctggccaaaggggagcggctcatgcggtgcaagatcagcagtgtctaccgactcctggacctctatggctgggcccagctgagtgacacctatgtcacgttgagagtcagcaaggagcaggaccacttcctgatcagccctaagggagtttcttgcagtgaagtcacagcgtccagcctgatcaaggtgaacattctgggagaggtggtggagaagggcagcagctgcttcccagtggacaccacaggcttctgtctgcactcggccatctatgcagcgaggcccgacgtgcgctgcatcatccacctgcacacaccggccacagcagcggtgtcggccatgaagtggggcctcctgcctgtctcccacaatgccctgctggtgggggacatggcctattatgacttcaatggggaaatggagcaggaagccgatcggatcaacctgcagaagtgccttggacccacctgcaagatcctggtgctaagaaaccatggagtggttgctctgggtgacacggtagaggaggcattttacaagatcttccacctgcaggctgcatgtgagatacaggtgtcggctctgtccagtgccgggggagtggagaacctcatcctcctggagcaggagaagcaccggccccatgaggtgggctccgtgcagtgggccgggagcacctttgggcctatgcagaagagtcggctgggggagcatgagtttgaggccctcatgaggatgctggacaacctgggctacagaacaggttacacgtatcgccacccctttgttcaagagaaaaccaaacacaaaagtgaggtggagattccagccacggtcacagccttcgtgtttgaggaggacggtgccccggtgcccgccctgcgacagcatgcccagaagcagcagaaggagaagacccgctggctcaatacgcccaacacctacctgcgggtcaatgtggccgatgaggtccagaggagcatgggcagcccccgacccaagaccacgtggatgaaggctgacgaggtggagaaatccagcagtggcatgccgattcgcatcgaaaacccaaaccaatttgtgcctctctatactgacccccaggaagtactggagatgaggaacaagattcgagaacaaaaccgacaagatgtgaagtcagcggggcctcagtcccagctcctggcgagcgtcattgccgagaagagccgaagcccgtctacagagagccagctgatgtccaagggagacgaggataccaaagacgattcagaggagacggtgcccaaccccttcagccaactcactgaccaggagttggaggagtacaagaaagaggtggagaggaagaaactagaacttgatgagacaggacaggaacgagagccaggctctggtccggccgtgtgcgagttcttcagcgttgccctccacatctggagtaacatattggagagaaagaaactgccccagaagagcctggctcacctgcaaagtctgcacctgcttctccagtgcagagcccagcgaaggaggcagagacaaagagccctttagtctctccttccaagtctttagaggaaggtactaagaagacagaaacaagcaaagccgccaccacagagcccgaaacaacccagccggaaggggtggtggtcaacgggagggaggaggagcagacggcagaggaaatcctcagcaaaggcctgagccagatgaccaccagtgctgacacggatgttgatacctctaaggacaaaaccgagtcggtcaccagcggccccatgtccccagagggctcaccttccaagtctccctcaaagaagaaaaagaaattccgaaccccctccttcctgaaaaagagcaaaaagaaggagaaagtggagtcctgattcatgacacccttgggctccctcctgcctcctctctctcctccccttcccttctcccatctctgtccctgcaagcacagggctaaggagggatagagtaggaccctggaccacattcggaaggggaacttagagatcacccgaccaacccttcgttttacagttgcccaagagaaatcaggtgacttgcccaaggtcacacagctagttagcggcagagcctgcactcgaattcaggtctcctgacttccagtccagtgctccttctactacacaacactgcctagttgtgggctgcctttgtttggatgctgtccaccaatctgagcctagggcaagaaggccagaaatgggccgtgagctctcacaggctcagactaaatcagaggtcaaggcttcccctgagtaaggtccatttcttcccaggaatccaatctcctgtggatggagctatctctacatttaaaaatctcttctcttttccactttgggtccctgccctgctgctcaaagtgactagccaaattgacccctccaacagaaagtaatctttgttcccaagggctgatggcttagcttgtactaccccaaacattaaccctgagctttcttcatggaacctcttgaatgatggatggaagagctataagaggtggtaggcataggggcaagccatgtaagctgaggattggggatggtttcatcaacataagaggccaggaacttgacccctttgaattgtgcatctcaggcacttcaaaactaaaaccaaatttagcataggaaaaagttgtttaatgctcagggcagaaatttggggaagttgaaatcctctgttggctttgggttgtataaggaggatcaaaacaacagaggaaatgctgactttctagctttgcatgacacctggagcaatgcactgtacctgcctcactcctgtccagtggtcaggtttcccctgaccttccctcacccccagaaacacttgcttacagaccgaaactggcatcttactcttggcaccttgacttgcaccctctgaggttccaactcagtcattctttgtccagcagaggagaatcagaaatgagcccttcaggattaatcctcttgcaccagctctcagagaaatgctgggtatccctgtccttgtccctatctgtccatcctggggcctggtaatggccacagttattgttttaaatgccaacactgtcttctcatgttcttccgtggggcattgattaatgagcatttgttggctcctaaaaattagacaatccattctcttgaaaaaaaaaaaaaaaaaaa

SEQ ID NO: 12722 - DNA, 2877 bp, Homo sapiens
atttcctcccagcctcgtgcgggaaatggctttaattctgacggcagggctgtgagggactagcgggaacccgagccttttgtcaaggaactgcggcgtcggtggccagtcatccccgccgccgcggagccgctgcactgctgggggatctcccagcagctctgacgagcgcgggctgcagcatgggcagaaaacgctgccctgcagattagctgggtggattttttaagcgcaccccaccccccaaacccataaaataacaaaaccaacccgcagtggccgaccggagatagctaagatgccgcgcaggagtttccacctggatgtttgaggttgtgtagatgtggccggcacccttgagagtggagctagggggtgcagactgagcagtgaacagaaggagccttggacagggctgggccagcctcccgagttccaggagcgaattgcaaacccaccgggaaaatgagcgaagagacggtccccgaggctgcctcgccgccgcccccgcaggggcagccttactttgaccgcttctcagaggacgaccccgagtacatgcgccttcgcaaccgggcggcggacctgcggcaggacttcaacctgatggagcagaagaagcgcgtcaccatgatcctgcagagtccctctttcagggaggagctggaaggcctcatccaggagcagatgaagaaggggaacaactcctccaacatctgggccctgcgacagatcgcggacttcatggccagcacctcccacgcagtcttcccgacatcttccatgaatgtctccatgatgacgcctatcaatgacctccacacagctgactccctgaacctggccaaaggggagcggctcatgcggtgcaagatcagcagtgtctaccgactcctggacctctatggctgggcccagctgagtgacacctatgtcacgttgagagtcagcaaggagcaggaccacttcctgatcagccctaagggagtttcttgcagtgaagtcacagcgtccagcctgatcaaggaagtactggagatgaggaacaagattcgagaacaaaaccgacaagatgtgaagtcagcggggcctcagtcccagctcctggcgagcgtcattgccgagaagagccgaagcccggtagagcagaggctgcccctgactggcggggaaacgtgtttgccttcggggtcttctgtgcctggggctgggttgcaggacccctgagtcctcatacccaccttcccctgtgatcttgggtgccggtgctcttgctgcaaaatggaggccaacctcacaggggtgctgtgaggaccagggaggacaatgtctgatggcccctgtgggcactgggctggagaacagcagcccagcctgcctgcaggagtgatgcggccggcttccgtacctcctgccatggaactccactctgtcctcccttactaccccgtgaagtggggactcataggcttggggctggagactcccaggtgccccaggtgtgcccagccctgagagtctctgacctctgagcctggtatgacatcatccaaccagagctctggaaagatgatcatgtacccatagagaaggggtatatagacaggacccatgctcctacaggatgggaagggacaatattacccacacaaacccacattgagttagaaagtattgtaattgtttttgtgcttgagatagaacagtgttttgtctagtgcttagcaaaaggggtgaagttcagaattctggcatgtgtttgaaatcactgctgctccttgcaaggtagcaatgggcatgacattttccttagcagtaaaaattggggaaatacaggaaatgttcctctctgcagggcaaattgtgatgatgcaatgatttcaggtcaagactgcagcccacagggtgggtgcccattggcaggagaagtgtgaaagttgtatcatcacacttacctccccccaaccccaactcagccaagatggggaacactgaatatcccgcagggtcaagtatagaaatagccatgttctggcgggaggtgagagttcattacaatgagcaacactgttaaaaaaacaaacaaaaatctcccctgccatttataccaagtgctcttctcggagtccctcttcttgggtttttggtcttggattctcggttgactccatgattccctacattaggcctactgtggcctcccttttggaaggggcccaggggcagaagacctggcgggccagggcagggaggactggcagcctccaggctcacctccctttggcttcactctctttgctcctcagcttcagagcactgcatcctcaaaggccaagatgaggatgctgaattaggaaaaaaggctgtggagtctgaattttagttcctatcttgggctagaggggtcaaagaattcctgaagcttatgtaagggccggctggtcagctccctagaaccacgggctccacagaggtggcaaaacccagtgattttgccagtatccctgcagggacctgcggtacaggcaggttgaagatctgagactcaggaaccttggcccctttgtcacttacaactgtgtgtgaaacaggactaacagtttggactgagagcactgaagctgctgtgtgttgtgcatataacttaatgctgtgtgttgtggcttgcactgctgtgggggcggggagggcagtggtggggaatggctggcatgaagcttgcttgagccaatgctatgcttgctgggctttggctgactggctttgggccaccaactgtatttgcatagtgatggcttggaagtgtccatagaagggattgcaataaaggtgtgtcttccttctgaaaaaaaaaaaaaaaaaaaaaaaaaaaaaaaa

SEQ ID NO: 12723 - DNA, 3957 bp, Homo sapiens
atttcctcccagcctcgtgcgggaaatggctttaattctgacggcagggctgtgagggactagcgggaacccgagccttttgtcaaggaactgcggcgtcggtggccagtcatccccgccgccgcggagccgctgcactgctgggggatctcccagcagctctgacgagcgcgggctgcagcatgggcagaaaacgctgccctgcagattagctgggtggattttttaagcgcaccccaccccccaaacccataaaataacaaaaccaacccgcagtggccgaccggagatagctaagatgccgcgcaggagtttccacctggatgtttgaggttgtgtagatgtggccggcacccttgagagtggagctagggggtgcagactgagcagtgaacagaaggagccttggacagggctgggccagcctcccgagttccaggagcgaattgcaaacccaccgggaaaatgagcgaagagacggtccccgaggctgcctcgccgccgcccccgcaggggcagccttactttgaccgcttctcagaggacgaccccgagtacatgcgccttcgcaaccgggcggcggacctgcggcaggacttcaacctgatggagcagaagaagcgcgtcaccatgatcctgcagagtccctctttcagggaggagctggaaggcctcatccaggagcagatgaagaaggggaacaactcctccaacatctgggccctgcgacagatcgcggacttcatggccagcacctcccacgcagtcttcccgacatcttccatgaatgtctccatgatgacgcctatcaatgacctccacacagctgactccctgaacctggccaaaggggagcggctcatgcggtgcaagatcagcagtgtctaccgactcctggacctctatggctgggcccagctgagtgacacctatgtcacgttgagagtcagcaaggagcaggaccacttcctgatcagccctaagggagtttcttgcagtgaagtcacagcgtccagcctgatcaaggtgaacattctgggagaggtggtggagaagggcagcagctgcttcccagtggacaccacaggcttctgtctgcactcggccatctatgcagcgaggcccgacgtgcgctgcatcatccacctgcacacaccggccacagcagcggtgtcggccatgaagtggggcctcctgcctgtctcccacaatgccctgctggtgggggacatggcctattatgacttcaatggggaaatggagcaggaagccgatcggatcaacctgcagaagtgccttggacccacctgcaagatcctggtgctaagaaaccatggagtggttgctctgggtgacacggtagaggaggcattttacaagatcttccacctgcaggctgcatgtgagatacaggtgtcggctctgtccagtgccgggggagtggagaacctcatcctcctggagcaggagaagcaccggccccatgaggtgggctccgtgcagtgggccgggagcacctttgggcctatgcagaagagtcggctgggggagcatgagtttgaggccctcatgaggatgctggacaacctgggctacagaacaggttacacgtatcgccacccctttgttcaagagaaaaccaaacacaaaagtgaggtggagattccagccacggtcacagccttcgtgtttgaggaggacggtgccccggtgcccgccctgcgacagcatgcccagaagcagcagaaggagaagacccgctggctcaatacgcccaacacctacctgcgggtcaatgtggccgatgaggtccagaggagcatgggcagcccccgacccaagaccacgtggatgaaggctgacgaggtggagaaatccagcagtggcatgccgattcgcatcgaaaacccaaaccaatttgtgcctctctatactgacccccaggaagtactggagatgaggaacaagattcgagaacaaaaccgacaagatgtgaagtcagcggggcctcagtcccagctcctggcgagcgtcattgccgagaagagccgaagcccgtctacagagagccagctgatgtccaagggagacgaggataccaaagacgattcagaggagacggtgcccaaccccttcagccaactcactgaccaggagttggaggagtacaagaaagaggtggagaggaagaaactagaacttgatggagagaaagaaactgccccagaagagcctggctcacctgcaaagtctgcacctgcttctccagtgcagagcccagcgaaggaggcagagacaaagagccctttagtctctccttccaagtctttagaggaaggtactaagaagacagaaacaagcaaagccgccaccacagagcccgaaacaacccagccggaaggggtggtggtcaacgggagggaggaggagcagacggcagaggaaatcctcagcaaaggcctgagccagatgaccaccagtgctgacacggatgttgatacctctaaggacaaaaccgagtcggtcaccagcggccccatgtccccagagggctcaccttccaagtctccctcaaagaagaaaaagaaattccgaaccccctccttcctgaaaaagagcaaaaagaaggagaaagtggagtcctgattcatgacacccttgggctccctcctgcctcctctctctcctccccttcccttctcccatctctgtccctgcaagcacagggctaaggagggatagagtaggaccctggaccacattcggaaggggaacttagagatcacccgaccaacccttcgttttacagttgcccaagagaaatcaggtgacttgcccaaggtcacacagctagttagcggcagagcctgcactcgaattcaggtctcctgacttccagtccagtgctccttctactacacaacactgcctagttgtgggctgcctttgtttggatgctgtccaccaatctgagcctagggcaagaaggccagaaatgggccgtgagctctcacaggctcagactaaatcagaggtcaaggcttcccctgagtaaggtccatttcttcccaggaatccaatctcctgtggatggagctatctctacatttaaaaatctcttctcttttccactttgggtccctgccctgctgctcaaagtgactagccaaattgacccctccaacagaaagtaatctttgttcccaagggctgatggcttagcttgtactaccccaaacattaaccctgagctttcttcatggaacctcttgaatgatggatggaagagctataagaggtggtaggcataggggcaagccatgtaagctgaggattggggatggtttcatcaacataagaggccaggaacttgacccctttgaattgtgcatctcaggcacttcaaaactaaaaccaaatttagcataggaaaaagttgtttaatgctcagggcagaaatttggggaagttgaaatcctctgttggctttgggttgtataaggaggatcaaaacaacagaggaaatgctgactttctagctttgcatgacacctggagcaatgcactgtacctgcctcactcctgtccagtggtcaggtttcccctgaccttccctcacccccagaaacacttgcttacagaccgaaactggcatcttactcttggcaccttgacttgcaccctctgaggttccaactcagtcattctttgtccagcagaggagaatcagaaatgagcccttcaggattaatcctcttgcaccagctctcagagaaatgctgggtatccctgtccttgtccctatctgtccatcctggggcctggtaatggccacagttattgttttaaatgccaacactgtcttctcatgttcttccgtggggcattgattaatgagcatttgttggctcctaaaaattagacaatccattctcttgaaaaaaaaaaaaaaaaaaa

SEQ ID NO: 12724 - DNA, 3184 bp, Homo sapiens
gcctgctgctggccgggcgggggacggggccgggaccggagccggagctgcggggcgcaccggctagacgcgcgcgggattctcggcgggcacgccccgcggaccatgagcgtccccagctccgggagcagccgcggcgcgggcggtgcgaggccggccgcgcggcgcctttgagccccagccggaggtccagagatcctgagagcccgagcgcccagcgccgcgccgggagagttgagaattatggctgcaggaaaatttgcaagccttcccagaaacatgccggtgaatcaccagttccccctggcctcatccatggaccttctgagcagcaggtcccctctcgctgagcatcgcccagatgcctatcaagatgtgtctatacatggcacccttccacggaagaaaaaaggtcctcctcccataaggtcctgtgatgacttcagtcacatgggcaccctcccccactccaaatccccacggcagaactcgcctgtgacccaggatggcatccaggagagcccatggcaggaccggcacggcgaaaccttcaccttcagggatccacatcttctggacccaactgtggaatatgtgaagttctccaaggagaggcacatcatggacaggacccccgagaaactgaagaaggagctggaggaggagctgctcctgagcagcgaggacctgcgcagccatgcctggtaccacggccgcatcccccgacaggtgtctgaaaaccttgtgcagcgagatggtgacttcctagttcgtgactctctgtccagccctgggaactttgtcctgacctgtcagtggaagaacctcgctcagcacttcaaaatcaaccggacagttctgcgactcagcgaggcctacagccgcgtgcagtaccagttcgagatggagagcttcgactccatccccggcctggtgcgctgctacgtgggcaaccgccggcccatctcccagcagagtggcgccatcatcttccagcccatcaacaggacggtgcctctgcggtgcctggaggagcattatggcacctccccaggccaggcccgggagggcagcctcaccaagggaaggccggatgtggccaagaggctgagcctcaccatgggtggcgtccaggcccgagagcagaatttgcccaggggaaacctcctcagaaacaaagaaaagagtggtagccagcccgcctgcctggatcacatgcaggacagaagagccttgtccctcaaagcccaccagtcagagagctacctgccgattggctgcaagctgccacctcagtcctcgggtgtggacacaagcccctgcccaaactcacctgtgttcaggacgggaagcgagcctgccctgagcccagcagtggttcggagggtctcctcagacgccagggctggggaggcgctgaggggatcagacagtcaactgtgccctaagcccccgcctaagccctgcaaggtgccgttcctcaaggttccctcgtctccctctgcctggctcaactcagaggccaactactgtgaactgaacccagcgtttgccacaggctgcggcaggggagcaaagctaccctcatgtgcccagggaagccacacagaactgctcacagccaagcagaatgaggcgccaggtccccggaactctggcgtcaactacttgatccttgatgatgatgacagggaaagaccttgggaacctgcggcagctcagatggagaaggggcagtgggacaagggcgagtttgtgacgcccctcctggagactgtctcctccttcaggcccaacgagtttgagtcaaagttccttccccctgagaataagcccctggaaacagcaatgttgaaacgtgcaaaagaactgttcaccaacaacgaccccaaggtcatcgcccagcacgtactgagcatggactgcagggttgctaggatacttggagtctctgaagagatgaggaggaacatgggggtgagctcaggcctggaactcattaccttgcctcacggacaccagctgcgcctggacataattgaaagacacaacacaatggccatcggcattgcagtggacattctgggatgcacgggcactttggaggaccgagcggccactctgagtaagatcatccaggtggcggtggaactgaaggattccatgggggacctctattccttctcagctctcatgaaagccctggaaatgccacagatcacaaggttagaaaagacgtggactgctctgcggcaccagtacacccaaactgccattctctatgagaaacagctgaagcccttcagcaaactcctgcatgaaggcagagagtccacatgtgttcccccaaacaatgtatcagtcccactgctgatgccgcttgtgacgttaatggagcgccaggctgtgacttttgaaggaaccgacatgtgggaaaaaaacgaccagagctgtgaaatcatgctgaaccatttggcaacagcgcgattcatggccgaggctgcagacagctaccggatgaatgctgagaggatcctggcaggttttcaaccagatgaagaaatgaatgaaatctgcaagactgaatttcaaatgcgattgctatggggcagcaaaggtgcacaagtcaatcagacagagagatatgagaaattcaaccagattttaactgccctctcgcgtaaattggaacctcctcctgtaaagcaggcagagctttgataactctccagagaacctttagaatatcttttcaagtttccccagcttcatctttgggaaagcttactgtttttgataaagtaataatgtgcaaatctgacaatatacaagcttttagtatccacaggatattaaacgtgtaaattgcacagagcacacttatttatgaattgtctaaagttactactgattttaaaatgaataatttattattaaggtaactactgctaatgttgatcagcaaatttaagagaagacctagctatgttggctggttgctttctattatcatggtatttgaccattttagttttaattccatgtcagataagtgtaaatagaagagtttaaaagcatgaaacatttcagaaggtatcagttatatgatattctttaaacaaatatgaaaaatgtaaatactcatgaatgaaaatacatctttttgtgaaaaaaaaaaaaaaaa

SEQ ID NO: 12725 - DNA, 4740 bp, Homo sapiens
ttccggtttttctcaggggacgttgaaattatttttgtaacgggagtcgggagaggacggggcgtgccccgcgtgcgcgcgcgtcgtcctccccggcgctcctccacagctcgctggctcccgccgcggaaaggcgtcatgccgcccaaaaccccccgaaaaacggccgccaccgccgccgctgccgccgcggaacccccggcaccgccgccgccgccccctcctgaggaggacccagagcaggacagcggcccggaggacctgcctctcgtcaggcttgagtttgaagaaacagaagaacctgattttactgcattatgtcagaaattaaagataccagatcatgtcagagagagagcttggttaacttgggagaaagtttcatctgtggatggagtattgggaggttatattcaaaagaaaaaggaactgtggggaatctgtatctttattgcacgagttgacctagatgagatgtcgttcactttactgagctacagaaaaacatacgaaatcagtgtccataaattctttaacttactaaaagaaattgataccagtaccaaagttgataatgctatgtcaagactgttgaagaagtatgatgtattgtttgcactcttcagcaaattggaaaggacatgtgaacttatatatttgacacaacccagcagttcgatatctactgaaataaattctgcattggtgctaaaagtttcttggatcacatttttattagctaaaggggaagtattacaaatggaagatgatctggtgatttcatttcagttaatgctatgtgtccttgactattttattaaactctcacctcccatgttgctcaaagaaccatataaaacagctgttatacccattaatggttcacctcgaacacccaggcgaggtcagaacaggagtgcacggatagcaaaacaactagaaaatgatacaagaattattgaagttctctgtaaagaacatgaatgtaatatagatgaggtgaaaaatgtttatttcaaaaattttataccttttatgaattctcttggacttgtaacatctaatggacttccagaggttgaaaatctttctaaacgatacgaagaaatttatcttaaaaataaagatctagatcgaagattatttttggatcatgataaaactcttcagactgattctatagacagttttgaaacacagagaacaccacgaaaaagtaaccttgatgaagaggtgaatataattcctccacacactccagttaggactgttatgaacactatccaacaattaatgatgattttaaattctgcaagtgatcaaccttcagaaaatctgatttcctattttaacaactgcacagtgaatccaaaagaaagtatactgaaaagagtgaaggatataggatacatctttaaagagaaatttgctaaagctgtgggacagggttgtgtcgaaattggatcacagcgatacaaacttggagttcgcttgtattaccgagtaatggaatccatgcttaaatcagaagaagaacgattatccattcaaaattttagcaaacttctgaatgacaacatttttcatatgtctttattggcgtgcgctcttgaggttgtaatggccacatatagcagaagtacatctcagaatcttgattctggaacagatttgtctttcccatggattctgaatgtgcttaatttaaaagcctttgatttttacaaagtgatcgaaagttttatcaaagcagaaggcaacttgacaagagaaatgataaaacatttagaacgatgtgaacatcgaatcatggaatcccttgcatggctctcagattcacctttatttgatcttattaaacaatcaaaggaccgagaaggaccaactgatcaccttgaatctgcttgtcctcttaatcttcctctccagaataatcacactgcagcagatatgtatctttctcctgtaagatctccaaagaaaaaaggttcaactacgcgtgtaaattctactgcaaatgcagagacacaagcaacctcagccttccagacccagaagccattgaaatctacctctctttcactgttttataaaaaagtgtatcggctagcctatctccggctaaatacactttgtgaacgccttctgtctgagcacccagaattagaacatatcatctggacccttttccagcacaccctgcagaatgagtatgaactcatgagagacaggcatttggaccaaattatgatgtgttccatgtatggcatatgcaaagtgaagaatatagaccttaaattcaaaatcattgtaacagcatacaaggatcttcctcatgctgttcaggagacattcaaacgtgttttgatcaaagaagaggagtatgattctattatagtattctataactcggtcttcatgcagagactgaaaacaaatattttgcagtatgcttccaccaggccccctaccttgtcaccaatacctcacattcctcgaagcccttacaagtttcctagttcacccttacggattcctggagggaacatctatatttcacccctgaagagtccatataaaatttcagaaggtctgccaacaccaacaaaaatgactccaagatcaagaatcttagtatcaattggtgaatcattcgggacttctgagaagttccagaaaataaatcagatggtatgtaacagcgaccgtgtgctcaaaagaagtgctgaaggaagcaaccctcctaaaccactgaaaaaactacgctttgatattgaaggatcagatgaagcagatggaagtaaacatctcccaggagagtccaaatttcagcagaaactggcagaaatgacttctactcgaacacgaatgcaaaagcagaaaatgaatgatagcatggatacctcaaacaaggaagagaaatgaggatctcaggaccttggtggacactgtgtacacctctggattcattgtctctcacagatgtgactgtataactttcccaggttctgtttatggccacatttaatatcttcagctctttttgtggatataaaatgtgcagatgcaattgtttgggtgagtcctaagccacttgaaatgttagtcattgttatttatacaagattgaaaatcttgtgtaaatcctgccatttaaaaagttgtagcagattgtttcctcttccaaagtaaaattgctgtgctttatggatagtaagaatggccctagagtgggagtcctgataacccaggcctgtctgactactttgccttcttttgtagcatataggtgatgtttgctcttgtttttattaatttatatgtatatttttttaatttaacatgaacacccttagaaaatgtgtcctatctatcttccaaatgcaatttgattgactgcccattcaccaaaattatcctgaactcttctgcaaaaatggatattattagaaattagaaaaaaattactaattttacacattagattttattttactattggaatctgatatactgtgtgcttgttttataaaattttgcttttaattaaataaaagctggaagcaaagtataaccatatgatactatcatactactgaaacagatttcatacctcagaatgtaaaagaacttactgattattttcttcatccaacttatgtttttaaatgaggattattgatagtactcttggtttttataccattcagatcactgaatttataaagtacccatctagtacttgaaaaagtaaagtgttctgccagatcttaggtatagaggaccctaacacagtatatcccaagtgcactttctaatgtttctgggtcctgaagaattaagatacaaattaattttactccataaacagactgttaattataggagccttaatttttttttcatagagatttgtctaattgcatctcaaaattattctgccctccttaatttgggaaggtttgtgttttctctggaatggtacatgtcttccatgtatcttttgaactggcaattgtctatttatcttttatttttttaagtcagtatggtctaacactggcatgttcaaagccacattatttctagtccaaaattacaagtaatcaagggtcattatgggttaggcattaatgtttctatctgattttgtgcaaaagcttcaaattaaaacagctgcattagaaaaagaggcgcttctcccctcccctacacctaaaggtgtatttaaactatcttgtgtgattaacttatttagagatgctgtaacttaaaataggggatatttaaggtagcttcagctagcttttaggaaaatcactttgtctaactcagaattatttttaaaaagaaatctggtcttgttagaaaacaaaattttattttgtgctcatttaagtttcaaacttactattttgacagttattttgataacaatgacactagaaaacttgactccatttcatcattgtttctgcatgaatatcatacaaatcagttagtttttaggtcaagggcttactatttctgggtcttttgctactaagttcacattagaattagtgccagaattttaggaacttcagagatcgtgtattgagatttcttaaataatgcttcagatattattgctttattgcttttttgtattggttaaaactgtacatttaaaattgctatgttactattttctacaattaatagtttgtctattttaaaataaattagttgttaagagtc

SEQ ID NO: 12726 - DNA, 10123 bp, Homo sapiens
cggcggagccccggcggggcgtttggtttcggtttggccctgactgggattagtgttgacgatcgaaatgggagtccccaagttttacagatggatctcagagcggtatccctgtctcagcgaagtggtgaaagagcatcagattcctgaatttgacaacttgtacctggatatgaatggaattatacatcagtgctcccatcctaatggtgatgatgttcactttagaatttcagatgataaaatctttactgatatttttcactacctggaggtgttgtttcgcattattaaacccaggaaagtgttctttatggctgtagatggtgtggctcctcgagcaaaaatgaaccagcagcgtgggaggcgttttaggtcagcaaaggaggcagaagacaaaattaaaaaggcaatagagaagggagaaactcttcctacagaggccagatttgattccaactgtatcacaccaggaactgaatttatggccaggttacatgaacatctgaagtattttgtaaatatgaaaatttccacagacaagtcatggcaaggagttaccatctacttctcaggccatgagactcctggagaaggagagcataaaatcatggaatttatcagatccgagaaagcaaagccagatcatgatccaaacaccagacactgtctttatggtttagatgctgacttgattatgcttggattaacaagtcatgaggcacatttttctctcttaagagaagaagttcgatttggtggcaaaaaaacacaacgggtatgtgctccagaagaaactacatttcaccttctacacttgtctttaatgagagagtatattgactatgagttttcagtattaaaagaaaagatcacatttaaatatgatattgaaaggataatagatgattggattttgatggggtttcttgttggtaatgattttatccctcatctacctcatttacatattaatcatgatgcactgcctcttctttatggaacatatgttaccatcctgccagaacttgggggttatattaatgaaagtgggcacctcaacttacctcgatttgagaaataccttgtgaaactatcagattttgatcgggagcacttcagtgaagtttttgtggacctaaaatggtttgaaagcaaagttggtaacaagtacctcaatgaagcagcaggtgtcgcagcagaagaagccaggaactacaaggaaaagaaaaagttaaagggccaggaaaattctctgtgttggactgctttagacaaaaatgaaggcgaaatgataacttctaaggataatttagaagatgagactgaagatgatgacctatttgaaactgagtttagacaatataaaagaacatattacatgacgaagatgggggttgacgtagtatctgatgactttctggctgatcaagctgcatgttatgttcaggcaatacagtggattttgcactattactatcatggagttcagtcctggagctggtattatccttatcattatgcacctttcctgtctgatatacacaacatcagtacactcaaaatccattttgaactaggaaaaccttttaagccatttgaacagcttcttgctgtacttccagcagccagcaaaaatttacttcctgcatgctaccagcatttgatgaccaatgaagactcaccaattatagaatattacccacctgattttaaaactgacctaaatgggaaacaacaggaatgggaagctgtggtgttaatcccttttattgatgagaagcgattattggaagccatggagacatgtaaccactccctcaaaaaggaagagaggaaaagaaaccaacatagtgagtgcctaatgtgctggtatgatagagacacagagtttatctatccttctccatggccagaaaagttccctgccatagaacgatgttgtacaaggtataaaataatatccttagatgcttggcgtgtagacataaacaaaaacaaaataaccagaattgaccagaaagcattatatttctgtggatttcctactctgaaacacatcagacacaaattttttttgaagaaaagtggtgttcaagtattccagcaaagcagtcgtggagaaaacatgatgttggaaatcttagtggatgcagaatcagatgaacttaccgtagaaaatgtagcttcatcagtgcttggaaaatctgtctttgttaattggcctcacattgaggaagctagagtcgtggctgtatcagatggagaaactaagttttacttggaagaacctccaggaacacagaagctttattcaggaagaactgccccaccatctaaagtggttcatcttggagataaagaacaatctaactgggcaaaagaagtacaaggaatttcagaacactacctgagaagaaaaggaataataataaatgaaacatctgcagttgtgtatgctcagttactcacaggtcgtaaatatcaaataaatcaaaatggtgaagttcgtctagagaaacagtggtcaaaacaagttgttccttttgtttatcaaactattgtcaaggacatccgagctttcgactcccgtttctccaatatcaaaacattggatgatttgtttcctctgagaagtatggtctttatgctgggaactccctattatggctgcactggagaagttcaggattcaggtgatgtgattacagaaggtaggattcgtgtgattttcagcattccatgtgaacccaatcttgatgctttaatacagaaccagcataaatattctataaagtacaacccaggatatgtgttggccagtcgccttggagtgagtggataccttgtttcaaggtttacaggaagtatttttattggaagaggatctaggagaaaccctcatggagaccataaagcaaatgtgggtttaaatctcaaattcaacaagaaaaatgaggaggtacctggatatactaagaaagttggaagtgaatggatgtattcatctgcagcagaacaacttctggcagagtacttagagagagctccagaactatttagttatatagccaaaaatagccaagaggatgtgttctatgaagatgacatttggcctggagaaaatgagaatggtgctgaaaaagttcaagaaattattacttggctaaaaggacatcctgtcagtactttatctcgttcttcttgtgatttacaaattctggatgcagctattgttgagaaaattgaggaagaagtcgaaaagtgcaagcaaagaaagaataataagaaggtgcgagtaacagtgaaaccccatttgctatacagacctttagaacagcaacatggagtcattcctgatcgggatgcagaattttgtctttttgaccgtgttgtaaatgtgagagaaaacttctcagttccagttggccttcgaggcaccatcataggaataaaaggagctaatagagaagccgatgtactatttgaagtattatttgatgaagaatttcctggagggttaacaataagatgctcacctggtagaggttatcgactgccaacaagtgccttggtgaacctttctcatgggagtcgctctgaaactggaaatcagaagttgacagccatcgtaaaaccacaaccagctgtacatcaacatagctcaagttcatcagtttcctctgggcatttgggagccctcaaccattcccctcaatcactttttgttcctactcaagtacctactaaagatgatgatgaattctgcaacatttggcagtccttacagggatctggaaagatgcaatactttcagccaactatacaagagaagggtgcagttctacctcaagaaataagccaagtaaatcaacatcataaatctggctttaatgacaacagtgttaaatatcagcaaagaaaacatgaccctcacagaaaatttaaagaagagtgtaagagtcctaaagctgagtgttggtcccaaaaaatgtccaataagcagcctaactctggaattgagaactttttagcatctttgaatatctccaaagaaaatgaagtacagtcatctcatcatggggagcctccaagtgaagagcatttgtcaccacagtcatttgccatgggaacacggatgcttaaagaaattctaaaaattgatggctctaacactgtggaccataagaatgaaatcaaacagattgctaatgaaatccctgtttcctctaacagaagagatgaatatggattaccctctcagcctaaacaaaataagaaattagcatcttatatgaacaagcctcacagtgctaatgagtaccataatgttcagtctatggacaatatgtgttggcctgcccccagccagatccctcctgtatccacaccagtaactgaactttctcgaatttgttcccttgttggaatgccacaacctgatttctccttttttaggatgccacagacaatgaccgtttgccaagtaaaattatctaatggcttactggtacatgggccacagtgccactctgaaaatgaagccaaagagaaagctgcactttttgctttacaacagttgggctccttaggcatgaatttccctttgccttcacaagtatttgcaaattatccttcagctgtaccacctggaaccattcctccagcctttcccccacctactggctgggatcactatggaagcaactatgcattgggggcagctaatataatgccttcgtcgtctcatctctttggctcaatgccatggggaccatcggtgccagttcctgggaagcccttccatcatactttatattctgggaccatgcccatggctgggggaataccagggggtgtgcacaatcagtttatacctctgcaggttactaaaaaaagggttgcaaacaaaaagaactttgagaataaggaagcccagagttctcaagccactccagttcagactagccagccagattcttccaacattgtcaaagtaagtccacgggagagctcatcagcttctttgaagtcctctccgattgctcaacctgcatcttcttttcaagttgaaactgcctctcaaggccatagtatatctcaccataagtcaacaccaatctcttcttcaagaagaaaatcaagaaaactggctgttaattttggtgtttctaaaccttctgagtaaatttggctcttagaattaagttaatttcttctctttccatctacctttttataaatacatatctatgtctcataaaaattagaatgtactattttaaaataatatgtgtaaattgaaatttttttcatttttaagttatcaggcacttttcatgctgtttaaaagactgtgtatcaaattgtgcactttaagtatgtgcagtttgttgtatgtcaattatacctcaataaatctgtaataaaaaactaaattaaaccttgcattaaaataatatcacagtatcagtggactaaacattaaaatgtaccactctaatcattggcctcatgattgaagcatcctgaactatgaattagacatcagttagcaataataagcattttttacactatcattgaggaataattacatggagcatgaaatttgggcctccagtataacttactgaatgtggattttatttctctttttaatgatgtaagaaaattgtcaggagaatggctcttatttatgtgtgttttaacttatgctttgttgcctctgagggtctttagacctgctgtgaaaggatcacatttgttgtggtgctgccagttttgctttattctaaattttgtaccaaagcaactttagaataatcagaatatttcatctaactgcttagaactataaatagcattctaaatttgagtaaatacaattttttaggttactcaagaaccagcattagtaatttctagtaaaattgtttcaaaatctacagggtacaatgattacaaattaatcttctaacaaaataaaatatgaaatgttagtcatgttaattaataaactgtattattttgtatagctttttatttgcttacctgacattttatgagagcttcatagttggtcggtatgtagtgcttcttgggactgaagaaattctaattgttgtttaagttccaaggtgtgctacaatataggaggcacagtcatcagtttgtgacatacattatttactgcctatttcattctgattctatatttttagctttatgctgaactgttcaatgatgctgggattctctctttgcatgtcatatgtgaatgtgtggttcaagctgtaactgttgaaattattttagaatttatgacgatttctcagcagggcctatgtttatatatatatatatatttattctttagtttttgtgatatgcttatatttttaaggaagtaagttatagcatacttttttaaaagtaggaaccacaatctttatatggagcagcttgttatatctgattttcatgtaactcattggaaactctgccatgactcttaaagtagtcttacttgttttttaaaatgctggtattaaactaaatggactcctttcactaactgctgatttcagagtttaaatgttagcaggatatttgtgtattagcagtgccttcagtataagagagaaatattcattatctgtcatttatcatagtcgtataagtttccatgattttattttctgttattttcataagttcagatgtttatcagttcccaacattgcttctttatctgtagtgggatcttgagtaatgaggctcaagtaaatcctcaatgtgtataattattgcctcataaactctctctttgtttttaaaggaaacatctattatggtaatacaaagaaaagttaaattgtgacagtaatgttatattaacctcttcctactttaaagtgtgaaatgtttcacctcagctgtacaaactccagcattgagaatttgcctcactcattactcctgtgtgacagttatataaatagcatgcagctcacatctgttttagagcatagaagaagcggcacctgccatcttctgaaaactccaaagggaaatttcagtagacatagtgcactaaacccataaggatacttgaccaatatttgagcacagcaagctgacagttctatacagataggcagtgaaagggttttattttccagccaggcgcagtggctcaaatcccagcacttcgggaggctaaggcaggcggatcacttgaggtccggagttccagacaagcctggccaacatgatgaagccctgtctctactaaaaatacaaaaattagccgggcgtgatggcacatgcctttagtcccagctactcgggaggctgaggcatgagaatcatttgaacccgcgaggcagagtctgcagtgagccgagattgcaccactgcactccagcctggagagcagagcaagactctgtctcaaaaaaaagaaaaaagttttattatccttactttttttttaacattattattctaaaggtcaaaactgagaagagattaagataggagagagctccataatggctggatagtggtcaggcattctctattcttttccccctgtagacccattctaaatgtgggcctgaggtcaatgggagatgtgccctccctatggaggatgtaagaagcagaggccatttctgccccatgttgaggaaacaatctgttgatagacctggaatttagagtacatctgaaaagcagttggacttcaagaaatttaaaattctctctttgagatggggtggactaagaccacccccaaagtttaaaaatatgctcattcaacttgaatcttctgaggactttttgtgaaaatggtggactgtttagggcataggacagattccccaaattgctttatgcttccacataactagagcacttcaatctatttaagcctttgtctcctaactgaaacattatttctaaatatttctattcaataagttttttcttttttgagcaacttaagtgaattttgaagattgctccttccagtctcgttccttttcacattttcctgcattacctaataattacctcagcgttagaatttgaatgtattaattgatttaaacatcatgtagactaaagtcttaaacatctaagactcagttgtagttgcagaaaaaaattaaagtcacctctactgaaccttggtttcaatttaagatttttcttgcttttcaaaggggtaactaataaagattgaagggtttttttcccgattggtggaggaatgaagaactattgatgcaagtttttttattgtttctttctatgatcaggtacctgctttcattttagactgctacttccaaactaagctagattcttggttttaatgagaggaggcagagagagggaggcagatggaagaagaaaaacagttaaataagacatacccagtcactgcatttttggactataccgtatctttctagcacaaggaaatagataaactgtaaggtcttttttactcactttttatttatgtgttctatttgtgttagtcataactgtttatagtggttgtctaatttttacttttattatatgagatagagctgtgcagatcttcactcaagttctgtcacgcttcttcccattatttagagcacagttttttaaagcaactgtacaatttctcagccttatgagcttgctgtatttcttggtatcatgttgcttccaaattttgtttttactgtagaagacaattaatttattgtagagaagtggctgtgaaagtcgttctctgtctttaaaaatcaattgcagaagttcatttgtcatttttctagagataaattatagtactcaaactggcagtgctcagtatatacattttgtaagctttgtcagtgaaaccatcagttttgcaggagcttcctttcctagtcaagataaagcttaaaattccagaaattaatgtcgttcggactgactttattcatatttccatcaaacttctccaatacagtaagagatagtgttgaaccagcatcaagtctccagaaacatggcagagcagacaggccgttaagtttcacagacatcatagatccttttcttaaagaagaaaaacatgtataaaatagttttagtagtccaaaatgtcaactatctgtagctgcttttgtgtgtgtgtcagtgaacaaataataatgccttgctcaatcaatgcattcagccatctcaagtgcaatttgtgaaggagactatggtttccaaaagatacatttttttacaaagttaaacctgtaaaaagtctttttttttttccctccagccgtacaccaactgcacttggttgtttcagcagttggtatactattaaattgtccaggccaaataggtttctgtagctgttttagtaatttgaagccaaattctcatgctgtttctcattaaaaagaatgagaatttggtccatagttagctttaagttctctcttcctttctttcccttacagttaagggtttggtgggggatggggaggttgttttcgttttttggatttttttgtcttttggctttaagtatcatattttcttttgcctgtatccaactgcttctttgagtattttcatctagtttaatgtgagtaatagatgctgtgctgtcattgaagtgttcaacattttgttcatttaaacaaaagtgtaattcatacatatatagatacatatcttaattgatttctcaactattttataagtaactggaatttttcattagatcttatacagagaagtattttattaaaaattcaaaagggaagacttttatgtgctcattttgtaatttttgattttaaatatctttacattgtctgccaattaaagtgttttaaacttgcattggaatggactccgaatgtatttttgtggtgttacgttatccgtagatttctagcatgaagttagcctcacgatgctgtgcaaaggattttaaaatatgagagtcactgaaagagtttaaacatctgttcatgttaaatgctctatggattttaattaaagacttgagaatgattttaaaaaaaaaaaaaaaaaaagaaaaaaaaaaaaaaaaaaa

SEQ ID NO: 12727 - DNA, 2090 bp, Homo sapiens
ggcctactgggagagcgcctgcgcggctgtcggttgatggggaggtcaggtctgggaaactaggccctggggttttccctgagcaggagcggtgcccgagggcctcaggcgtcagtccaggccctgaatggctggtctccagcggttggcgtcacatctgcctgtgggcgttatgctcccacataatacaacggaagctccagggccccactcagccaagcaagactcttatgaacaaggtgactcttcccagcagtccttgaaggggcacctgaggaacaatttccagaagcagcttttgagcaacaaagagttgattctggataaagtctatactcaccccaaatggaacacccaaacaaaagcccggagctactcctatccccactgtactggaatcagccagcaagatccagaaagtgattcccagggccaaggaaatggtttgttttactcgtcaggccctcaatcctggtatcccaaagccaataaccaggactttatcccctttacaaagaaacgagttggagtggaccgggcgttcccattgaaacccatggtccacaggaagtcgtgcagtacaggtgaggctggcactgatggggaccataatgtctacccaaggccccctgagccgagagagttttcatctaggaactttggtgtgaggaaccagggcaacttttctgtggttggtactgttcttgctgccacgcaggcggagaaggccgtggcaaactttgacaggacggagtgggtgcagatccgaagactagaagctgcaggggagagcttagaggaggaaatccgaagaaagcagattctcctgaggggaagctgaagagacagaggaggaactcagaaggatccagacgcaaaaggaacaggccaaggaaaatgaaaacggagagctacagaaaattatactccccaggagcagagttaaaggtaataaaagcaacaccatgtacaaacctatcttctccccagaatttgagtttgaggaagaatttagtagagacaggagagaggatgaaacttggggacggtctcaacaaaattcagttccattccagttctctgattatagaatccagaggctcaaaagggaaaggctggtagcaagcaataataaaattcgagacccagtctcagagccatcggtggagaaattctccccgccttcagaaacaccagtcggtgctttgcagggatctgccagaaattccagcctgtccatggcaccagactcctcaggttccagcggctccattgaagagccacagctgggtgagtgcagccactgtgggcgcaaattcctctcgttcaggctggagagacactccaacatctgcagcaggatgcggggttccaagaggaaagtgtttgactcctccagggcccgggctaagggcacagaactagagcagtacttgaactggaaggggccagcttcagccaaggctgaacctcctcagaagagcaactggagatagaagcatgaatcttttatccatacgttccgccaggctcgagaggtccagcaggtaactgccaaaggtggaaactgttcacacttgcctcccatcctgcctgcagaaaacccagactgcattcagtgtcctcagtgtagccaccactttgctcccaaggtggctgagcaacacattcccaagtgtaagaccatcaagaactgtcatccacctctaaggaagcattatagttgagcagacaacaatggaaacttttggatagttcagaaagctctgcttctcttcagcagtaaatgggagtagaatttgatgcaaagcagaaagaaatcaaacagctcccagatctgcctgcagagctaaaatctgtgaggagagagccactgctaagcagcaggaggcagaaggaagccccagcttcccactaaattacaaccttgggctggtatgctttatgttattgccctcagaattgatgggtgaagacactgaagagtcatgagcaggctccattaaagctcttttcttgcaaaaaaaaaaaaaaaaaaaaaaaaaaaaaaaaaaaaaaaaaaaaaaaaaaaaaaaaaaaaaaaaaaaaaa

SEQ ID NO: 12728 - DNA, 4874 bp, Homo sapiens
gtggggaagtcggggccgcccgagcggccgtcgccaccgcctcgccccgacctccttcccggtcccctcccggcccagtccctcccgcccgcgcaccccgagtagtgagtggccccgcgcagggtctggagagtcaccgcggcggcgccgggtggtggttaaaccatgttaaggaggattttacagaggactcctgggagagttggctctcaaggttctgatttagattcatcagcaactcctataaacacagtggacgtcaataatgaaagctcttcagagggtttcatatgtccccagtgtatgaaatctcttggatctgctgatgaacttttcaaacattatgaagctgttcatgatgctggtaatgactcaggtcatggaggagagtctaatcttgctttgaagcgagatgatgtaacactgctcagacaagaggtccaagacctacaggcttcacttaaggaagaaaaatggtactcggaagaattaaagaaggaattagaaaaatatcaagggctgcagcagcaagaggccaaacctgatgggttggtgactgattcatcagcagaactacagtctttggaacagcaattagaagaagcccaaacagaaaattttaatattaagcaaatgaaagacttatttgaacagaaagcagcccaacttgctactgaaattgcagatataaagtcaaagtatgatgaagaaaggagtcttcgagaagctgctgaacaaaaagtgacacgtctgacagaagaattaaacaaagaggcaactgtaattcaagatctgaagacggaactgcttcagagacctggtatagaagatgttgccgtgctaaagaaagaactggtccaagttcaaacactaatggataacatgaccttggaacgtgagcgagaatctgaaaaactcaaagatgaatgcaaaaaattgcagtcacaatatgctagctcagaggccacaataagccagctaaggagtgaacttgccaaaggcccccaggaagttgctgtatatgtacaggaactacaaaaactgaaaagttcagttaatgaattaacacaaaaaaatcagaccttgacagaaaacttgctgaaaaaagaacaagactatactaagttagaggagaaacataatgaagaatctgtgagtaaaaagaatattcaggcaacccttcatcaaaaagacctagattgtcaacagcttcagtcaagattgtctgcatctgaaacctcactgcatagaatacatgtagaactaagtgaaaaaggagaagctactcaaaagctcaaagaagaattatctgaggtagagaccaagtaccagcatctaaaggcggagtttaagcagctacaacaacagagagaagaaaaggagcagcatgggttacaactccaaagtgaaattaatcaattacatagcaaacttctggagacagagcgccaactaggggaagctcatggtaggctgaaggaacagagacagctttcaagtgaaaagttgatggataaagaacaacaagtggctgatttacaactcaaactttctcggttagaagagcagttgaaggaaaaagttacaaattctacagaattgcagcatcaattagataaaacaaagcaacagcatcaagaacaacaggctcttcagcaaagcaccacggcaaaacttcgagaagctcagaatgatttggaacaagttctacgtcaaattggcgataaggaccaaaagatccagaaccttgaagctttattacagaagagtaaagaaaatatttcattactagaaaaagaaagagaagatctttatgcaaaaattcaggctggtgaaggagagactgctgttcttaaccagttacaagaaaaaaaccatacactacaggagcaagtaactcaactaacagagaagctgaagaatcagtcagaaagtcataaacaagcccaggagaatttgcatgaccaggtacaagagcagaaggcacatcttagagctgcacaagaccgtgtcctttccctagaaactagtgtcaatgaattaaatagtcaattaaatgaaagcaaggagaaggtctcccagcttgacatacagattaaagccaaaaccgaactattactatcagcagaagcagcaaaaactgctcaaagagctgatcttcagaatcatttggacacagctcaaaatgcattacaagataaacagcaggagttaaataagattactactcagttggatcaggtcactgcaaagttacaagacaagcaagaacattgcagtcagctggaaagtcatcttaaagaatataaagagaaatacctctctttagaacagaaaaccgaagagctagaaggtcaaattaagaaactagaagctgatagtcttgaagttaaagcaagcaaggagcaggctttgcaagatctacaacagcaaagacagctgaacacagatttagagctcagagccacagaattgagtaaacaacttgaaatggagaaggaaatagtatccagtacaagattggatctacagaaaaaatctgaagcccttgaaagtatcaagcaaaagcttaccaagcaagaggaagaaaaacaaatcctgaaacaagattttgaaactttaagtcaagaaacaaagattcagcatgaggaattgaataacagaattcaaacaacagtaacagaactacaaaaagtgaaaatggagaaagaagctttaatgacagagctttctacagtaaaggacaaactatcaaaagtttctgattctttgaaaaactctaaaagtgaatttgaaaaggagaatcagaaaggaaaagccgctatattagacttggaaaaaacttgcaaagaattaaagcatcaacttcaagtgcagatggaaaacacacttaaggaacagaaggaactgaaaaagtcacttgaaaaagagaaggaggcttctcatcagttgaaattggaactcaattcaatgcaggaacaacttatacaggcccagaatactttaaaacaaaatgaaaaagaagagcaacaacttcaggggaacataaatgagctaaagcaatcaagtgaacagaagaaaaaacaaattgaagcactccaaggagagcttaaaattgctgttttacagaagacagagcttgagaataaactacagcagcagttaacacaggcagcccaggaacttgcagcagagaaagagaaaatatcagtattacaaaacaactatgaaaaaagtcaggaaactttcaaacagcttcaatctgatttctatgggagggaatctgaacttctagccaccaggcaagatcttaagtctgtagaagagaagctttctctagcacaggaggacttgatttcaaacagaaatcaaattggaaatcaaaataaattgattcaagaactgaagactgccaaggctacattggagcaggattcagcaaagaaagaacagcaattgcaggagcgatgtaaagcactacaagacattcagaaagaaaagtcactgaaagaaaaagaactggtaaatgagaagtctaaattggcagagatagaagaaattaaatgtagacaagaaaaagaaatcactaaactaaacgaagaactcaagtcccacaaactagaaagcataaaggagataacaaatcttaaagatgctaaacagcttctaattcagcagaaattagaacttcaaggaaaagcggactccctgaaggcagctgttgaacaggagaagagaaatcagcagatactaaaagaccaggtgaaaaaggaagaagaggagctgaagaaagaatttattgagaaagaagctaagttgcattccgaaataaaagaaaaggaagtaggaatgaagaagcatgaagaaaatgaggctaaacttaccatgcagattacagcattaaatgaaaacttaggcactgtgaagaaggagtggcaatctagtcaacggagagttagtgagcttgagaaacaaacggatgacttacggggtgaaattgcagtattagaagcaacggttcagaataatcaagatgaaaggagagcactactggaaagatgtcttaaaggagaaggtgaaatagaaaagcttcaaaccaaagtattagaattgcaaagaaagctggataatacaactgcagcagtgcaggagctgggcagagaaaaccaatcacttcagatcaaacatacacaagcgttgaatagaaagtgggccgaagacaatgaagtacaaaactgtatggcctgtgggaaaggcttttcagtaacagtgagacggcatcactgccgacagtgtggaaatatcttctgtgctgaatgttcagccaaaaatgccttaactccttcctccaagaagcctgttcgtgtctgtgatgcatgtttcaatgacttgcaaggataatgggttatcacaacttcagagtaatattacactaacattagatttttaataaatgtacttaatagaggtcttggactactatttggtttggacactggttgcaatactagaccaaataggaattagtatattttggaatgttatggatatcaagtaaaactcttctatttttgtgagacttgggcttatcatctttcattacttttttcccatttagcccctggaatagctttcatgccaagtttagaattagccaatgaaatgtaaataaactttggacagaaaatagcaatgtatttttttaatataatttcattattcacaaatgaagaatgcaattccatagcttacttctttctcctaaatttaatgtacaaaaatgtacatggatgatattatcacttgttgctgtttttgttgcacaatagcacattaattatattaaatattctctttgtgaagttaaaaaaaaa

SEQ ID NO: 12729 - DNA, 5428 bp, Homo sapiens
ctccctctcctatcggagcacaatgaaagcctgtgtatcgccgtgactccgggcgggagccagtgtcagcaaagcggctaacaacagacgagaaagagaaaggaaaatacaagctactttttttttccatctataaagcggagcaaatacaggagatagaaccagattgcttattgcgagtccagaccctcagatccactggccggggatggaatgtacaaaagtggacagaaaagtggctggacatgactcggtgcaatttgctggaagtttgtaagtttgaccatcgtttgtaaattactctcggaagagtttgtctctcttgatactgtattagaatagagccgggggtgaggaatagaaacgtaagcgggaaagaaaaaaatgtgttgaaggatctctctcagtggctagcgacttaagattgcttttcatttaaggctaggaaaccttagagggagtgaggattttaccggtgattggattagctgaagaaaaaagcatggtccaaaagtccaattactgacattgttaacagttgaaaagctgtctccctcttttgggagaagacaacatcctacagtaccccaaagaggagaaaacaccggagcgaaaggaaagggaggaaaaattaaaagccaaaagacagtctcccttgatttttgcacattttgaacagtgacttaaacatcttctgaaacagcactgttttgttttgttttggttttttatttaacctgaggaaaagtcaaggctgctggttacatagacatggtagaaatgtgtttctctgcagaaacatccccataaagaattgtcggaaacaactaggtgagggggagtcctctctattaatacctctctcaataccttttgctgtgtgtttctgtctcttgctggacaatccctgaattcttgatctaacccccagatcgtgtgtttacaaagtacctagtggctcttgtcagcttggtggaggaaaaaaaatccaccaactctgtccaacttctccagagctgtcaaatgcaattagagtaagttaatcagggtttgtttccaacttatcctccccccagttggtttctattctttctccccaccctctttttactaactcccctcccccacaacttctccacggctcccccacaacctctgaagacctctattcatgtggccctgaacactgagctcacattgtcaaaaacagacttgcctgcaatagccagcagtagcctctttccacctcaccatcccagaggcagcaatcattgtgtccggtaagatgggggacacagcgcccccgcaggcccccgcaggagggctagggggggcctctggggcggggctccttggagggggctcagtcaccccgagagtgcacagtgctatcgtggagcgcctccgggctcggatcgctgtctgccgccaacaccacctgagctgtgaaggacgatatgaacgaggtagggccgagagctcagaccgggaaagagaaagcaccttgcagctcctgagccttgtacagcatggccagggggcaaggaaagctggcaaacacaccaaggccaccgccactgctgccaccactacagcccctccaccgccccctgctgcccctcctgcggcctcccaagcagcagcaacagcagccccaccgcccccaccagactatcaccatcaccaccagcagcacctgctgaacagtagcaataatggtggcagtggtgggataaacggagagcagcagccgcccgcttcaaccccaggggaccagaggaactcagccctgattgcgctccagggttccttgaaaagaaaacaggtagttaacctatctcctgccaacagcaagcgacccaatggctttgtggacaactcatttcttgatatcaaaagaattcgtgttggggagaatctctctgcaggacaaggtggcctccaaataaacaatggacaaagtcagattatgtcagggaccttgcctatgagccaagcacccctgcgaaagactaacactctgccatcccatacacattctcctggcaatggcctgtttaacatgggcttaaaggaggtaaagaaggagccaggagagactctgtcttgcagtaagcacatggatggccaaatgacccaagagaatatttttcctaataggtacggagacgaccctggagaacaactgatggatcctgagctgcaggaactgttcaatgaactgaccaacatatctgtgcctcccatgagtgaccttgaactggagaacatgatcaatgccaccataaagcaggatgacccatttaacattgacttgggtcagcaaagccagaggagcacacctaggccctccttacccatggagaaaatagtgatcaaaagtgaatactcaccgggcttgactcagggcccctcaggctctcctcagctgaggcccccatcagctggccccgcattctccatggccaactctgccctctccacttcgtctccaatcccttcagtccctcagagccaggctcagcctcagacaggctccggagcaagccgggccttgccaagctggcaggaagtatcccatgcccagcagctcaaacagatagctgctaatcgtcagcagcatgcccggatgcagcagcaccagcagcagcaccagcctaccaactggtcagccttgccctcttctgctggaccatcaccaggtccatttgggcaggagaaaatccccagcccttcttttggtcagcagacattcagcccacagagctcccccatgcctggggtagctggcggcagcggccagtcgaaagtaatggctaactacatgtacaaggccggcccctcagcccagggtgggcacctagatgtcctcatgcagcaaaagcctcaggatctcagtcgaagttttattaacaacccgcacccagccatggagccccgtcagggcaacaccaagcctttgtttcattttaactcagatcaagcgaaccagcagatgccttctgttttgccttcccagaacaagccttctctcctacactacacccaacagcaacagcagcaacagcagcagcagcagcagcagcagcagcagcagcagcagcaacagcagcagcagcagcaacagcaacagcaacagcaacagcagagttcaatttcagctcaacaacagcaacagcagcagagctcaatttcagcccaacagcagcagcagcagcaacaacagcagcagcagcagcaacaacaacagcaacaacagcagcagcagcagcagcaacaaccatcttctcagcctgcccaatctctaccaagccagcctttgctaaggtcacctttgccacttcagcaaaagctcctacttcagcaaatgcagaatcagcccattgcaggaatgggataccaagtctcccaacaacagagacaggatcaacactctgtggtaggccagaacacaggccccagtccaagtcctaacccctgctcaaatccaaacactggaagtggttacatgaactcccagcaatcactgttgaatcagcaattgatgggaaagaagcagactctacagaggcagatcatggagcagaaacagcaacttcttctccagcagcagatgctggctgacgcggagaaaattgctccacaagatcagataaaccgacatttgtcaaggccacctccagattataaagaccaaagaagaaatgtgggcaatatgcaaccaactgctcagtattctggtggctcatccacaataagcttaaactctaaccaggctttggcaaacccagtttcaacacacaccattttaactcccaattccagcctcctgtctacttctcacgggacaagaatgccatcattatctacagcagttcagaatatggggatgtatggaaatctgccttgtaatcaacctaacacatacagtgtcacttcaggaatgaatcaattgacccaacagagaaacccaaagcaattgttagcaaatcaaaacaaccctatgatgccacggccacctaccttagggccaagtaataataacaatgtagccacttttggagctggatctgttggtaattcacaacaattgagaccaaatttaacccatagtatggcaagcatgccaccacagagaacatcaaacgtaatgatcacatccaacacaactgcaccaaactgggcctctcaagaaggaacaagcaaacagcaagaagccctgacgtctgcaggagtccgcttccccacaggtacacctgcagcctataccccaaatcagtcactgcaacaggcagtaggtagccagcaattttcccagagggcagtggctcctcctaaccagttaacaccagcagtgcaaatgagacccatgaaccaaatgagccaaacactaaatgggcaaaccatgggtcccctcaggggtctgaatctcagacccaatcagctaagcacacagattttgcctaatttgaatcagtcaggaacagggttgaatcagtcgaggacgggcatcaaccagccaccatccctgacgcccagcaattttccttcacccaaccaaagttccagggcttttcaaggaactgaccacagcagtgacttagcttttgacttcctcagccaacaaaatgataacatgggccctgccctaaacagtgatgctgatttcattgattctttattgaagacagagcctggtaatgatgactggatgaaagacatcaatcttgatgaaatcttggggaacaattcctaaagaagaaagggaagacaatttacaaactccaagcactaaaaggcagtatattacagaaactctgtagaggctgaactgttgatgttcaggtggactacatgaagataacatgcttaaaaatggaaagcagaaagtaactgcagtgatgaacattttggtccaaattcttgttttaaatcttacacctgaaagtaaaatattgggatcacttttccctgtctaaactccaggatacagtatccaatttatccaaacagaactgtggtgtcaatgtgtaattaattgtgtaaaatagccttcccaagtttctttttccctggaaaataaaaaaggtaatagaacttgtagtttatttaaaccccatgtcatgaggaggtactagttccaagcaacaaactccttaatttgctctaatagataggtatggtttaatctttccattgtgtcttttcatttaattttcctgaagcttgcaggatagattgaaatgttataggtttgtttggagtaaccaaacagtatgcaaattaagaaaaagccagagaacctagaaaacatccagtggattacagaatttcttccccatattcactcctcacttttacaattttcccacaatcctctacttcagtgggatgctgtgtctagtgattaaacaaaaatatagagctg

SEQ ID NO: 12730 - DNA, 4114 bp, Homo sapiens
ttgatgaaacgcggatccagacgctgcgtttgctggctttgatgaaacgcacatgtgtttctgttttgtgttgtagcatttgttctggaagctcgtatttacattttaagtgtatctggtgagtgggctggagccctcgtctgggccggaaaaaaaaaagccctccgatccgtcttttagttgcttctcttccttttttctctccggtttctcatcactccaaccagccgcgaccatgcccaggaagaaggcggcggcggcggcctgggaggagccgagctcgggcaacggcactgcccgcgccgggcccaggaaacgcggcggcccggcgggcaggaagcgcgagcggcccgagcgctgcagtagcagcagcggcggcggcagcagcggcgacgaggacggcctggagctcgacggggcccccggcgggggcaagcgcgcggcgcggccggcgacagcaggcaaggcgggcggcgcggccgtggtcatcaccgaacccgagcacaccaaggagcgcgtcaaacttgaagggtcaaagtgcaaagggcagcttttgatttttggggcaaccaactgggacttgattggtcgaaaagaagtgcctaaacagcaagctgcttaccgcaatctcggtcagaatttgtgggggccccacagatatgggtgcctggcgggggtccgggtgcggacagtggtctcgggctcgtgtgctgcacacagcctcctcatcaccacggaagggaagctgtggagctggggtcgaaatgagaaggggcagctgggacatggtgacaccaagagagtagaagcccctagactcatcgagggtcttagccacgaagtgattgtgtctgcagcatgtgggcggaaccacaccttggccttgacggaaacgggctccgtgtttgcgtttggggaaaacaagatggggcagctgggccttggcaaccagacagacgctgttcccagccccgcgcagataatgtacaacggccagccaattaccaaaatggcctgtggggctgaattcagtatgataatggactgcaaaggaaacctctattcctttgggtgccctgaatatggtcagctgggacacaactcagatgggaagttcatcgcccgggcacagcggatagagtacgactgtgaactagttccccggcgagtggccatcttcattgagaagacgaaagatggacagattctgcctgtaccaaacgtggttgtacgagacgtggcctgtggcgctaaccacacgctggtcctggactcccagaagcgagtcttctcctggggctttggtggctatggccggctgggccacgcagagcagaaggatgagatggtcccccgcctggtgaagctgtttgacttccctgggcgtggggcttcccagatctatgctggttacacctgctcctttgctgtcagtgaagtgggtggtctgtttttctggggggccaccaacacctcccgtgaatctaccatgtacccaaaagcagtgcaggacctctgcggctggagaattcggagcctggcttgtgggaagagcagcatcattgtggccgccgatgagagcaccatcagctggggtccgtcaccgacctttggggaactgggctacggggaccacaagcccaagtcttccactgcagcccaggaggtaaagactctggatggcattttctcagagcaggtcgccatgggctactcacactccttggtgatagcaagagatgaaagtgagactgagaaagagaagatcaagaaactgccagaatacaacccccgaaccctctgatgctcccggagactcctccgactccacacctctcgcggcagctgtcatttccatgtgcactgggacgggaagtcaaacgaggaatttaaaaaagcaaaagttgaccgaaggtgcatttttgtttagactccctgaggttccgttttacacatgatccaacgttaactacctttttttctgtatgctttccaaagtccttttttttcccttaatgttgaattaaaatacttgctcatagttgatttaccattcctacaaaagaggcagaaactttgagcaatctaggtttttttttttttttttaagttttttctttcttcctttcctgaatacactccccaaaacacccctttccagttacaattagcatcgtgatccaagcagatgccacatggaagaggaatcgccatttactcagaaaaaatgtcccttacaggaaccggcagcagctaggcagtcaccggcccgcctccatccaaaatcacgctcgcgtgcttcggaagcatccgggtcactccttctccgctttttcttgcagatgggcctaggccggtgtcggttctgtttctccccttggctgcctgtacgcccacagccttctggctgcgacattatagaatcggccgtgtcccccctggtgggggattggggatctgtgtttagccatttatatctactttagctgttaaagaggtccaaatgaaaatcaggtgattgtggaaccatggggacttgggggtggggcagaggtgggaacatttgtatcagttgagtcagcttggtggctccctgtggagccagggctgagccttgtcacgcgcactcgccaattaagagatggaccagccagcagtcaagtgcattctccagtccttgcaagaaggatcagccctttctgtgccagcctcgatcgccttgtgctttggtctctttttctcccccccgcctggatcctgcctcgcgcgggccgtcctgttgctgagactcggggtaccgttctgctgacccagctccctttagtcacgtttgcttggctctggtaccaaatagttgggattaccgaagagtccccttccttgcgtgtcagcacggatgctgtgactgccacctgcgtcctcgtcaagtgcccgagctcgccgccgtgtgtgctgcgctgagtgagttatgaggtgcctttcccggaaccctcctctcgcctggacccaagagaggcgacagctgtggctggggctcttggtttccagagggtctggactggtttgggtgctttaaaatagatatttagttcagtggtgcttatgggggagatgggactagaacttaagtgtgagacttgggtggatgggaaagttaaatattggtctcttcaagttttttttttcttttgctttgttaccacttgtcactgtctccatgttaaaatgccaaaaatgatgtagttgttgttgcttttttccctattttccaccccagtcgctccttaccgtgactcctgcccttggagggcatgtagcagtgtctgtcctgccagtcccaaggccctgtgggaggagactggcctgcatctctctaagacttagtctgacgccacgcgcatctcttgttctgtgttcaatcagtagtccaggggagaagcttctgctacttcagagctttgctaaactaacctaatttgtccaaatcaccccaaaaccaccatctctgacgtaagcttccatgcgacagcctgatccgtttccctggacaggtctctttcctggaatgcagcccaggcacctgtgctcctggcacccttgaggtctctcctttgagccgtggtcaccgagagggttgaggacgcagcacccgaggtcccagcctttgcaggagcctccctgggcttagctggacttagatcttcggtggcctcatgtaaacgtggcagccagcctcttctagaaccctagcccagggactggagcaggaaagggaccttcaaagtgaagactgccttgtcccgcagctccttctggcttagattgaaacatgggcttcctaatgggttaaatcctttaaaacaaggagttgtgggggaagggtgtcgtgcactcctagagaaaggtacacagttgcccggttgggaatgtgcttggcgctgaccctgcgggcatctgactggtcttccagctcaggaaaaagaatttgaaagaggcttagcgtgaaggggaatcaaagaggaggttgtgatttggtcgaaggtgcctggtttagtgctgtaattgtcttattattttttttatatatatatttcttggagtaaacattttaaat

SEQ ID NO: 12731 - DNA, 5021 bp, Homo sapiens
agcacgaaaggccacgcaggccgttctaaccctggcggccaagaggaggggtagcaggctctggaacctgcgggcggggacgaagacggcgcgcgacgatgtcgcaccgcggcgtgcgcggtgtcggcagtagctgcggcgcaggggcggagcgaaggctgcggcggcgtcgggtacgcgcacacgttgcatcttcttcctttcgcggggtcctccgtagttctggcacgagccaggcgtactgacaggtggaccagcggactggtggagatggcgacgctctctctgaccgtgaattcaggagaccctccgctaggagctttgctggcagtagaacacgtgaaagacgatgtcagcatttccgttgaagaagggaaagagaatattcttcatgtttctgaaaatgtgatattcacagatgtgaattctatacttcgctacttggctagagttgcaactacagctgggttatatggctctaatctgatggaacatactgagattgatcactggttggagttcagtgctacaaaattatcttcatgtgattcctttacttctacaattaatgaactcaatcattgcctgtctctgagaacatacttagttggaaactccttgagtttagcagatttatgtgtttgggccaccctaaaaggaaatgctgcctggcaagaacagttgaaacagaagaaagctccagttcatgtaaaacgttggtttggctttcttgaagcccagcaggccttccagtcagtaggtaccaagtgggatgtttcaacaaccaaagctcgagtggcacctgagaaaaagcaagatgttgggaaatttgttgagcttccaggtgcggagatgggaaaggttaccgtcagatttcctccagaggccagtggttacttacacattgggcatgcaaaagctgctcttctgaaccagcactaccaggttaactttaaagggaaactgatcatgagatttgatgacacaaatcctgaaaaagaaaaggaagattttgagaaggttatcttggaagatgttgcaatgttgcatatcaaaccagatcaatttacttatacttcggatcattttgaaactataatgaagtatgcagagaagctaattcaagaagggaaggcttatgtggatgatactcctgctgaacagatgaaagcagaacgtgagcagaggatagactctaaacatagaaaaaaccctattgagaagaatctacaaatgtgggaagaaatgaaaaaagggagccagtttggtcagtcctgttgtttgcgagcaaaaattgacatgagtagtaacaatggatgcatgagagatccaaccctttatcgctgcaaaattcaaccacatccaagaactggaaataaatacaatgtttatccaacatatgattttgcctgccccatagttgacagcatcgaaggtgttacacatgccctgagaacaacagaataccatgacagagatgagcagttttactggattattgaagctttaggcataagaaaaccatatatttgggaatatagtcggctaaatctcaacaacacagtgctatccaaaagaaaactcacatggtttgtcaatgaaggactagtagatggatgggatgacccaagatttcctacggttcgtggtgtactgagaagagggatgacagttgaaggactgaaacagtttattgctgctcagggctcctcacgttcagtcgtgaacatggagtgggacaaaatctgggcgtttaacaaaaaggttattgacccagtggctccacgatatgttgcattactgaagaaagaagtgatcccagtgaatgtacctgaagctcaggaggagatgaaagaagtagccaaacacccaaagaatcctgaggttggcttgaagcctgtgtggtatagtcccaaagttttcattgaaggtgctgatgcagagactttttcggagggtgagatggttacatttataaattggggcaacctcaacattacaaaaatacacaaaaatgcagatggaaaaatcatatctcttgatgcaaagttgaatttggaaaacaaagactacaagaaaaccactaaggtcacttggcttgcagagactacacatgctcttcctattccagtaatctgtgtcacttatgagcacttgatcacaaagccagtgctaggaaaagacgaggactttaagcagtatgtcaacaagaacagtaagcatgaagagctaatgctaggggatccctgccttaaggatttgaaaaaaggagatattatacaactccagagaagaggattcttcatatgtgatcaaccttatgaacctgttagcccatatagttgcaaggaagccccgtgtgttttgatatacattcctgatgggcacacaaaggaaatgccaacatcagggtcaaaggaaaagaccaaagtagaagccacaaaaaatgagacctctgctccttttaaggaaagaccaacaccttctctgaataataattgtactacatctgaggattccttggtcctttacaatagagtggctgttcaaggagatgtggttcgtgaattaaaagccaagaaagcaccaaaggaagatgtagatgcagctgtaaaacagcttttgtctttgaaagctgaatataaggagaaaactggccaggaatataaacctggaaaccctcctgctgaaataggacagaatatttcttctaattcctcagcaagtattctggaaagtaaatctctgtatgatgaagttgctgcacaaggggaggtggttcgtaagctaaaagctgaaaaatcccctaaggctaaaataaatgaagctgtagaatgcttactgtccctgaaggctcagtataaagaaaaaactgggaaggagtacatacctggtcagcccccattatctcaaagttcggattcaagcccaaccagaaattctgaacctgctggtttagaaacaccagaagcgaaagtactttttgacaaagtagcttctcaaggggaagtagttcggaaacttaaaactgaaaaagcccctaaggatcaagtagatatagctgttcaagaactccttcagctaaaggcacagtacaagtctttgataggagtagagtataagcctgtgtcggccactggagctgaggacaaagataagaagaagaaagaaaaagaaaataaatctgaaaagcagaataagcctcagaaacaaaatgatggccaaaggaaagacccttctaaaaaccaaggaggtgggctctcatcaagtggagcaggagaagggcaggggcctaagaaacagaccaggttgggtcttgaggcaaaaaaagaagaaaatcttgctgattggtattctcaggtcatcacaaagtcagaaatgattgaataccatgacataagtggctgttatattcttcgtccctgggcctatgccatttgggaagccatcaaggacttttttgatgctgagatcaagaaacttggtgttgaaaactgctacttccccatgtttgtgtctcaaagtgcattagagaaagagaagactcatgttgctgactttgccccagaggttgcttgggttacaagatctggcaaaaccgagctggcagaaccaattgccattcgtcctactagtgaaacagtaatgtatcctgcatatgcaaaatgggtacagtcacacagagacctgcccatcaagctcaatcagtggtgcaatgtggtgcgttgggaattcaagcatcctcagcctttcctacgtactcgtgaatttctttggcaggaagggcacagtgcttttgctaccatggaagaggcagcggaagaggtcttgcagatacttgacttatatgctcaggtatatgaagaactcctggcaattcctgttgttaaaggaagaaagacggaaaaggaaaaatttgcaggaggagactatacaactacaatagaagcatttatatctgctagtggaagagctatccagggaggaacatcacatcatttagggcagaatttttccaaaatgtttgaaatcgtttttgaagatccaaagataccaggagagaagcaatttgcctatcaaaactcctggggcctgacaactcgaactattggtgttatgaccatggttcatggggacaacatgggtttagtattaccaccccgtgtagcatgtgttcaggtggtgattattccttgtggcattaccaatgcactttctgaagaagacaaagaagcgctgattgcaaaatgcaatgattatcgaaggcgattactcagtgttaacatccgcgttagagctgatttacgagataattattctccaggttggaaattcaatcactgggagctcaagggagttcccattagacttgaagttgggccacgtgatatgaagagctgtcagtttgtagccgtcagacgagatactggagaaaagctgacagttgctgaaaatgaggcagagactaaacttcaagctattttggaagacatccaggtcacccttttcacaagggcttctgaagaccttaagactcatatggttgtggctaatacaatggaagactttcagaagatactagattctggaaagattgttcagattccattctgtggggaaattgactgtgaggactggatcaaaaagaccactgccagggatcaagatcttgaacctggtgctccatccatgggagctaaaagcctttgcatccccttcaaaccactctgtgaactgcagcctggagccaaatgtgtctgtggcaagaaccctgccaagtactacaccttatttggtcgcagctactgagggatgaacgaaagccccctcttcaactcctctcactttttaaagcattgatattagtatcttctcagatacagaccgttttatgattttttaaaaagtaaaagttctaaaatgaagtcacacaggacaattattcttatgcctaagttaacagtggataaaagacttttctgtaaacaactccagtaataaatatcatgaactaaaaaaaa

SEQ ID NO: 12732 - DNA, 2994 bp, Homo sapiens
gcctcggaggcgtgggtgacgcaggcgcagcgcgggctgcgcgcgctactgcccatccccggttgtcccacttttgttcgcctctcttcggccctctactcaagagctccgtctccgtctcgccctcctcgaagtcctcgtcgcgcgcccgcgacccaggtcgccctgaaatctagcccgtccgagcgcgagtccaacgccgcggccgcaccaaggccccctcagaccgtgccatgggtgacagtgatgacgagtacgatcgaaggcgcagggacaagttcagaagagagcgcagcgactacgaccgttcccgcgagagagatgaaagacgtcgaggggacgattggaatgacagagagtgggaccgtggccgtgagcgccgtagtcggggtgaatatcgggactatgaccggaatcggcgagagcgcttctcgccacctcgccacgaactcagcccgccacagaagcgcatgaggagagactgggatgagcacagctctgacccataccacagtggctatgagatgccctatgctggggggggtgggggcccaacttatggcccccctcagccctggggccaccctgacgtccacatcatgcagcaccatgtcctgcctatccaggccaggctgggcagcattgcagagattgacctgggtgtgccgccgcccgtgatgaagaccttcaaggagtttctcctctccctggatgactcggtggatgagacggaggccgtcaagcgctataatgactacaagctggatttccggaggcaacagatgcaggatttcttcctggcgcacaaagatgaggagtggtttcggtctaagtaccacccagatgaggtggggaagcgtcggcaggaggcccggggggccctgcaaaaccgactgagggtcttcctgtccctcatggagactggctggtttgataaccttctcctggacatagacaaagctgatgccattgtcaagatgctggatgcagccgtgattaagatggaaggaggcacggagaatgatcttcgcatcctggagcaggaggaggaggaggagcaggcaggaaagcctggggagcccagcaagaaagaagaaggacgggctggagcaggcctaggggacggggagcgcaaaaccaacgacaaggatgagaagaaggaagacggcaagcaggctgagaatgacagttctaatgatgacaaaacaaagaagtcggagggtgatggggacaaggaagagaagaaagaagactccgagaaggaagccaaaaagagtagcaagaagcggaaccggaagcacagtggtgacgacagctttgacgagggcagcgtgtcagagtctgagtcggagtcagagagcggccaggctgaggaggagaaggaggaggccgaagaagcgctcaaggagaaggagaagcccaaggaagaagaatgggagaagcccaaggacgccgcggggctggagtgcaagccgcggccgctgcataagacctgctccctcttcatgcgcaacatcgcgcccaacatctcccgggccgagatcatctccctttgtaaaaggtacccaggctttatgcgggtggcgctctcagagccccagccagagaggaggtttttccgtcgtggctgggtgaccttcgaccgcagtgttaacattaaagagatctgttggaacctgcagaacatccgtctccgggagtgtgagctgagccctggtgtgaacagggacctgacccggcgcgttcgcaacatcaacggcatcacccagcacaagcagattgtgcgcaacgacatcaagctggcggccaagctgatccacacgctggatgacaggacacagctttgggcctcagaaccagggacgcctcccctgcccacgagcctgccctcgcaaaacccgatcttgaagaatatcaccgactacctgatcgaggaagtaagcgccgaggaggaggagctgctggggagcagcgggggcgctcctcctgaggagcctcctaaggaagggaacccggcagagatcaacgtggagcgggatgagaagttgattaaggtcttggacaagctcctcctttacctgcgcatcgtgcattccttggattattacaacacctgtgagtaccccaacgaggacgagatgcccaatcgctgtgggatcatccacgttcgggggcccatgccacccaaccgcatcagtcacggggaagtgctggagtggcagaagacttttgaggagaagctcacgccgttgctgagtgtgcgggagtcactctcagaggaagaggcccagaagatggggcgcaaagacccagagcaggaagtggagaagttcgtcacctccaacacgcaggaactgggcaaggataagtggctgtgtcctctcagtggcaagaaattcaagggtcctgagtttgtgcgcaaacatatcttcaacaagcatgcagagaaaattgaggaagtgaaaaaggaagtcgcgttttttaacaacttcctcactgatgctaagcgcccagctctgcctgagatcaagccagcccagccacctggccccgcccagatactccccccaggtttgaccccaggactcccctacccacaccagactccccagggcctgatgccctatggtcagccccggcccccgatcttgggctatggagctggtgctgtccgccctgcagtccccacaggaggccctccatacccccatgccccgtatggtgctggtcgagggaactatgatgccttccgaggccagggaggttatcctgggaaacctcgcaacaggatggttcgtggagacccaagggccattgtggaatatcgggacctggatgccccagacgatgttgatttcttttgagccgtcccccgttcctcagtcctgtatcatccatacttgtactaccttgtcctatgaagctctgagaattttttgtacgatcagccttactgctaataaaagcacttccacagggaaaaaaaaaaaaaaa

SEQ ID NO: 12733 - DNA, 3065 bp, Homo sapiens
gcctcggaggcgtgggtgacgcaggcgcagcgcgggctgcgcgcgctactgcccatccccggttgtcccacttttgttcgcctctcttcggccctctactcaagagctccgtctccgtctcgccctcctcgaagtcctcgtcgcgcgcccgcgacccaggtcgccctgaaatctagcccgtccgagcgcgagtccaacgccgcggccgcaccaaggccccctcagaccgtgccatgggtgacagtgatgacgagtacgatcgaaggcgcagggacaagttcagaagagagcgcagcgactacgaccgttcccgcgagagagatgaaagacgtcgaggggacgattggaatgacagagacagggtctccctctgtcacccgggctgagtgcactggtgcagtcgaagcttgctgcagccgcgacctgcccagagtgggaccgtggccgtgagcgccgtagtcggggtgaatatcgggactatgaccggaatcggcgagagcgcttctcgccacctcgccacgaactcagcccgccacagaagcgcatgaggagagactgggatgagcacagctctgacccataccacagtggctatgagatgccctatgctggggggggtgggggcccaacttatggcccccctcagccctggggccaccctgacgtccacatcatgcagcaccatgtcctgcctatccaggccaggctgggcagcattgcagagattgacctgggtgtgccgccgcccgtgatgaagaccttcaaggagtttctcctctccctggatgactcggtggatgagacggaggccgtcaagcgctataatgactacaagctggatttccggaggcaacagatgcaggatttcttcctggcgcacaaagatgaggagtggtttcggtctaagtaccacccagatgaggtggggaagcgtcggcaggaggcccggggggccctgcaaaaccgactgagggtcttcctgtccctcatggagactggctggtttgataaccttctcctggacatagacaaagctgatgccattgtcaagatgctggatgcagccgtgattaagatggaaggaggcacggagaatgatcttcgcatcctggagcaggaggaggaggaggagcaggcaggaaagcctggggagcccagcaagaaagaagaaggacgggctggagcaggcctaggggacggggagcgcaaaaccaacgacaaggatgagaagaaggaagacggcaagcaggctgagaatgacagttctaatgatgacaaaacaaagaagtcggagggtgatggggacaaggaagagaagaaagaagactccgagaaggaagccaaaaagagtagcaagaagcggaaccggaagcacagtggtgacgacagctttgacgagggcagcgtgtcagagtctgagtcggagtcagagagcggccaggctgaggaggagaaggaggaggccgaagcgctcaaggagaaggagaagcccaaggaagaagaatgggagaagcccaaggacgccgcggggctggagtgcaagccgcggccgctgcataagacctgctccctcttcatgcgcaacatcgcgcccaacatctcccgggccgagatcatctccctttgtaaaaggtacccaggctttatgcgggtggcgctctcagagccccagccagagaggaggtttttccgtcgtggctgggtgaccttcgaccgcagtgttaacattaaagagatctgttggaacctgcagaacatccgtctccgggagtgtgagctgagccctggtgtgaacagggacctgacccggcgcgttcgcaacatcaacggcatcacccagcacaagcagattgtgcgcaacgacatcaagctggcggccaagctgatccacacgctggatgacaggacacagctttgggcctcagaaccagggacgcctcccctgcccacgagcctgccctcgcaaaacccgatcttgaagaatatcaccgactacctgatcgaggaagtaagcgccgaggaggaggagctgctggggagcagcgggggcgctcctcctgaggagcctcctaaggaagggaacccggcagagatcaacgtggagcgggatgagaagttgattaaggtcttggacaagctcctcctttacctgcgcatcgtgcattccttggattattacaacacctgtgagtaccccaacgaggacgagatgcccaatcgctgtgggatcatccacgttcgggggcccatgccacccaaccgcatcagtcacggggaagtgctggagtggcagaagacttttgaggagaagctcacgccgttgctgagtgtgcgggagtcactctcagaggaagaggcccagaagatggggcgcaaagacccagagcaggaagtggagaagttcgtcacctccaacacgcaggaactgggcaaggataagtggctgtgtcctctcagtggcaagaaattcaagggtcctgagtttgtgcgcaaacatatcttcaacaagcatgcagagaaaattgaggaagtgaaaaaggaagtcgcgttttttaacaacttcctcactgatgctaagcgcccagctctgcctgagatcaagccagcccagccacctggccccgcccagatactccccccaggtttgaccccaggactcccctacccacaccagactccccagggcctgatgccctatggtcagccccggcccccgatcttgggctatggagctggtgctgtccgccctgcagtccccacaggaggccctccatacccccatgccccgtatggtgctggtcgagggaactatgatgccttccgaggccagggaggttatcctgggaaacctcgcaacaggatggttcgtggagacccaagggccattgtggaatatcgggacctggatgccccagacgatgttgatttcttttgagccgtcccccgttcctcagtcctgtatcatccatacttgtactaccttgtcctatgaagctctgagaattttttgtacgatcagccttactgctaataaaagcacttccacagggaaaaaaaaaaaaaaa

SEQ ID NO: 12734 - DNA, 4639 bp, Homo sapiens
gagcgcgcacgtcccggagcccatgccgaccgcaggcgccgtatccgcgctcgtctagcagccccggttacgcggttgcacgtcggccccagccctgaggagccggaccgatgtggaaactgctgcccgccgcgggcccggcaggaggagaaccatacagacttttgactggcgttgagtacgttgttggaaggaaaaactgtgccattctgattgaaaatgatcagtcgatcagccgaaatcatgctgtgttaactgctaacttttctgtaaccaacctgagtcaaacagatgaaatccctgtattgacattaaaagataattctaagtatggtacctttgttaatgaggaaaaaatgcagaatggcttttcccgaactttgaagtcgggggatggtattacttttggagtgtttggaagtaaattcagaatagagtatgagcctttggttgcatgctcttcttgtttagatgtctctgggaaaactgctttaaatcaagctatattgcaacttggaggatttactgtaaacaattggacagaagaatgcactcaccttgtcatggtatcagtgaaagttaccattaaaacaatatgtgcactcatttgtggacgtccaattgtaaagccagaatattttactgaattcctgaaagcagttgagtccaagaagcagcctccacaaattgaaagtttttacccacctcttgatgaaccatctattggaagtaaaaatgttgatctgtcaggacggcaggaaagaaaacaaatcttcaaagggaaaacatttatatttttgaatgccaaacagcataagaaattgagttccgcagttgtctttggaggtggggaagctaggttgataacagaagagaatgaagaagaacataatttctttttggctccgggaacgtgtgttgttgatacaggaataacaaactcacagaccttaattcctgactgtcagaagaaatggattcagtcaataatggatatgctccaaaggcaaggtcttagacctattcctgaagcagaaattggattggcggtgattttcatgactacaaagaattactgtgatcctcagggccatcccagtacaggattaaagacaacaactccaggaccaagcctttcacaaggcgtgtcagttgatgaaaaactaatgccaagcgccccagtgaacactacaacatacgtagctgacacagaatcagagcaagcagatacatgggatttgagtgaaaggccaaaagaaatcaaagtctccaaaatggaacaaaaattcagaatgctttcacaagatgcacccactgtaaaggagtcctgcaaaacaagctctaataataatagtatggtatcaaatactttggctaagatgagaatcccaaactatcagctttcaccaactaaattgccaagtataaataaaagtaaagatagggcttctcagcagcagcagaccaactccatcagaaactactttcagccgtctaccaaaaaaagggaaagggatgaagaaaatcaagaaatgtcttcatgcaaatcagcaagaatagaaacgtcttgttctcttttagaacaaacacaacctgctacaccctcattgtggaaaaataaggagcagcatctatctgagaatgagcctgtggacacaaactcagacaataacttatttacagatacagatttaaaatctattgtgaaaaattctgccagtaaatctcatgctgcagaaaagctaagatcaaataaaaaaagggaaatggatgatgtggccatagaagatgaagtattggaacagttattcaaggacacaaaaccagagttagaaattgatgtgaaagttcaaaaacaggaggaagatgtcaatgttagaaaaaggccaaggatggatatagaaacaaatgacactttcagtgatgaagcagtaccagaaagtagcaaaatatctcaagaaaatgaaattgggaagaaacgtgaactcaaggaagactcactatggtcagctaaagaaatatctaacaatgacaaacttcaggatgatagtgagatgcttccaaaaaagctgttattgactgaatttagatcactggtgattaaaaactctacttccagaaatccatctggcataaatgatgattatggtcaactaaaaaatttcaagaaattcaaaaaggtcacatatcctggagcaggaaaacttccacacatcattggaggatcagatctaatagctcatcatgctcgaaagaatacagaactagaagagtggctaaggcaggaaatggaggtacaaaatcaacatgcaaaagaagagtctcttgctgatgatctttttagatacaatccttatttaaaaaggagaagataactgaggattttaaaaagaagccatggaaaaacttcctagtaagcatctacttcaggccaacaaggttatatgaatatatagtgtatagaagcgatttaagttacaatgttttatggcctaaatttattaaataaaatgcacaaaactttgattcttttgtatgtaacaattgtttgttctgttttcaggctttgtcattgcatctttttttcatttttaaatgtgttttgtttattaaatagttaatatagtcacagttcaaaattctaaatgtacgtaaggtaaagactaaagtcacccttccaccattgtcctagctacttggttcccctcagaaaaaaattcatgatactcatttcttatgaatctttccagggatttttgagtcctattcaaattcctatttttaaataatttcctacacaaatgatagcataacatatgcagtgttctacaccttgcttttttacttagtagattaaaaattataggaatatcaatataatgtttttaatattttttcttttccattatgctgtagtcttacctaaactctggtgatccaaacaaaatggcttcagtggtgcagatgtcacctacatgttattctagtactagaaactgaagaccatgtggagacttcatcaaacatgggtttagttttcaccagaatggaaagacctgtacccctttttggtggtcttactgagctgggtgggtgtctgttttgagcttatttagagtcctagttttcctacttataaagtagaaatggtgagattgttttctttttctaccttaaagggagatggtaagaaacaatgaatgtcttttttcaaactttattgacaagtgattttcaagtctgtgttcaaaaatatattcatgtacctgtgatccagcaagaagggagttccagtcaagagtcactacaactgattagttgtttagagaatgagaaatggaacagtgaggaatggaggccatatttccatgacttcccttgtaaacagaagcaacagaagggacaagaggctggcctctacatcactctcaccttccaaatcttgtggaagtgcatctacttgccagaaccaaattaacttacttccaagttctggctgcttgcaggtggaactccagctgcaagggagttagggaaatgaaggtctttttttaaaagcttctcagccttcctagggaacagaaattgggtgagccaatctgcaatttctactacaggcattgagaccagttagattattgaaatattatagagagttatgaacacttaaattatgatagtggtatgacattggatagaacatgggatactttagaagtagaattgacagggcatattagttgatgaaatggagtcatttgagtctcttaatagccatgtatcataattaccaagtgaagctggtggaacatatggtctccattttacagttaaggaatataatggacagattaatattgttctctgtcatgcccacaatccctttctaaggaagactgccctactatagcagtttttatatttgtcaatttatgaatataatgaatgagagttctggtacctcctgtctttacaaatattggtgttgtcagtatttttcctttttaaccattccaatcggtgtgtagtgatgtttcattttggttttaatttgtatatccctgatagctataattgggtcatagaaattctttatacattctagatgcaagtctcttgtcggatatatgtattgagatattacacctagtctgtggcttgactgttttctttatgtcttttgatgaatagaagttttaaattttgacaaggtcaaatttatttttttcttttgtttgatattttttctctccaatttaaccccaagatttcagatattctgctctattatataaactttatatttttatatttgtgatctaccttgaattgatatgtatgttgtgaattatggatcagggttctttttttcccccatacaagtatccagtcattgtaacactgtttattgaaagaattatcctttcctcattaaattaccttgccaattagtaaaaaatcaattaaccataatggtggatctgtttctggactttctgtttggttacactgaaatgtttgtccatccttgcactcactcataccatactgccttgaattactgtagctgcatagatgctccttaagttgggattacattgtaataaacgcaatgtaagttaaaaaaaaaaaaaaaaaa

SEQ ID NO: 12735 - DNA, 2831 bp, Homo sapiens
gaggcacaacaagggactgggggttcgtctgctgggtttgcggagcagctagctactcggcgggatctcccggcaggatgggtaaaaagataaagaaggaagtagagcctcctcctaaggatgtgtttgacccattaatgattgaaagcaaaaaagcagcaactgtggtgttaatgcttaattctccagaagaggaaattttggctaaagcatgtgaagccatttataaatttgctttaaaaggtgaggaaaataaaacaaccctccttgaacttggagctgtggaacctttaactaagctactcacccatgaagacaaaattgtaagaagaaatgctactatgatatttggaatcctggcttctaataatgatgttaaaaaattgttaagggagttagatgtcatgaattctgtcattgcccagctcgctccagaagaagaagtagttatccatgagtttgctagtctttgtctagcaaacatgtctgcagagtacaccagtaaagtgcaaatatttgaacatgggggattagagccactcatcagactactgagtagccctgacccggatgtaaagaagaactctatggaatgcatttacaacttggtgcaggattttcagtgtcgagctaaacttcaagaactaaatgcaatacctcctatcttagatctcttgaagtcagaatatccagtgattcagttgttggctctcaaaaccttaggtgttattgcaaatgataaggagtctcgaacaatgctaagagacaatcaaggattggaccatcttattaagatcctagaaactaaggaattgaatgaccttcatatagaagcacttgcagtgatagccaattgccttgaagacatggatactatggtgcagattcagcagacagggggtcttaaaaagctcctgtcatttgcagaaaactctacaattcctgatattcagaagaatgcagcaaaagccattactaaagcagcttatgatcctgaaaatagaaaactttttcatgaacaagaggttgaaaagtgccttgtagcccttttgggttctgaaaatgatggaactaaaattgctgcttcccaagctatttcagcaatgtgtgagaattcaggcagcaaagattttttcaataatcaggggattccacagttaattcagttgctaaaaagtgacaatgaagaggtacgggaagcagcagctctagccctggcaaacctaaccacttgcaaccctgctaatgcaaacgctgctgctgaagctgatggtattgatccattaataaacctcctgtctagtaaacgagatggagccattgccaacgctgctacagtattaacaaacatggccatgcaggagcccctgcgcctgaacatacagaatcacgacatcatgcatgccatcatcagcccactgcgttctgcaaacacagtcgtgcagagcaaagctgctctcgctgtcaccgcaactgcgtgtgacgttgaagcccggactgagttaagaaattctggtggattggagcccctggtagagctgctacgctccaagaatgatgaagtgaggaagcacgccagttgggcagtgatggtctgtgctggtgacgagctgacggccaatgaattatgcaggctcggggctttagatatccttgaagaagttaacgtatcaggaactcggaaaaataaattcagtgaggcagcttataataagttgctcaataacaatctttccctgaaatacagccagactggctatttgtcatcaagtaacataattaacgatggattctatgattatggtcggataaatcccggcaccaaactgttgcctttgaaggagctctgcttacaagaaccaagtgacctacgggctgtactcttaatcaacagtaaatcttacgtttctccaccttcatctatggaagataaatcagatgttggttatggacaaagtatttcttcttcatcttccttaagaagatcaagtaaagaaaagaacaaaaaaaatagttatcattttagtgctggatttggatctcccatagaagacaaatcagagccagcttctggacgaaatactgttctcagcaaaagcgccaccaaagaaaaaggatggaggaaaagcaaaggaaaaaaagaagaggaaaaagtgaaagaggaggaagaggttatggtggtaccaaaatttgttggtgaaggaagctctgacaaagaatggtgtcctccctctgaccctgatttctctatgtatgtgtatgaggtgaccaaatcaatactgccaataaccaatattaaggaacagattgaggatctggcaaagtatgtagcagaaaaaatgggtggtaagattccaaaagagaaactacctgatttcagctgggaacttcacataagtgaactgaaatttcaacttaaatccaatgttataccgattggacatgtcaaaaaaggaatcttctaccatcgagctttgcttttcaaggctctggctgatagaattggcattggttgctccctagttcgcggagagtacggtagagcgtggaatgaagtcatgctgcagaatgactctcggaagggagtgattgggggcctccccgctcctgagatgtacgtgattgacctcatgttccatccaggtggactgatgaagttgagaagtcgagaggctgatctttacagattcatttaagccatcagacgaacacaagagaggctcaaacaagaaattcactgtgtacactctctaagacattctccaaattgattttatctctttaaataaaaactttaaataagaaaaaaaaaaaaaaaaaaaaaaaaaaaa

SEQ ID NO: 12736 - DNA, 1646 bp, Homo sapiens
acagaataatggcgtctcgtagccccaggcgacagcgtggaggggcgggtctgtcgattggatgaacgcagctgagattactcccagccactaaggacgaagaggtggggcggtggcgtcccacgcctcgtgcgacagtgggcggggctttgttgcctgagtaaccgtatgatggtggtggtggtggtgtcttcctgtctcaacgatacctattttctagtgctgagatcctgagacaatgaatcatagtgaaagattcgttttcattgcagagtggtatgatccaaatgcttcacttcttcgacgttatgagcttttattttacccaggggatggatctgttgaaatgcatgatgtaaagaatcatcgcacctttttaaagcggaccaaatatgataacctgcacttggaagatttatttataggcaacaaagtgaatgtcttttctcgacaactggtattaattgactatggggatcaatatacagctcgccagctgggcagtaggaaagaaaaaacgctagccctaattaaaccagatgcaatatcaaaggctggagaaataattgaaataataaacaaagctggatttactataaccaaactcaaaatgatgatgctttcaaggaaagaagcattggattttcatgtagatcaccagtcaagaccctttttcaatgagctgatccagtttattacaactggtcctattattgccatggagattttaagagatgatgctatatgtgaatggaaaagactgctgggacctgcaaactctggagtggcacgcacagatgcttctgaaagcattagagccctctttggaacagatggcataagaaatgcagcgcatggccctgattcttttgcttctgcggccagagaaatggagttgttttttccttcaagtggaggttgtgggccggcaaacactgctaaatttactaattgtacctgttgcattgttaaaccccatgctgtcagtgaaggactgttgggaaagatcctgatggctatccgagatgcaggttttgaaatctcagctatgcagatgttcaatatggatcgggttaatgttgaggaattctatgaagtttataaaggagtagtgaccgaatatcatgacatggtgacagaaatgtattctggcccttgtgtagcaatggagattcaacagaataatgctacaaagacatttcgagaattttgtggacctgctgatcctgaaattgcccggcatttacgccctggaactctcagagcaatctttggtaaaactaagatccagaatgctgttcactgtactgatctgccagaggatggcctattagaggttcaatacttcttcaagatcttggataattagtggtgtggaaagtaaagaagtcacaggttgggacatttagacaagagtgaatcacacacgaggaatgtgttcattcttttattgtccgttgttttaacctgactgaatacaagatcaacaagagcactgtactcctggcaattattacatatgttagaacatggattttgcactgtagacaacatttaacaccagtctatggggtactgcattgctttttataaagttcaaaataaagatttattttcaaacaaaaaaaaaaaaaaaaaaaaaaaaa

SEQ ID NO: 12737 - DNA, 1615 bp, Homo sapiens
acagaataatggcgtctcgtagccccaggcgacagcgtggaggggcgggtctgtcgattggatgaacgcagctgagattactcccagccactaaggacgaagaggtggggcggtggcgtcccacgcctcgtgcgacagtgggcggggctttgttgcctgagtaaccgtatgatggtggtggtggtggtgtcttcctgtctcaacgatacctattttctagtgctgagatcctgagacaatgagtggtatgatccaaatgcttcacttcttcgacgttatgagcttttattttacccaggggatggatctgttgaaatgcatgatgtaaagaatcatcgcacctttttaaagcggaccaaatatgataacctgcacttggaagatttatttataggcaacaaagtgaatgtcttttctcgacaactggtattaattgactatggggatcaatatacagctcgccagctgggcagtaggaaagaaaaaacgctagccctaattaaaccagatgcaatatcaaaggctggagaaataattgaaataataaacaaagctggatttactataaccaaactcaaaatgatgatgctttcaaggaaagaagcattggattttcatgtagatcaccagtcaagaccctttttcaatgagctgatccagtttattacaactggtcctattattgccatggagattttaagagatgatgctatatgtgaatggaaaagactgctgggacctgcaaactctggagtggcacgcacagatgcttctgaaagcattagagccctctttggaacagatggcataagaaatgcagcgcatggccctgattcttttgcttctgcggccagagaaatggagttgttttttccttcaagtggaggttgtgggccggcaaacactgctaaatttactaattgtacctgttgcattgttaaaccccatgctgtcagtgaaggactgttgggaaagatcctgatggctatccgagatgcaggttttgaaatctcagctatgcagatgttcaatatggatcgggttaatgttgaggaattctatgaagtttataaaggagtagtgaccgaatatcatgacatggtgacagaaatgtattctggcccttgtgtagcaatggagattcaacagaataatgctacaaagacatttcgagaattttgtggacctgctgatcctgaaattgcccggcatttacgccctggaactctcagagcaatctttggtaaaactaagatccagaatgctgttcactgtactgatctgccagaggatggcctattagaggttcaatacttcttcaagatcttggataattagtggtgtggaaagtaaagaagtcacaggttgggacatttagacaagagtgaatcacacacgaggaatgtgttcattcttttattgtccgttgttttaacctgactgaatacaagatcaacaagagcactgtactcctggcaattattacatatgttagaacatggattttgcactgtagacaacatttaacaccagtctatggggtactgcattgctttttataaagttcaaaataaagatttattttcaaaaaaaaaaaaaaaaaaaaaaaaaaaaa

SEQ ID NO: 12738 - DNA, 11659 bp, Homo sapiens
gctggagggatcctccattcctgtgtcatttgcatgggtcctgctgtgaaatgaacctggcagggacttgttagacacttccttccttccctcattgagcactccagtgccattgttccacagttgttctaattgggtcctagcttcctcctgccaaggcaaacagcatagtctcgagtaggtgtccctaggctcatctgccagcctgaacatgaacacaggcaaagctgatgatggccagggaccccaggggacgtggggccctgtggggtctggcccccaggagcaagacctctgatgatgctggtgtctgggagtgagcaccatgcccatcacccaggacaatgccgtgctgcacctgcccctcctctaccagtggctgcagaacagcctgcaggaaggtggggatgggccggagcagcggctctgccaggcggccatccagaagctgcaggagtacatccagctgaactttgctgtggatgagagtacggtcccacctgatcacagcccccccgaaatggagatctgtactgtgtacctcaccaaggagctgggggacacagagactgtgggcctgagttttgggaacatccctgttttcggggactatggtgaaaagcgcagggggggcaagaagaggaaaacccaccagggtcctgtgctggatgtgggctgcatctgggtgacagagctgaggaagaacagcccagcagggaagagtgggaaggtccgactgcgggatgagatcctctcactgaatgggcagctgatggttggagttgatgtcagtggggccagttacctggctgagcagtgctggaatggcggctttatctacctgatcatgctgcgtcgctttaagcacaaagcccactccacttataatggcaacagtagcaacagctctgaaccaggagaaacacctaccttggagctgggtgaccgaactgcgaaaaaggggaaacgaaccagaaagtttggggtcatctccaggcctcctgccaacaaggcccctgaagaatccaagggcagcgctggctgtgaggtgtccagtgaccccagcactgagctggagaacggccctgaccctgaacttggaaacggccatgtctttcagctagaaaatggcccagattctctcaaggaggtggctggaccccatctagagaggtcagaagtggacagagggacagagcatagaattccaaagacagatgctcctctgaccacaagcaatgacaaacgccgcttctcaaaaggtgggaagacggacttccaatcgagtgactgcctggcacgggaggaagttggccgaatatggaagatggagctgctcaaagaatcggatgggctgggaattcaggttagtggaggccgaggatcaaagcgctcacctcacgctatcgttgtcactcaagtgaaggaaggaggtgccgctcacagggatggcaggctgtccttaggagatgagctgctggtaatcaatggtcatttactggtcgggctctcccacgaggaagcagtggccattcttcgctccgccacgggaatggtgcagcttgtggtggccagcaaggaaaactccgcagaggacctcctcaggttaacatctaagagcttgccagatctgaccagctcggtagaagatgtgtcctcctggactgataacgaagaccaggaggcagacggggaagaggacgaaggaaccagctcttctgtccagagagcaatgcctgggacagatgaaccccaagatgtgtgcggtgctgaggaatccaaggggaacttggaaagtcccaaacagggcagcaataaaatcaagctcaagagtcgcctttcagggggtgtacaccgccttgagtcagttgaagaatataacgagctgatggtgcggaatggggacccccggatccggatgttggaggtctcccgagatggccggaaacactccctcccgcagctgctggactcttccagtgcctcacaggaataccacattgtgaagaagtctacccgctccttaagcacgactcaggtggaatctccttggaggctcattcggccatccgtcatctcgatcattgggttgtacaaagaaaaaggcaagggccttggctttagtattgctggaggtcgagactgcattcgtggacagatggggatttttgtcaagaccatcttcccaaatggatcagctgcagaggacggaagacttaaagaaggggatgaaatcctagatgtaaatggaataccaataaagggcttgacatttcaagaagccattcatacctttaagcaaatccggagtggattatttgttttaacggtacgcacaaagttggtgagccccagcctcacaccctgctcgacacccacacacatgagcagatccgcctccccgaacttcaataccagtgggggagcctcagcgggaggttccgatgaaggcagttcttcatccctgggtcggaagacccctgggcccaaggacaggatcgtcatggaagtaacactcaacaaagagccaagagttggattaggcattggtgcctgctgcttggctctggaaaacagtcctcctggcatctacattcacagccttgctccaggatcagtggccaagatggagagcaacctgagccgcggggatcaaatcctggaagtgaactccgtcaacgtccgccatgctgctttaagcaaagtccacgccatcttgagtaaatgccctccaggacccgttcgccttgtcatcggccggcaccctaatccaaaggtttccgagcaggaaatggatgaagtcatagcacgcagcacttatcaggagagcaaagaggccaattcctctcctggcttaggtacccccttgaagagtccctctcttgcaaaaaaggactcccttatttctgaatctgaactctcccagtactttgcccacgatgtccctggccccttgtcagacttcatggtggccggttctgaggacgaggatcacccgggaagtggctgcagcacgtcggaggagggcagcctgcctcccagcacctccactcacaaggagcctggaaaacccagagccaacagcctcgtgactcttgggagccatcgggcttctgggctcttccacaagcaggtgacagttgccagacaagccagtctccccggaagcccacaggccctccgaaaccctctcctccgccagaggaaggtaggctgctacgatgccaacgatgccagtgatgaggaagagtttgacagagaaggggactgcatttcactcccaggggccctcccgggtcccatcaggcctctgtcagaggatgacccgaggcgtgtctcaatttcctcttccaagggcatggacgtccacaaccaagaggaacgaccccggaaaacactggtgagcaaggccatctcggcacctcttcttggtagctcagtggacttagaggagagtatcccagagggcatggtggatgctgcgtcctatgcagccaacctcacggactctgcagaggcccccaaggggagccctggaagctggtggaagaaggaactgtcaggatcaagtagcgcacccaaattggaatacacagtccgtacagacacccagagtccgacgaacactgggagccccagttccccccagcagaaaagtgaaggcctgggctccaggcacagaccagtggccagggtaagcccccactgcaagagatccgaggctgaggccaagcccagtggctcacagacagtgaacctgactggcagagccaatgatccatgcgatctggactcgagagtccaggccacttctgtcaaagtgactgtcgctggctttcagccaggtggagctgtggagaaggaatctctgggaaagctgaccactggagatgcttgtgtctctaccagctgtgaactagccagtgctctgtcccatctggatgccagccacctcacagagaacctgcccaaagctgcatcagagctggggcaacaacccatgactgaactggacagctcctcagacctcatctcttccccagggaagaagggggccgctcatcctgaccccagcaagacctctgtagacacagggcaagtcagtcggccagagaatcccagccagcctgcatcgcccagggtcaccaagtgcaaggccaggtctccagtcaggctcccccatgagggcagcccctccccgggggagaaagcagcggctccccctgactacagcaagactcgatcagcatcggaaaccagcacaccccacaataccaggagggtggctgccctcaggggagcgggacctggagcagagggaatgacaccagctggtgctgtcctgccaggagaccccctcacatcccaggagcagagacagggagctccaggtaaccacagtaaggctctggaaatgacaggaatccatgcacctgaaagctcccaggagccttccctgctggagggagcagattctgtgtcctcaagggcaccgcaggccagcctctccatgctgccatccactgacaacaccaaagaagcatgtggccatgtctcggggcactgctgcccaggggggagtagagagagccctgtgacggacattgacagcttcatcaaggagctggatgcttctgcagcaaggtctccgtcttcccagacgggggacagtggctctcaggagggcagtgctcagggccacccaccagccggggctggaggtgggagctcctgccgtgccgaaccagtcccggggggccagacctcctccccgaggagggcctgggctgctggtgcccccgcctacccacaatgggcctcccagccttcggttttagattcaattaatcccgacaaacattttactgtgaacaaaaactttctgagcaactactctagaaattttagcagttttcatgaagacagcacctccctatcaggcctgggtgacagcacggagccgtctctgtcatccatgtatggcgatgctgaggattcttcttctgaccctgagtcactcactgaagccccacgagcttctgccagggacggctggtcccctcctcgttcccgtgtgtctttgcacaaggaagatccttcggagtcagaagaggaacagattgagatttgttccacacgtggctgccccaatccaccctcgagtcctgctcatcttcccacccaggctgccatctgtcctgcctcagccaaagttctgtcattaaaatacagcactccgagagagtcggtggccagtccccgtgagaaggccgcctgcttgccaggctcatacacttcaggcccagactcttcccagccatcatcactcttggagatgagctctcaggagcatgaaactcatgcggacataagcacttcacagaaccacaggccctcgtgtgcagaagaaaccacagaagtcaccagcgctagctcagccatggaaaacagtccgctgtctaaagtagccaggcattttcacagtccgcccatcattctcagctcccccaacatggtaaatggcttggaacatgacctgctagatgacgaaaccctgaatcaatacgaaacaagcattaatgcagctgccagtctgtcctccttcagtgtggatgtccctaagaatggagaatctgttttggaaaacctccacatctctgaaagtcaagacctggatgacttgctacagaaaccaaaaatgatcgctaggaggcccatcatggcctggtttaaagaaataaataaacataaccaaggcacacatttgaggagcaaaaccgagaaggaacaacctctaatgcctgccagaagtcccgactccaagattcagatggtgagttcaagccaaaaaaagggcgttactgtgcctcatagccctcctcagccgaaaacaaacctggaaaataaggacctgtctaagaagagtccggcagaaatgcttctgactaatggtcagaaggcaaagtgtggtccgaagctgaagaggctcagcctcaagggcaaggccaaagtcaactctgaggcccctgctgcgaatgctgtgaaggctggggggacggaccacaggaaacccttgatctcaccccagacctcccacaaaacactttctaaggcagtgtcacagcggctccatgtagccgaccacgaggaccctgacagaaacaccacagctgcccccaggtccccccagtgtgtgctggaaagcaagccacctcttgccacctctgggccactgaaaccctcagtgtctgacacgagcatcaggacatttgtctcgcccctgacctctcccaagcctgttcctgagcaaggcatgtggagcaggttccacatggctgtcctctctgaacccgacagaggttgcccaaccacccctaaatctcctaagtgtagagcagagggcagggcgccccgtgctgactccgggccggtgagtccggcagcgtctaggaacggcatgtccgtggcagggaacagacagagtgagccgcgcctggccagccatgtggcagcagacacagcccaacccaggccgactggcgaaaaaggaggcaacataatggccagcgatcgcctcgaaagaacaaaccagctgaaaatcgtggagatttctgctgaagcagtgtcagagactgtatgtggtaacaagccagctgaaagcgacagacggggagggtgcttggcccagggcaactgtcaggagaagagtgaaatcaggctctatcgccaggtcgcagaatcatccacaagtcatccatcctcactcccatctcatgcctcccaggcagagcaggaaatgtcacgatcattcagcatggcaaaactggcgtcctcctcctcctcccttcaaacagccattagaaaggcagaatactcccagggaaaatcaagcctgatgtcagactcccgaggggtgcccagaaacagcattccagggggcccctcgggggaggaccatctctacttcaccccaaggccagcgaccaggacctactccatgccagcccagttctcaagccattttggacgggagggtcaccccccacacagcctgggtcgctctcgggacagccaggtccctgtgacaagcagtgttgtccccgaggcaaaggcatccagaggtggtcttcccagcctggctaatggacagggcatatatagtgtaaagccgctgctggacacatcgaggaatcttccagccacagatgaaggggatatcatttcagtccaggagacgagctgcctagtcacagacaaaatcaaagtcaccagacgacactactgctatgagcagaactggccccatgaatctacctcatttttctctgtgaagcagcggatcaagtcttttgagaacctggccaatgctgaccggcctgtagccaagtccggggcttccccatttttgtcggtgagctccaagcctcccattgggaggcggtcttccggcagcattgtttccgggagcctgggccacccaggtgacgcagcagcaaggttgttgagacgcagcttgagttcctgcagcgaaaaccaaagcgaagccggcaccctcctgccccagatggccaagtctccctcaatcatgacactgaccatctctcggcagaacccaccagagaccagtagcaagggctctgattcggaactaaagaaatcacttggtcctttgggaattcccaccccaacgatgaccctggcttctcctgttaagaggaacaagtcctcggtacgccacacgcagccctcgcccgtgtcccgctccaagctccaggagctgagagccttgagcatgcctgaccttgacaagctctgcagcgaggattactcagcagggccgagcgccgtgctcttcaaaactgagctggagatcacccccaggaggtcacctggccctcctgctggaggcgtttcgtgtcccgagaagggcgggaacagggcctgtccaggaggaagtggccctaaaaccagtgctgctgagacacccagttcagccagtgatacgggtgaagctgcccaggatctgccttttagaagaagctggtcagttaatttggatcaacttctagtctcagcgggggaccagcaaagattacagtctgttttatcgtcagtgggatcgaaatctaccatcctaactctcattcaggaagcgaaagcacaatcagagaatgaagaagatgtttgcttcatagtcttgaatagaaaagaaggctcaggtctgggattcagtgtggcaggagggacagatgtggagccaaaatcaatcacggtccacagggtgttttctcagggggcggcttctcaggaagggactatgaaccgaggggatttccttctgtcagtcaacggcgcctcactggctggcttagcccacgggaatgtcctgaaggttctgcaccaggcacagctgcacaaagatgccctcgtggtcatcaagaaagggatggatcagcccaggccctctgcccggcaggagcctcccacagccaatgggaagggtttgctgtccagaaagaccatccccctggagcctggcattgggagaagtgtggctgtacacgatgctctgtgtgttgaagtgctgaagacctcggctgggctgggactgagtctggatgggggaaaatcatcggtgacgggagatgggcccttggtcattaaaagagtgtacaaaggtggtgcggctgaacaagctggaataatagaagctggagatgaaattcttgctattaatgggaaacctctggttgggctcatgcactttgatgcctggaatattatgaagtctgtcccagaaggacctgtgcagttattaattagaaagcataggaattcttcatgaattttaacaagaatcattttctcagttctcttctttctttagcaaatcagagtgacttctttaaaccacaggttgttgaaatggccaacactggtacagacacggactataaaaatctccaagcttgtgcttacacatgaagcctgacttaactgtatgtgcaacagcaatgaaattaactccagaagccttccacctgcgtcacccaggccgggagggttccttcgttccagtgcctgtcccctacctttatgttatgtttactgatggggatacaagatgtgacacacccttctttatttgaaacaaacaaacatttagctagacctttgcttccttcttgccagctctcccaacatacccaatcctggtgatcagggaactaaaagtctgagggggacacaaatgtcacacctaagaggacaatcaatcattttgtatgattttgtaagtaaatgacagaatgcttttaggcacattcaatggaaggaggagatgtaggtctgtatatgttaccctgaaaagagaataagacttacttaaaaaaatgaattatgacctgttaggctgagctcaggaattgtccaaaaaggaaaaagcaaaataattaattgagagtattttttagtgagtgtaatgtataatgtacgtatgcaaagttcaactcaataggttattgatcaccatgaagtattgatcattttctatctcaaaagtgtaagccataaggctgttttacagaatagcacttctgataagctgtattaaatagccatgagcttcactgcttagagggagcagaaaggtcaacatctaaaagcaccttacaactagtttttgaacctgtcttgataagtgcttgaattcaagactggtcagtccaagagcagacaaaaatatcacaagtcagtcagtcactgggtttccatttctgaattttatgcactccaaccatgaatttaaactaaatttttagaaatcaagtatctttctaagtgtccttggatttatagacaatgtatgtacaatccaaatagaggagcttaatggaatccttttaggagactggttggtttttttccctctttcccaacatgtttaagaaatgtaacattctaagtattggatctcttttcttgacctagtataatgacaactgcagtgacttaagtttttgctgttttcgttttcccgctttgcaatttcctccttttgccaaaaatgttttcctacagaagactgtcgtgactcacgctacttgggaaactcactctggccactcctcctctggtggcatgagctgcttcccagtagctattccgattggatattccgttcgtcgtcacatagctggcttttctctcctcatgatgtaccttattttcttaggtaaataattccaaactctcatcgggtcataaagaggaggagaaacagggtgagtcaaggtaaaggagcagaaatgtagttacaagccaggtcgtcttcagtggcacaaaccaacccgttgagccctgacaacatgagtggagagtgcatttgccatacctgtgtgcatgacactaagattttatgttggagatacttctttaaataacctacagcttgggtctatggctgtgacccccagattcatggaggggctttagccatcagctttgtacatcatcatttttctgaatgaccaatcccactaaacatctttgaagtcggcctagagaggtccttcagatgagagagaaatagctggcttgtctgagtccagatttctcatcaactggcaatacaaaggaaaatatggtacaggagttagttagaaaggtcttattgattttacttctacttttcactacagttacaggtagaatactgtaggaagtcagtgcaaggtgcatgcttgattgatagatattgattgattgtttttcagtctctggggtcagttttgtggtttctgctttcttgcctaaatcaaagactatttcaagtcaacaacactgaaaactgcttttcgcctccactcttacagctgtgcctaataataattaattaataaacgcacagccctatgtgaacagacaggaatttcttgtgcaatgtggagcaaatggaatggtctccttccgcaagtctttttaatcctcatatctggagtacaagggtagacctctggcttaccacatacactatgctaaagtcatcagccactgctactacatcttgccagaaggtttccctcgccaacaaacagttgaaatttaagggaagaagcaaaagctaaactgtctttgaccctaagatagatagaaagctatttatttgtcttcagtgttcaaggcatgactagtatttctaattagcctaataaattcccacactttctgaagtgaacactaatggtattgtcctactaaaactgtcattgtttctttttttttaactggtcagtcattcacaataagctatgagggtaaataaatatgtgttataacaagtaaaccgtagttgcaagaatataccatgaagattaaagtaggctgggtttcatttccatcttcccacacatctcattgaatttgatggttgacttaattggcaccataactttgtatgatattatacattaacctttatttatgtaaagtaaaatgccttatatattaaagagtaagtgcaataatatgaaatagcctgtacattttaaaaatgttgtcaccaagttatataaatccacatctctgtaaacaaccttttttaagtaattttaaaaaaaataaacactctgcttactacttgaaaaaaaaaaaaaaaaaa

SEQ ID NO: 12739 - DNA, 3059 bp, Homo sapiens
gacccggatttaaagagacaggcgctccaaccgtcgtgggctgcccgcggcctgtaatgagcaagttccgaggcctacggtgagcgccggagccggagaggcagctatatgtctttggctttcaagatcttctttccacaaaccctccgtgcactcagccgaaaagaactgtgcctattccgaaaacatcactggcgtgatgtaagacaattcagccagtggtcagaaacagatctgcttcatggacatcccctcttcctgagaagaaagcctgttctatcattccagggaagccatctaagatcacgtgccacctaccttgttttcttgccagggttgcatgtgggactctgcagtggcccctgtgagatggctgagcaacggttctgtgtggactatgccaagcgtggcacagctggctgcaaaaaatgcaaggaaaagattgtgaagggcgtatgccgaattggcaaagtggtgcccaatcccttctcagagtctgggggtgatatgaaagagtggtaccacattaaatgcatgtttgagaaactagagcgggcccgggccaccacaaaaaaaatcgaggacctcacagagctggaaggctgggaagagctggaagataatgagaaggaacagataacccagcacattgcagatctgtcttctaaggcagcaggtacaccaaagaagaaagctgttgtccaggctaagttgacaaccactggccaggtgacttctccagtgaaaggcgcctcatttgtcaccagtaccaatccccggaaattttctggcttttcagccaagcccaacaactctggggaagccccctcgagccccacccctaagagaagtctgtcttcaagcaaatgtgaccccaggcataaggactgtctgctacgggagtttcgaaagttatgcgccatggtggccgataatcctagctacaacacgaagacccagatcatccaggacttccttcggaaaggctcagcaggagatggtttccacggtgatgtgtacctaacagtgaagctgctgctgccaggagtcattaagactgtttacaacttgaacgataagcagattgtgaagcttttcagtcgcatttttaactgcaacccagatgatatggcacgggacctagagcagggtgacgtgtcagagacaatcagagtcttctttgagcagagcaagtctttccccccagctgccaagagcctccttaccatccaggaagtggatgagttccttctgcggctgtccaagctcaccaaggaggatgagcagcaacaggccctacaggacattgcctccaggtgtacagccaatgaccttaaatgcatcatcaggttgatcaaacatgatctgaagatgaactcaggtgcaaaacatgtgttagacgcccttgaccccaatgcctatgaagccttcaaagcctcgcgcaacctgcaggatgtggtggagcgggtccttcacaacgcgcaggaggtggagaaggagccgggccagagacgagctctgagcgtccaggcctcgctgatgacacctgtgcagcccatgttggcggaggcctgcaagtccgttgagtatgcaatgaagaaatgtcccaatggcatgttctctgagatcaagtacgatggagagcgagtccaggtgcataagaatggagaccacttcagctacttcagccgcagtctcaagcccgtccttcctcacaaggtggcccactttaaggactacattccccaggcttttcctgggggccacagcatgatcttggattctgaagtgcttctgattgacaacaagacaggcaaaccactgccctttgggactctgggagtacacaagaaagcagccttccaggatgctaatgtctgcctgtttgtttttgattgtatctactttaatgatgtcagcttgatggacagacctctgtgtgagcggcggaagtttcttcatgacaacatggttgaaattccaaaccggatcatgttctcagaaatgaagcgagtcacaaaagctttggacttggctgacatgataacccgggtgatccaggagggattggaggggctggtgctgaaggatgtgaagggtacatatgagcctgggaagcggcactggctgaaagtgaagaaagactatttgaacgagggggccatggccgacacagctgacctggtggtccttggagccttctatgggcaagggagcaaaggcggcatgatgtcaatcttcctcatgggctgctacgaccctggcagccagaagtggtgcacagtcaccaagtgtgcaggaggccatgatgatgccacgcttgcccgcctgcagaatgaactagacatggtgaagatcagcaaggaccccagcaaaatacccagctggttgaaggtcaacaagatctactatcctgacttcatcgtcccagacccaaagaaagctgccgtgtgggagatcacaggggctgaattctccaaatcggaggctcatacagctgacgggatctccatccgattccctcgctgcacccgaatccgagatgataaggactggaaatctgccactaaccttccccaactcaaggaactgtaccagttgtccaaggagaaggcagacttcactgtagtggctggagatgaggggagctccactacagggggtagcagtgaagagaataagggtccctcagggtctgctgtgtcccgcaaggcccccagcaagccctcagccagtaccaagaaagcagaagggaagctgagtaactccaacagcaaagatggcaacatgcagactgcaaagccttccgctatgaaggtgggggagaagctggccacaaagtcttctccagtgaaagtaggggagaagcggaaagctgctgatgagacgctgtgccaaacaaagaggcggccagccagtgagcagagaggaagaactgtgccagcaggcaggagatagaacagcccggcctagccaggagagactgcagggactcactcagctgctggccccaagtcaaaatttacattaaagggaaaagaccagtctgggtgtgggaa

SEQ ID NO: 12740 - DNA, 3701 bp, Homo sapiens
gacccggatttaaagagacaggcgctccaaccgtcgtgggctgcccgcggcctgtaatgagcaagttccgaggcctacggtgagcgccggagccggagaggcagctatatgtctttggctttcaagatcttctttccacaaaccctccgtgcactcagccgaaaagaactgtgcctattccgaaaacatcactggcgtgatgtaagacaattcagccagtggtcagaaacagatctgcttcatggacatcccctcttcctgagaagaaagcctgttctatcattccagggaagccatctaagatcacgtgccacctaccttgttttcttgccagggttgcatgtgggactctgcagtggcccctgtgagatggctgagcaacggttctgtgtggactatgccaagcgtggcacagctggctgcaaaaaatgcaaggaaaagattgtgaagggcgtatgccgaattggcaaagtggtgcccaatcccttctcagagtctgggggtgatatgaaagagtggtaccacattaaatgcatgtttgagaaactagagcgggcccgggccaccacaaaaaaaatcgaggacctcacagagctggaaggctgggaagagctggaagataatgagaaggaacagataacccagcacattgcagatctgtcttctaaggcagcaggtacaccaaagaagaaagctgttgtccaggctaagttgacaaccactggccaggtgacttctccagtgaaaggcgcctcatttgtcaccagtaccaatccccggaaattttctggcttttcagccaagcccaacaactctggggaagccccctcgagccccacccctaagagaagtctgtcttcaagcaaatgtgaccccaggcataaggactgtctgctacgggagtttcgaaagttatgcgccatggtggccgataatcctagctacaacacgaagacccagatcatccaggacttccttcggaaaggctcagcaggagatggtttccacggtgatgtgtacctaacagtgaagctgctgctgccaggagtcattaagactgtttacaacttgaacgataagcagattgtgaagcttttcagtcgcatttttaactgcaacccagatgatatggcacgggacctagagcagggtgacgtgtcagagacaatcagagtcttctttgagcagagcaagtctttccccccagctgccaagagcctccttaccatccaggaagtggatgagttccttctgcggctgtccaagctcaccaaggaggatgagcagcaacaggccctacaggacattgcctccaggtgtacagccaatgaccttaaatgcatcatcaggttgatcaaacatgatctgaagatgaactcaggtgcaaaacatgtgttagacgcccttgaccccaatgcctatgaagccttcaaagcctcgcgcaacctgcaggatgtggtggagcgggtccttcacaacgcgcaggaggtggagaaggagccgggccagagacgagctctgagcgtccaggcctcgctgatgacacctgtgcagcccatgttggcggaggcctgcaagtccgttgagtatgcaatgaagaaatgtcccaatggcatgttctctgagatcaagtacgatggagagcgagtccaggtgcataagaatggagaccacttcagctacttcagccgcagtctcaagcccgtccttcctcacaaggtggcccactttaaggactacattccccaggcttttcctgggggccacagcatgatcttggattctgaagtgcttctgattgacaacaagacaggcaaaccactgccctttgggactctgggagtacacaagaaagcagccttccaggatgctaatgtctgcctgtttgtttttgattgtatctactttaatgatgtcagcttgatggacagacctctgtgtgagcggcggaagtttcttcatgacaacatggttgaaattccaaaccggatcatgttctcagaaatgaagcgagtcacaaaagctttggacttggctgacatgataacccgggtgatccaggagggattggaggggctggtgctgaaggatgtgaagggtacatatgagcctgggaagcggcactggctgaaagtgaagaaagactatttgaacgagggggccatggccgacacagctgacctggtggtccttggagccttctatgggcaagggagcaaaggcggcatgatgtcaatcttcctcatgggctgctacgaccctggcagccagaagtggtgcacagtcaccaagtgtgcaggaggccatgatgatgccacgcttgcccgcctgcagaatgaactagacatggtgaagatcagcaaggaccccagcaaaatacccagctggttgaaggtcaacaagatctactatcctgacttcatcgtcccagacccaaagaaagctgccgtgtgggagatcacaggggctgaattctccaaatcggaggctcatacagctgacgggatctccatccgattccctcgctgcacccgaatccgagatgataaggactggaaatctgccactaaccttccccaactcaaggaactgtaccagttgtccaaggagaaggcagacttcactgtagtggctggagatgaggggagctccactacagggggtagcagtgaagagaataagggtccctcagggtctgctgtgtcccgcaaggcccccagcaagccctcagccagtaccaagaaagcagaagggaagctgagtaactccaacagcaaagatggcaacatgcagactgcaaagccttccgctatgaaggtgggggagaagctggccacaaagtcttctccagtgaaagtaggggagaagcggaaagctgctgatgagacgctgtgccaaacaaaggtattgctggacatcttcactggggtgcggctttacttgccaccctccacaccagacttcagccgtctcagacgctactttgtggcattcgacggggacctggtacaggaatttgatatgacttcagccacgcacgtgctgggtagcagggacaagaaccctgcggcccagcaggtctccccagagtggatttgggcatgtatccggaaacggagactggtagctccctgctaggtttgctgtcttccctctccctcaggccatactctcctttaccatactactggactggactcaggctggaggcagatagacacagtatagggggaatgggcttgcttctcccaaacccaccagttctccactgtctcttctggaccaggaattagttgctgtgggtgccacagctgaagtcagtttgtcttgctggtttaaatagatctttcagagctgggtgctgggtttgccatctttttgttttctttgaaaagcagcttagttaccctttttataaataaaatatcttgcagttatctttgtcctttccccacctacacccccaataatttccctagagattaaggagtaaaggctgggctatggcagctctgtccacaaagccttctctcccatccttgcctgttcctttgtacttccaggctcattttaaagttgtatttaaaggactgccctcggaaatgcttctgtttagcggaacttgtattcagcctgacacgctttgccaggaacaaacctcatgtgaaagaaaacaaaatgaatttttttactttcttctc

SEQ ID NO: 12741 - DNA, 3768 bp, Homo sapiens
gcttgggtggcaaccagaactagggagctggtggagaaggtggcggccgctggaaggaggcccgggaggtggctgaggggtccaggcggcgggacgactctggccttttgaagaccgggaggaaactctacagagaagaatgtcagatgcagcagaagctccccgagaagcaacaggagaaaatggagaaacagaaatgaaagaagaggaggaacctaatccaaattataaagaagtagaagatccacaacaggaatcaaaagatgacacaatagcatggagagagtctcaggaggaggagaggaaaacgggcgaggaggaaggggaggaggaggagaaagaggaggaggggaaggaggacaaaaagattgtcatggaagaaactgaggaaaaggctggagaagtccaagagaaggaggcttcaggaatacaggaagaaaccacagtagagccccaagaagtcacagcgtccatgatccgtttggagacacagattactgattcccagtcaatcacatcaggaattttcccaaaaacccaaagaggtagcaagtcaaagctttccttacaattggaggatgcagaaacagatgagcttttaagagacctgagcacacaaattgaatttcttgatttggatcaaatcagtcctgaggaacaacagattagttcccctgaaaggcagccctcaggagagcttgaggagaaaaccgaccggatgccccaagatgaactgggacaagaaagaagggacttggagccagaaaacagagaggagggacaagaaaggagagtatccgacatccagtccaaagcagggatctcccgggagtcactggtgtccagcaccacagaggacattctgtttcaaaaggataaaagcaccccggtgtatcccttgaccatgacctggtcgtttggatggaacagttctcttcctgtttactatattcgagaggaaaggcagagagttcttctgtatgtttgtgctcacactgcgatcatctacaacgtgttcaggaacaatcaataccaccttcagggccacgccaatattatctcctgcctctgcgtcagtgaagacaggcggtggatcgccacagcagacaaagggccagactgcctggtgattatatgggactccttcacaggtattcctgtgcacacaatatttgacagctgccctgaagggaatggcatcatggccatggccatgacccacgacgccaagtatctggcaaccatctcagatgctgaagtccagaaggtatgcatctggaagtggactttggcagtggaaacgccagcatgcactctcgaactccccacagagtacggtgttcagaactacgttacttttaacccaacaaataataaagaattggtgagcaatagtaaaacacgggcaatatattatgcatggtatgaagagagggatacactggctcacagtgccccacttttaactgaaaaaaccttcaacaagcttgtgggaaagtttagccagtccatctttcacttgaatttaacacaaatactctcagccacaatggaagggaagctggttgtctgggacatacaccgcccaccctcatctgcctccacctttttgggctttccctatatcaagccttgtaaattggttcatttgcagaaagagggtatcacggtacttaccacaattgatagctacattgtcacaggtgacattaaggggaacattaagttctatgatcacaccctgtctattgttaactggtacagtcacttgaaactgggcgccataagaactctgtccttttcaaagaccccagcaactcctcctactgaaaaatcaaactatcctcctgactgcactttaaaaggtgacctttttgtcttaaggaattttatcattggaacatctgatgccgcggtgtaccacttaacaacagatgggaccaaacttgagaagttatttgtagagcccaaggatgccatttgtgccatctcctgccacccatatcaacccctcattgccatcgggagcatctgtgggatgatcaaagtgtggaattatgaaaacaaacaatatcttttcagcagggtttttgagaaggggcttggagtccagagtctgacctacaaccccgaaggagcccttcttggagctggctttacagaggggacagtttacattcttgatgcaatgtctttagaaaatgaaagcccagagcctttcaaatattccagaaccagtgtgactcatataagcttttcccatgactcccagtatatggcaactgctgatagaagttttactgtggctgtttacatgctggtggtcagaaatggacagagggtctgggagtacttagcaagacttcgctctcatcgcaaaagcattcgaagtctcctgtttggggtttacctggacagcaatgagcctagactgctgagccttgggacagacaggctcttgatagagtatgatcttctcaggagctacaaagaccacctggaagtcctggacattcaccacaccgaccagggctgctatcccacctgcatggtctggtacccaccactcaccagggaactcttcctgcttatttgcaacagtggctacaaagtgaagctttttaatgctactaccaaaatgtgcagaaagacgcttctggggccagcttatggttcccctattgagcagacacaagtcctcccagtgagaagcatggcggagctacagaaacgctacttggtgtttattaacagagacaaggtgggacttcagatcttaccagttgacggcaatccacataagacatctgctattgtttgccacccgaacggggtggccggcatggccgtttcctatgatggctgctacgccttcactgcgggagggcacgatcgctcggtggtgcagtggaaaatcaccttaagtgtcctggaggcagcggtttctcttgggggtgaagacttgaccccattctatggtctgctgtctggtggccgggaaggaaaattctacagggagctagaagactacttctactattctcagctccgcagtcaaggcatcgacacaatggagaccagaaaggtgtcagaacacatttgcctgtcagagcttccttttgtcatgagagcaattggcttttacccatctgaagagaagattgatgatatatttaacgaaatcaaatttggtgaatatgtggacactggaaagctaatcgacaagatcaacttaccagatttcctaaaagtgtaccttaaccacaagccaccttttggtaacaccatgagtggcatccacaagagctttgaggtgctcggttataccaactccaaagggaaaaaggccattcgaagagaggacttcctgagactgctcgttactaaaggtgagcatatgacggaggaggagatgttggattgctttgcttcactgtttggcctgaatcccgagggatggaaatccgagcctgcaacctgctccgtcaaaggttcagaaatttgccttgaagaagaacttccagacgaaatcactgcagaaatattcgcgactgaaattcttggcttaaccatttcagaagattccggccaggatggtcagtgaagttaccaggaatgtttaaagcacaaaggactttgggtgtgtgtgcatgcacatgtgtgtgttttccatgaggcactgctttttatgcatttccctcccccctctcatctttagaacatttagacattaaagcaagtttctggtgagcaaaaaaaaaaaaaaaa

SEQ ID NO: 12742 - DNA, 700 bp, Homo sapiens
cctgctccttgccatccaccacaaaccctcaccgaaccagtggccaccaccatgacaagggaccagaatggaacctgggagatggagagtaatgaaaactttgagggctacatgaaggccctggatattgattttgccacccgcaagattgcagtacgtctcactcagacgaaggttattgatcaagatggtgataacttcaagacaaaaaccactagcacattccgcaactatgatgtggatttcactgttggagtagagtttgacgagtacacaaagagcctggataaccggcatgttaaggcactggtcacctgggaaggtgatgtccttgtgtgtgtgcaaaagggggagaaggagaaccgcggctggaagcagtggattgagggggacaagctgtacctggagctgacctgtggtgaccaggtgtgccgtcaagtgttcaaaaagaaatgatggcgacgtgggaggcctgccaagcacaagctccccactgcccacactgagtggtctactggctttgagaaacagctgtggggaccttcccactcttgacagagccccattaaggcatctgggtgggttttaaacagaatgcctatgtagcagtgatagacatattcccctcctttgaaacctagcattaaatggaaaaacaaaaattactcccatattttgaaaccctttaaaaaaaaaaaaa

SEQ ID NO: 12743 - DNA, 2809 bp, Homo sapiens
acttggctctgcctccgctgactctagcgccatggcccggcacctgctcctcccccttgtgatgcttgtcatcagtcccatcccaggagccttccaggactcagctctcagtcctacccaggaagaacctgaagatctggactgcgggcgccctgagccctcggcccgcatcgtggggggctcaaacgcgcagccgggcacctggccttggcaagtgagcctgcaccatggaggtggccacatctgcgggggctccctcatcgccccctcctgggtcctctccgctgctcactgtttcatgacgaatgggacgctggagcccgcggccgagtggtcggtactgctgggcgtgcactcccaggacgggcccctggacggcgcgcacacccgcgcagtggccgccatcgtggtgccggccaactacagccaagtggagctgggcgccgacctggccctgctgcgcctggcctcacccgccagcctgggccccgccgtgtggcctgtctgcctgccccgcgcctcacaccgcttcgtgcacggcaccgcctgctgggccaccggctggggagacgtccaggaggcagatcctctgcctctcccctgggtgctacaggaagtggagctaaggctgctgggcgaggccacctgtcaatgtctctacagccagcccggtcccttcaacctcactctccagatattgccagggatgctgtgtgctggctacccagagggccgcagggacacctgccagggtgactctggggggcccctggtctgtgaggaaggcggccgctggttccaggcaggaatcaccagctttggctttggctgtggacggagaaaccgccctggagttttcactgctgtggctacctatgaggcatggatacgggagcaggtgatgggttcagagcctgggcctgcctttcccacccagccccagaagacccagtcagatccccaggagcccagggaggagaactgcaccattgccctgcctgagtgcgggaaggccccgcggccaggggcctggccctgggaggcccaggtgatggtgccaggatccagaccctgccatggggcgctggtgtctgaaagctgggtcttggcacctgccagctgctttctggacccgaacagctccgacagcccaccccgcgacctcgacgcctggcgcgtgctgctgccctcgcgcccgcgcgcggagcgggtggcgcgcctggtgcagcacgagaacgcttcgtgggacaacgcctcggacctggcgctgctgcagctgcgcacgcccgtgaacctgagtgcggcttcgcggcccgtgtgcctaccccacccggaacactacttcctgcccgggagccgctgccgcctggcccgctggggccgcggggaacccgcgcttggcccaggcgcgctgctggaggcggagctgttaggcggctggtggtgccactgcctgtacggccgccagggggcggcagtaccgctgcccggagacccgccgcacgcgctctgccctgcctaccaggaaaaggaggaggtgggcagctgctggaatgactcgcgttggagccttttgtgccaggaggaggggacctggtttctggctggaatcagagactttcccagtggctgtctacgtccccgagccttcttccctctgcagactcatggcccatggatcagccatgtgactcggggagcctacctggaggaccagctagcctgggactggggccctgatggggaggagactgagacacagacttgtcccccacacacagagcatggtgcctgtggcctgcggctggaggctgctccagtgggggtcctgtggccctggctggcagaggtgcatgtggctggtgatcgagtctgcactgggatcctcctggccccaggctgggtcctggcagccactcactgtgtcctcaggccaggctctacaacagtgccttacattgaagtgtatctgggccgggcaggggccagctccctcccacagggccaccaggtatcccgcttggtcatcagcatccggctgccccagcacctgggactcaggccccccctggccctcctggagctgagctcccgggtggagccctccccatcagccctgcccatctgtctccacccggcgggtatccccccgggggccagctgctgggtgttgggctggaaagaaccccaggaccgagtccctgtggctgctgctgtctccatcttgacacaacgaatctgtgactgcctctatcagggcatcctgccccctggaaccctctgtgtcctgtatgcagaggggcaggagaacaggtgtgagatgacctcagcaccgcccctcctgtgccagatgacggaagggtcctggatcctcgtgggcatggctgttcaagggagccgggagctgtttgctgccattggtcctgaagaggcctggatctcccagacagtgggagaggccaacttcctgccccccagtggctccccacactggcccactggaggcagcaatctctgccccccagaactggccaaggcctcgggatccccgcatgcagtctacttcctgctcctgctgactctcctgatccagagctgaggggctagggtcccagcaccacttcccccttctccaccctctacttcccgcccagtggggctggaatgtggcccagccggctggaacctcaagggccccacccaccgagattgcagcggctctggctaattgggcctcagtgcccgggctattttgaacccaggaatccttgggggtggtgggaggagcggacaataaaggtgtaaacac

SEQ ID NO: 12744 - DNA, 2427 bp, Homo sapiens
cacaggggcactgacatctttgctggactcttttaatcctcataaacccaggctgctggcacttgaaatttgagaagggcaatcagtctggcctcctgcctttctggcctgcaggcccagcctggacaaacaatttaggtggagctcctggaggctggaagcagagaggaggtacctcaccatcctctcctgccagctgttgcagactctgcctggggaactgattaagggtgagcagaggcatttatctccatgttaacaagcagatgtcatggcacccccagtaccggagctccaagttccgtcatgtctttggcaaaccagccagcaaggagaactgctacgactccgtgcctatcacccgcagcgttcacgacaaccacttctgtgccgtgaacccccacttcattgcagttgtgactgagtgtgctggtggaggggccttcctcgtcatccccctgcaccagacagggaagttggacccccactacccaaaagtctgcgggcacagaggcaacgttttggatgtcaagtggaacccttttgatgattttgagatcgcctcctgttctgaagatgccacaattaagatctggagcatccccaagcagctgctgaccaggaacctcacggcctacaggaaggaactcgtgggccacgcgcgcagagtaggcctggtggagtggcaccccacggccgccaacatcctcttcagtgctggctatgactacaaggtgatgatctggaacctggatacaaaggagtctgtcatcacaagccccatgagtacgattagctgtcaccaagatgtgatcctctccatgtccttcaacaccaacggcagcctgttggccaccacctgcaaagaccgcaagattcgggttattgacccccgagcagggaccgtcctccaggaggccagctacaaagggcaccgggccagcaaagtgctgtttctggggaacctgaagaagctgatgtccacaggcacatcccgatggaacaaccggcaggtggccttgtgggaccaggataacctctctgtgcctctgatggaggaggacctggacggctcctcgggcgtgctgtttcccttctatgacgcggacaccagcatgctctacgtggtggggaagggagatggcaacatccgctactacgaggtgagcgccgacaagcctcacctgagctacctgactgagtaccgctcctataacccacagaaggggatcggtgtcatgccaaagagaggactcgacgtgtcctcctgcgagatcttccgcttctacaagctgatcacaaccaaaagcctcatcgagcccatctccatgattgtgccccggcagtcagaatcctaccaagaggacatataccctccaacagcaggggcccagccctccctgacggcccaggagtggctcagcgggatgaatcgagacccaatcctggtgtcccttaggcctggctctgagctgctgagaccccacccactgcctgcagagagacctatcttcaattccatggccccagcctcaccccggctcttgaatcagacagaaaagctggctgcagaagatggctggaggtcttcctccctgttggaggagaagatgccaaggtgggcagcagaacacaggctggaggagaagaaaacctggctgacaaatggctttgacgttttcgaatgccccccaccaaagacagagaatgagttgctgcagatgttctaccggcaacaggaggagatccgaaggctccgggagctgttgacccagcgagaggtccaggccaaacagttggaactggagatcaaaaacttgcggatgggctcagagcagctctgagcagagacctctgccctcctcaccctcagggacaccactcggctccatggggaggtttagaaccaaaccacaagtcccctcaaggacaaccactatttctatattttttaccagaaaacaaaactctccatcgctgaaagagattccagtgggacatggtgccgtttttctgtttgccttcttgcaacaacagtttctgaattgactttgttttcagatgatgccttctgttgaattctgttattaagggcccatgatgagctgtaacttctcaagaggaaagaacacagtagaaaactagagctggaaggatctaggttgacctgtctgtgattttcaaactgtggtccagagaataggggaagactgggccagacgcagtggctcatgcctgtaatcccagcactctgggaggctgaggtgggcggattgcttgaggtcgggagtttgaaaccagtctcaccaggcgcagtggctcacgcctgtaattccagcatgttgggaggccgaggctggtggatcacgaggtcagcagttcgagaccagcctgaccaacatggtgaaaccccatctctactaaaaa

SEQ ID NO: 12745 - DNA, 2265 bp, Homo sapiens
cgggagtcggcgggcggcgaggagcgcggagccggagctggacgccgccgccgccaccgccacctgcgcggcagtcatcaagatgtcatggcacccccagtaccggagctccaagttccgtcatgtctttggcaaaccagccagcaaggagaactgctacgactccgtgcctatcacccgcagcgttcacgacaaccacttctgtgccgtgaacccccacttcattgcagttgtgactgagtgtgctggtggaggggccttcctcgtcatccccctgcaccagacagggaagttggacccccactacccaaaagtctgcgggcacagaggcaacgttttggatgtcaagtggaacccttttgatgattttgagatcgcctcctgttctgaagatgccacaattaagatctggagcatccccaagcagctgctgaccaggaacctcacggcctacaggaaggaactcgtgggccacgcgcgcagagtaggcctggtggagtggcaccccacggccgccaacatcctcttcagtgctggctatgactacaaggtgatgatctggaacctggatacaaaggagtctgtcatcacaagccccatgagtacgattagctgtcaccaagatgtgatcctctccatgtccttcaacaccaacggcagcctgttggccaccacctgcaaagaccgcaagattcgggttattgacccccgagcagggaccgtcctccaggaggccagctacaaagggcaccgggccagcaaagtgctgtttctggggaacctgaagaagctgatgtccacaggcacatcccgatggaacaaccggcaggtggccttgtgggaccaggataacctctctgtgcctctgatggaggaggacctggacggctcctcgggcgtgctgtttcccttctatgacgcggacaccagcatgctctacgtggtggggaagggagatggcaacatccgctactacgaggtgagcgccgacaagcctcacctgagctacctgactgagtaccgctcctataacccacagaaggggatcggtgtcatgccaaagagaggactcgacgtgtcctcctgcgagatcttccgcttctacaagctgatcacaaccaaaagcctcatcgagcccatctccatgattgtgccccggcggtcagaatcctaccaagaggacatataccctccaacagcaggggcccagccctccctgacggcccaggagtggctcagcgggatgaatcgagacccaatcctggtgtcccttaggcctggctctgagctgctgagaccccacccactgcctgcagagagacctatcttcaattccatggccccagcctcaccccggctcttgaatcagacagaaaagctggctgcagaagatggctggaggtcttcctccctgttggaggagaagatgccaaggtgggcagcagaacacaggctggaggagaagaaaacctggctgacaaatggctttgacgttttcgaatgccccccaccaaagacagagaatgagttgctgcagatgttctaccggcaacaggaggagatccgaaggctccgggagctgttgacccagcgagaggtccaggccaaacagttggaactggagatcaaaaacttgcggatgggctcagagcagctctgagcagagacctctgccctcctcaccctcagggacaccactcggctccatggggaggtttagaaccaaaccacaagtcccctcaaggacaaccactatttctatattttttaccagaaaacaaaactctccatcgctgaaagagattccagtgggacatggtgccgtttttctgtttgccttcttgcaacaacagtttctgaattgactttgttttcagatgatgccttctgttgaattctgttattaagggcccatgatgagctgtaacttctcaagaggaaagaacacagtagaaaactagagctggaaggatctaggttgacctgtctgtgattttcaaactgtggtccagagaataggggaagactgggccagacgcagtggctcatgcctgtaatcccagcactctgggaggctgaggtgggcggattgcttgaggtcgggagtttgaaaccagtctcaccaggcgcagtggctcacgcctgtaattccagcatgttgggaggccgaggctggtggatcacgaggtcagcagttcgagaccagcctgaccaacatggtgaaaccccatctctactaaaaaaaaaaaaaaaaaaaaaaaaaaa

SEQ ID NO: 12746 - DNA, 2632 bp, Homo sapiens
ggcggctgagcctgagcggggatgtagaggcggcggcagcagaggcggcactggcggcaagagcagacgcccgagccgagcgagaagagcggcagagccttatcccctgaagccgggccccgcgtcccagccctgcccagcccgcgcccagccatgcgcgccgcctgctgagtccgggcgccgcacgctgagccctccgcccgcgagccgcgctcagctcgggggtgattagttgctttttgttgttttttaatttgggccgcggggagggggaggaggggcaggtgctgcaggctcccccccctccccgcctcgggccagccgcggcggcgcgactcgggctccggacccgggcactgctggcggctggagcggagcgcaccgcggcggtggtgcccagagcggagcgcagctccctgccccgcccctccccctcggcctcgcggcgacggcggcggtggcggcttggacgactcggagagccgagtgaagacatttccacctggacacctgaccatgtgcctgccctgagcagcgaggcccaccaggcatctctgttgtgggcagcagggccaggtcctggtctgtggaccctcggcagttggcaggctccctctgcagtggggtctgggcctcggccccaccatgtcgagcctcggcggtggctcccaggatgccggcggcagtagcagcagcagcaccaatggcagcggtggcagtggcagcagtggcccaaaggcaggagcagcagacaagagtgcagtggtggctgccgccgcaccagcctcagtggcagatgacacaccaccccccgagcgtcggaacaagagcggtatcatcagtgagcccctcaacaagagcctgcgccgctcccgcccgctctcccactactcttcttttggcagcagtggtggtagtggcggtggcagcatgatgggcggagagtctgctgacaaggccactgcggctgcagccgctgcctccctgttggccaatgggcatgacctggcggcggccatggcggtggacaaaagcaaccctacctcaaagcacaaaagtggtgctgtggccagcctgctgagcaaggcagagcgggccacggagctggcagccgagggacagctgacgctgcagcagtttgcgcagtccacagagatgctgaagcgcgtggtgcaggagcatctcccgctgatgagcgaggcgggtgctggcctgcctgacatggaggctgtggcaggtgccgaagccctcaatggccagtccgacttcccctacctgggcgctttccccatcaacccaggcctcttcattatgaccccggcaggtgtgttcctggccgagagcgcgctgcacatggcgggcctggctgagtaccccatgcagggagagctggcctctgccatcagctccggcaagaagaagcggaaacgctgcggcatgtgcgcgccctgccggcggcgcatcaactgcgagcagtgcagcagttgtaggaatcgaaagactggccatcagatttgcaaattcagaaaatgtgaggaactcaaaaagaagccttccgctgctctggagaaggtgatgcttccgacgggagccgccttccggtggtttcagtgacggcggcggaacccaaagctgccctctccgtgcaatgtcactgctcgtgtggtctccagcaagggattcgggcgaagacaaacggatgcacccgtctttagaaccaaaaatattctctcacagatttcattcctgtttttatatatatattttttgttgtcgttttaacatctccacgtccctagcataaaaagaaaaagaaaaaaatttaaactgctttttcggaagaacaacaacaaaaaagaggtaaagacgaatctataaagtaccgagacttcctgggcaaagaatggacaatcagtttccttcctgtgtcgatgtcgatgttgtctgtgcaggagatgcagtttttgtgtagagaatgtaaattttctgtaaccttttgaaatctagttactaataagcactactgtaatttagcacagtttaactccaccctcatttaaacttcctttgattctttccgaccatgaaatagtgcatagtttgcctggagaatccactcacgttcataaagagaatgttgatggcgccgtgtagaagccgctctgtatccatccacgcgtgcagagctgccagcagggagctcacagaaggggagggagcaccaggccagctgagctgcacccacagtcccgagactgggatcccccaccccaacagtgattttggaaaaaaaaatgaaagttctgttcgtttatccattgcgatctggggagccccatctcgatatttccaatcctggctacttttcttagagaaaataagtcctttttttctggccttgctaatggcaacagaagaaagggcttctttgcgtggtcccctgctggtgggggtgggtccccagggggccccctgcggcctgggcccccctgcccacggccagcttcctgctgatgaacatgctgtttgtattgttttaggaaaccaggctgttttgtgaataaaacgaatgcatgtttgtgtcacgaaaaaaaaaaaaaaaaaaaaaaaaaaaaaaaaaaaaaaaaaaaaa

SEQ ID NO: 12747 - DNA, 2518 bp, Homo sapiens
ctattaacttgttcaaaaaagtatcaggagttgtcaaggcagagaagagagtgtttgcaaaagggggaaagtagtttgctgcctctttaagactaggactgagagaaagaagaggagagagaaagaaagggagagaagtttgagccccaggcttaagcctttccaaaaaataataataacaatcatcggcggcggcaggatcggccagaggaggagggaagcgctttttttgatcctgattccagtttgcctctctctttttttcccccaaattattcttcgcctgattttcctcgcggagccctgcgctcccgacacccccgcccgcctcccctcctcctctccccccgcccgcgggccccccaaagtcccggccgggccgagggtcggcggccgccggcgggccgggcccgcgcacagcgcccgcatgtacaacatgatggagacggagctgaagccgccgggcccgcagcaaacttcggggggcggcggcggcaactccaccgcggcggcggccggcggcaaccagaaaaacagcccggaccgcgtcaagcggcccatgaatgccttcatggtgtggtcccgcgggcagcggcgcaagatggcccaggagaaccccaagatgcacaactcggagatcagcaagcgcctgggcgccgagtggaaacttttgtcggagacggagaagcggccgttcatcgacgaggctaagcggctgcgagcgctgcacatgaaggagcacccggattataaataccggccccggcggaaaaccaagacgctcatgaagaaggataagtacacgctgcccggcgggctgctggcccccggcggcaatagcatggcgagcggggtcggggtgggcgccggcctgggcgcgggcgtgaaccagcgcatggacagttacgcgcacatgaacggctggagcaacggcagctacagcatgatgcaggaccagctgggctacccgcagcacccgggcctcaatgcgcacggcgcagcgcagatgcagcccatgcaccgctacgacgtgagcgccctgcagtacaactccatgaccagctcgcagacctacatgaacggctcgcccacctacagcatgtcctactcgcagcagggcacccctggcatggctcttggctccatgggttcggtggtcaagtccgaggccagctccagcccccctgtggttacctcttcctcccactccagggcgccctgccaggccggggacctccgggacatgatcagcatgtatctccccggcgccgaggtgccggaacccgccgcccccagcagacttcacatgtcccagcactaccagagcggcccggtgcccggcacggccattaacggcacactgcccctctcacacatgtgagggccggacagcgaactggaggggggagaaattttcaaagaaaaacgagggaaatgggaggggtgcaaaagaggagagtaagaaacagcatggagaaaacccggtacgctcaaaaagaaaaaggaaaaaaaaaaatcccatcacccacagcaaatgacagctgcaaaagagaacaccaatcccatccacactcacgcaaaaaccgcgatgccgacaagaaaacttttatgagagagatcctggacttctttttgggggactatttttgtacagagaaaacctggggagggtggggagggcgggggaatggaccttgtatagatctggaggaaagaaagctacgaaaaactttttaaaagttctagtggtacggtaggagctttgcaggaagtttgcaaaagtctttaccaataatatttagagctagtctccaagcgacgaaaaaaatgttttaatatttgcaagcaacttttgtacagtatttatcgagataaacatggcaatcaaaatgtccattgtttataagctgagaatttgccaatatttttcaaggagaggcttcttgctgaattttgattctgcagctgaaatttaggacagttgcaaacgtgaaaagaagaaaattattcaaatttggacattttaattgtttaaaaattgtacaaaaggaaaaaattagaataagtactggcgaaccatctctgtggtcttgtttaaaaagggcaaaagttttagactgtactaaattttataacttactgttaaaagcaaaaatggccatgcaggttgacaccgttggtaatttataatagcttttgttcgatcccaactttccattttgttcagataaaaaaaaccatgaaattactgtgtttgaaatattttcttatggtttgtaatatttctgtaaatttattgtgatattttaaggttttcccccctttattttccgtagttgtattttaaaagattcggctctgtattatttgaatcagtctgccgagaatccatgtatatatttgaactaatatcatccttataacaggtacattttcaacttaagtttttactccattatgcacagtttgagataaataaatttttgaaatatggacactgaaaaaaaaaaaaaaaaaa

SEQ ID NO: 12748 - DNA, 2811 bp, Homo sapiens
agccattcctgaggaggactgccggtcgttcggacgtcttgcctgtcgctggaggagaggtccgggctctccaggaaggtggctgcggcgacaaaatgaagatattcgtgggcaacgtcgacggggcggatacgactccggaggagctggcagccctctttgcgccctacggcacggtcatgagctgcgccgtcatgaaacagttcgccttcgtgcacatgcgcgagaacgcgggcgcgctgcgcgccatcgaagccctgcacggccacgagctgcggccggggcgcgcgctcgtggtggagatgtcgcgcccaaggcctcttaatacttggaagattttcgtgggcaatgtgtcggctgcatgcacgagccaggaactgcgcagcctcttcgagcgccgcggacgcgtcatcgagtgtgacgtggtgaaagactacgcgtttgttcacatggagaaggaagcagatgccaaagccgcaatcgcgcagctcaacggcaaagaagtgaagggcaagcgcatcaacgtggaactctccaccaagggtcagaagaaggggcctggcctggctgtccagtctggggacaagaccaagaaaccaggggctggggatacggccttccctggaactggtggcttctctgccaccttcgactaccagcaggcttttggcaacagcactggtggctttgatgggcaagcccgtcagcccacaccacccttctttggtcgcgaccgcagccctctgcgccgttcacctccccgagcctcttatgtggctcctctgacggcccagccagctacctaccgggcccagccgtccgtgtcactgggagctgcctacagggcccagccttctgcctctttgggtgttggctatcggactcagcccatgacagcccaggcagcctcttaccgcgctcagccctctgtctcccttggggcaccatacaggggccagctggctagtcctagctcccagtctgctgcagcttcttcactcggcccatatggtggagcccagccctcagcctcggccctttcctcctatgggggtcaggcagctgcagcttcttcgctcaactcctatggggctcagggttcctcccttgcctcctatggtaaccagccatcctcttacggcgcccaggctgcctcttcctatggggttcgtgcagctgcttcttcctacaacacccagggagcagcttcctccttaggctcctacggggctcaggcagcctcctatggggcccagtctgcagcctcctcactagcttatggagcccaggcagcttcatataatgcccagccctcggcctcttacaatgcccagtctgccccatatgctgcacagcaggctgcttcctactcttcccaacctgctgcctatgtggcacagccagccacagctgctgcctatgccagccagccagcagcctacgccgcacaagccactaccccaatggctggctcctatggggcccagccggttgtgcagacccagctgaatagttacggggcccaagcatcaatgggcctttcaggctcctatggggctcagtcggctgctgcggccactggctcctatggtgccgcagcagcctacggggcccaaccttctgccaccctggcagctccttaccgcactcagtcatcagcctcattggctgcttcctatgctgcccagcagcatccccaggctgctgcctcctaccgcggccagccaggcaatgcctacgatggggcaggtcagccgtctgcagcctacctgtccatgtcccagggggccgttgccaacgccaacagcaccccgccgccctatgagcgtacccgcctctccccaccccgggccagctacgacgatccctacaaaaaggctgtcgccatgtcgaaaaggtatggttccgaccggcgtttagccgagctctctgattaccgccgtttatcagagtcgcagctttcgttccgccgctcgccgacaaagtcctcgctggattaccgtcgcctgcccgatgcccattccgattacgcacgctattcgggctcctataatgattacctgcgggcggctcagatgcactctggctaccagcgccgcatgtagggccatcctgggatggggcaccacagggagggagggagaaaagaggtgggtagggttacagatccaggttataactactctggcccatacctttcctggttgtggtttttcatgccctctaccatgtgggccttccccaggagatgatcctgttaagtgttcggcagtaacctactttgttccttcgcctcagcagcaaatcttgctactggctctagatctgcggtttcccctctaccctgcctcccgtctccccagaatgggaatttcttttatgtttttatttttttcctggctcccttttatttttgtgcgcgatatttaaggtcgtctggatggggaagcaacctgcagctgaggtcgccggcgcctttttctttttagatgggaaggaggccaggaaagggtcagcttaaccatttcctatgtgccaagctgtgccagcagtccagggtaccctgactgtccctctgtagactgttgagactgagttcctgttgggacagtcagttggtatgtatccaagtccctgctgaccactaatgttctagctgatggtgagcggcacagtcccacttccccatctccccaagtaggtggtgttagaaaaccttaattttttttcccttttgtatggactacaaataaaacttggggcaatttgcagtttggaaaaaaaaaaaaaaaaaaaaaaaaaaaaaaaaaa

SEQ ID NO: 12749 - DNA, 6138 bp, Homo sapiens
acttccggttgctgtgctgagtcggaagtgggaacccttcggccgctgagattctgtcgtgtcgtcgctgctggcacttcaggctctgcctctcccactaggtctggatggaggataccttaaagtgaaatgacagaccaggagaataacaacaacatctcaagtaacccctttgctgctctttttggctccctggctgatgccaaacagtttgcggcaatccaaaaagagcagctgaagcaacaatctgatgaactcccagctagcccagatgactcggataatagcgtgtcagagagcctggatgaattcgattactctgtggctgagattagccgctcattccgatcacagcaggaaatatgtgagcaactcaacatcaatcacatgatccaaaggatcttccttattactctggacaacagtgatcccagcttgaaaagcgggaatggcatccctagccgttgtgtgtatttggaagaaatggcagtagagctagaagatcaagactggcttgatatgagcaatgttgagcaggccctcttcgctcgcttattacttcaagatccaggcaaccacttaattaacatgacttcttctacaacgctaaatctctctgctgatcgagatgcaggagagaggcacattttttgttacctttactcctgcttccagagagccaaggaagagattaccaaagttccagagaacctgctaccctttgcagtgcagtgcagaaacctcactgtgtccaatacccgaacagttcttctcaccccagagatctatgttgaccaaaacatccatgagcaactggtagatttgatgttagaagccatccagggagcccgtgagtacatgaacaagatctattttgaagatgtaactgagtttctggaagaggtcattgaagccttgatattggatgaggaagttagaacatttccagaagtcatgattccagtgtttgatattttattgggccgaataaaagatctagagctctgtcagatccttttgtatgcatatctggatattcttctctatttcactaggcaaaaagatatggcaaaggtttttgtagaatacattcagcccaaggaccctaccaatgggcaaatgtaccagaagaccttgctgggagtaattctgagtatctcctgcttattaaagactccgggtgttgtagaaaatcatggctactttttgaatccatctcgttccagcccccaggagatcaaagtacaggaggccaacatccatcagttcatggctcagttccacgaaaagatctaccagatgctgaagaacttactccagctctctccagaaaccaaacactgtatcttgtcctggcttggaaactgtttgcatgcaaatgcaggccgcaccaagatttgggccaatcagatgccagaaatctttttccaaatgtatgcctcagatgctttctttctgaatctgggtgctgctctcctgaagctatgccagccattttgcaaacccagatcctctcggctcctcacctttaatcccacatactgtgccctcaaggagttgaatgatgaagaacgaaaaattaaaaatgtacacatgagaggtttggacaaagaaacctgtttgatcccagctgtgcaggagccgaagtttccacagaactacaaccttgtaacagagaaccttgctctgacagagtacaccttgtacttgggatttcacaggttgcatgatcagatggtaaaaatcaaccaaaatctgcatcggctgcaggttgcctggcgggatgctcagcaaagttctagccctgctgctgacaatcttcgtgagcagtttgaacgactgatgaccatctatctttctaccaagactgccatgacagagccacaaatgctacaaaactgcctaaacttgcaggtgtccatggctgttctactggttcaactggccataggcaatgagggctcacagccaatagagctaacctttcctttgccagatggctacagctctttggcttatgtgccagaattttttgcagataacctgggtgattttctcatttttctccgccgctttgccgatgacattttggagacatcagcagattccctggagcatgtccttcactttatcaccattttcactggaagcatagaaagaatgaagaatccccacctgagggccaaactagcagaggtgttggaagcagtgatgccccacctggatcagaccccaaatcccttggtatccagtgtgttccaccggaaacgtgtgttctgcaactttcagtatgcaccccaacttgcagaggctctaatcaaggtttttgtggacatcgaatttacaggagacccccatcaatttgaacagaagtttaattaccgccgtcccatgtatcctatcctaagatacatgtgggggacagatacctatcgggagagcattaaggatttggctgactatgcctctaagaatttagaagccatgaatcccccacttttcctccgctttcttaacctgctaatgaatgatgccatcttccttttggatgaagccatacagtatttgagcaagataaagattcagcaaattgagaaggatcgaggtgaatgggatagtctgactccagaagcccgccgagaaaaggaggctggcctacagatgtttggacagctggcacgtttccataacatcatgtccaatgaaacaatcggtacccttgcctttctcacatcagagatcaagtcactctttgtgcatcccttcctggctgagcgcatcatctccatgttgaactacttcctgcaacacctggttggccccaagatgggtgccttaaaagtcaaggacttcagcgaatttgacttcaaaccccagcagcttgtatcagatatctgcactatctacttaaatcttggggatgaggagaatttctgtgccactgtgcccaaggatggacgttcctattccccaactctctttgcacagacagttcgagtcttgaagaaaataaataagcctgggaatatgattatggctttcagcaacttggcagagagaatcaagtctcttgcagacctccaacaacaggaagaggaaacctatgcagatgcctgtgatgagttcctggatcccattatgagcacactgatgtgtgaccctgtggtgctgccatcttccagagtcactgtggatagatccaccattgcaagacatttgctcagtgaccaaacagatccctttaaccgtagtcccctcaccatggaccagatccggccaaacacagaactaaaagaaaaaatccaacggtggcttgcagagaggaaacaacaaaaggagcaacttgaatagatactgtgaactaaccaaaccaaaaccaaccccagagtgcagataaacaattgtttgtggtttctctctttctggttctgttccttttctttcttcttttctttttcttttttttttttttttttactaaattagagaactgctcttgctgaaattatgatagttaagattcctaagaacttgacaatgctcccctggcttgcaggaaattatacttattatagcatcaccaagtttagaaatcatcactaattttcaccctctgttgtctcttcatattcttcttccttttcctaaatgaaattatattatttcaactactaaaacttcccgccaccctgctatttctcttccaattactgttcaaacatttttggtgagtgctgcttttataaatatgtgatgtcacatatttcagtgacagctgatgttatcagaaaaatcctgttatcctgtgtatttactagtcctcatgatctagacttaaccccttttctgtgttacagagtaacttcacataaaagcagatacctttaagtttgtgtagacttctgaataagatgatagacgagaattttttttaaaaaaggaatttaaaggaatcttgtgcaacttctgttgatagctcttaattttgttatacagtctttttaatgaggattggtagggcaatcctaccaattgatgggggtgaggagactgttgggcccttattctcttatgaaaatctgtttctacaaggactaggcctaagtagatttaggcaacgggtatcatatccatgaaaaatgtcattttaagacactaatatcaacagtatatctcagtgtgtgagatatataaatacacatacaccccatgtgcttttttgttggtttagtgtaaactgagtaccactttatattttctcttccatagtgagatgtatgcagtatgtggccatgtttactaacatactcattcttcacaaaattctgagattataaaatgtatatagttaatatttgtttgagcttgtgacctgacttctaagagctacttctaacacagccttaggtcttcaattaacaaagtaggaagttgagcacaaccttgtccacagccattttaaatatccacttagccctgtgtagttggtaggtggacaccactttcataagtgaacttgagctcactactcaattgtgcagcttaatatgctgactagggacattcccctatggattatctttatatcactgtctttctaagcccagagatgtcataagtgacaagaaaagtgataggatcaagaaatgggtgtcactgcttcatttggaacatgttattaactatggtctctttcaaataaatagtagttttatatttcaacacaagttgctataagcagtccttgatgggtttttgattgcatcagctggaaagcctcaaatctaagagggcttcccatcctagatataaaataggtgttgcctattgctgtgcttataaaatgaaaaaggaaattgaggacacttttgcaaatgccagaatgtaagattcattcagtgtgctccctgggcctttatggcatgggttgacaggatttgtttattttctaaaattagcttcattcaatatttatcatcctcctttccctctctgagaatgaactatgtataaaataagcttctgcctatttgcatttatcttccaaacccaatctagtaggatgttctcattttaaaaacgaggggaaaagaccagagtttttcaggagaaaactggaggaaaatgggcacaaaaactcagaaggcagctattcccagcagcttcctagttaacaacccccatgctgcctccagtctttgtctgtattcttctgtatttaaccttcagattgtaagccttttctggcaagcttttcttctttttttaaactcttttcctgaaactttttatgaatggctatggcaccattaatgctgctgaatatctttaaactctgcacaagcaagtgtgtagcttaaggccactactggtaaggaaaccaagtgtcctctgtgccttttttctttctgtgaagtaatttaagaatatccaaaaaaattagactttaaaaagttatcttggtacaacaccgtgtgtatatacacttggaagcttaaaaaggtgttttgtctggaacttagaagcagctctaaatctagtagagcagactttctaacatacctagttttgtgtattggctttgctggagtatgatagcaaaatgaagactcttttactcagctctggtattgctcataacttaccaagaggctaatactaaacttggaaaattgtttaagtatgttttatcaagcagtctgggttttgttttttaatatactttttaatggatatgtgaaaactgaaggaaatgttaaaggttttttaatggtgcaagtgaaggtgccagttgctatttgatatcacactctacaaaagcttcattactttatttgatggtggttgctaagcagccattgcacagagcataagtctactgggtgcctttacatgccagaggctgatgctgcactgttgatgtcatgtgaggaaataatgcacatgctctaactgctcaacaggaaatgaacctagaaacagaaaatgaaaaggttgattgaaataaaacttgatcaacgcgactgtattttgaaacattccaggaaggttacttcttgtcaaacttgcctggcagtgtttgttcaaaacttgtatttaataaatgaacatctgacttacaaaaaaaaaaaaaaaaaa

SEQ ID NO: 12750 - DNA, 3155 bp, Homo sapiens
ccaccttcctcccaccccgggaacccggaagtggaggaggaggcgcggcggcggcggcggcggcggctgcggtggccaagcaggcagatactgcctgacccgttcccgggagcgtgtctgggtttgggggcgggagacaggctgagccgcctgggcggcctggcctgtacggggcgggggaggccatggcctcggctgagttgcaggggaagtaccagaagctggctcaggagtactcgaagcttcgggctcagaatcaggttctgaaaaaaggtgttgtggatgaacaagcaaattctgcagctttaaaggagcaactgaaaatgaaggatcagtcattgagaaaactacaacaggaaatggacagtttgacatttcgaaatctgcagcttgccaagagggtagaactacttcaagatgaactagctctaagtgaaccacgaggcaagaaaaacaagaaaagtggagaatcttcttctcagttgagtcaagagcagaagagtgtctttgatgaagatctgcaaaagaagatagaagagaatgaacggttgcatatacaattttttgaagctgatgagcagcacaagcatgtggaagcagagctgaggagtcgactggccactctggagacagaagcagcccagcaccaagctgtggttgacggtctcacccggaagtacatggaaaccattgagaagctgcagaacgacaaggctaaactagaagtgaaatctcagactctagaaaaggaagccaaggaatgtcgacttcgaacggaagaatgtcaattacagttaaagactcttcatgaagatttgtcaggtagattagaggaatccttatcaatcatcaatgaaaaagtaccttttaatgatacaaaatatagtcagtacaacgctctgaacgttccactccacaataggagacaccagctgaagatgcgagatattgctgggcaggccctggcttttgttcaggatcttgtgacggctcttctaaactttcatacctacacagaacagaggattcaaatttttcctgttgattctgccattgacactatatctccattgaatcagaagttctcacaataccttcatgaaaatgcgtcctatgtccgccctcttgaggaaggaatgcttcatttatttgaaagtatcactgaggatactgtgactgtcttggagacaactgtgaaattgaaaactttttcagaacacttaacctcctacatatgttttcttaggaagattcttccctatcagttaaaaagtttagaagaagaatgtgaatcctctctttgcacatctgcgttaagagccaggaatctagagctgtcccaggacatgaaaaaaatgacagctgtgtttgagaagctgcagacttacatagctcttcttgccttgccaagtacagagccagatggactccttcggacaaactacagttctgtgttaacaaatgttggtgctgctctgcatggatttcatgacgttatgaaagatatttccaaacattatagtcaaaaagctgcaatagagcatgaacttccaacagcaacacagaagctgataacaactaatgactgtatcctgtcatcagtagtggcattaacaaatggagcaggaaagattgcatccttcttcagcaacaatttggactacttcattgcttcactgagctatggacctaaggcagcgagtggattcattagtcctctttcagctgaatgcatgctacagtataagaaaaaagctgctgcctatatgaagtctttgagaaagcccctcttggagtctgtgccttatgaagaagcactggcaaaccgccgcatccttctcagctctactgaaagtcgagaaggccttgcacagcaagttcaacagagtttggaaaagatttctaaactggagcaggaaaaagaacattggatgttggaagcacaattagccaaaatcaagctagagaaagaaaaccagcgaattgcagataagctgaagaatacaggtagtgcccagctggttgggctggcccaggaaaatgctgctgtgtcaaatactgctggccaggatgaagccacagctaaggctgtgttggagcccattcagagcaccagtctagttccagatgtggaatctcgtgaagacttaattaaaaatcactacatggcaaggatagtggaacttacgtctcagttgcagctggctgacagtaagtcagtgcatttttatgccgagtgccgagcactgtctaaaagactggccttggctgaaaagtctaaggaagcattgacagaagaaatgaaacttgccagtcagaacatcagcagacttcaggatgagctgacaactaccaagaggagttacgaggatcagttaagtatgatgagtgaccacctgtgcagcatgaatgagacattatctaaacagagagaagagattgacacactaaagatgtccagtaaggggaattctaaaaagaacaagagtcgatagttttgaaatagctggttggcgactgttctttccagacctgctcctgctgcacagagccgcagggctgagaccacgtccatgctggctgccttcaggaagctaaagtattgttggacctagtaaactagtcagtgttggaaacggccttgaaatatttaaaacatatttgtaaccagtgaggcaaatacagaagttgatgtcggcagtaaatggaaaacaatacgtatgtcatggatattgtaggtttccttatgctgtttttactgtgcactttttaaaattaggttttaatttcagtatgtaagaacaaatattttgtatactttcaaactcaattatatggtaatcgatttggtatctatggaatagatatatgtttctggaaaaaaatgcttaaattgtcaaactgtcattacttcttattatagttgaaggcattctccagattctttttaaaagatttgttcaaatttctctctctctctctctctctctctctcttctttctctctgagggagagggagccctccaaacttcagatcctgtgggtttagtatcattatcttcagctctttgatcccctgtgttagagtaatagctaaaggaagttcatgtcaataaattcatacttatatcccaaaaaaaaaaaaaaaaaaaaa

SEQ ID NO: 12751 - DNA, 925 bp, Homo sapiens
ttttttctgctaccgtgactaagatggaagcgtttttggggtcgcggtccggactttgggcggggggtccggccccaggacagttttaccgcattccgtccactcccgattccttcatggatccggcgtctgcactttacagaggtccaatcacgcggacccagaaccccatggtgaccgggacctcagtcctcggcgttaagttcgagggcggagtggtgattgccgcagacatgctgggatcctacggctccttggctcgtttccgcaacatctctcgcattatgcgagtcaacaacagtaccatgctgggtgcctctggcgactacgctgatttccagtatttgaagcaagttctcggccagatggtgattgatgaggagcttctgggagatggacacagctatagtcctagagctattcattcatggctgaccagggccatgtacagccggcgctcgaagatgaaccctttgtggaacaccatggtcatcggaggctatgctgatggagagagcttcctcggttatgtggacatgcttggtgtagcctatgaagccccttcgctggccactggttatggtgcatacttggctcagcctctgctgcgagaagttctggagaagcagccagtgctaagccagaccgaggcccgcgacttagtagaacgctgcatgcgagtgctgtactaccgagatgcccgttcttacaaccggtttcaaatcgccactgtcaccgaaaaaggtgttgaaatagagggaccattgtctacagagaccaactgggatattgcccacatgatcagtggctttgaatgaaatacagatgcattatccagaactgaagttgccctacttttaactttgaacttggctagttcaaagatagactcttcttttgtaaagtaaataaattcttcaaaatg

SEQ ID NO: 12752 - DNA, 4131 bp, Homo sapiens
ggtgcgcgccgcggcttgggggagagttgagcgcttttcccccctcttttttttttttttcctcttcttcttaaacaaaccacaaacggatgtgagggaaggaaggtgtttcttttactcctgagcccagacacctcactctgttccgtctaagcttgttttgctgaacacttttttttaaaaaaggaaaaagaaaaggagttgcttgatgtgagagtgaaatggacgtaagattttatccacctccagcccagcccgccgctgcgcccgacgctccctgtctgggaccttctccctgcctggacccctactattgcaacaagtttgacggtgagaacatgtatatgagcatgacagagccgagccaggactatgtgccagccagccagtcctaccctggtccaagcctggaaagtgaagacttcaacattccaccaattactcctccttccctcccagaccactcgctggtgcacctgaatgaagttgagtctggttaccattctctgtgtcaccccatgaaccataatggcctgctaccatttcatccacaaaacatggacctccctgaaatcacagtctccaatatgctgggccaggatggaacactgctttctaattccatttctgtgatgccagatatacgaaacccagaaggaactcagtacagttcccatcctcagatggcagccatgagaccaaggggccagcctgcagacatcaggcagcagccaggaatgatgccacatggccagctgactaccattaaccagtcacagctaagtgctcaacttggtttgaatatgggaggaagcaatgttccccacaactcaccatctccacctggaagcaagtctgcaactccttcaccatccagttcagtgcatgaagatgaaggcgatgatacctctaagatcaatggtggagagaagcggcctgcctctgatatggggaaaaaaccaaaaactcccaaaaagaagaagaagaaggatcccaatgagccccagaagcctgtgtctgcctatgcgttattctttcgtgatactcaggccgccatcaagggccaaaatccaaacgctacctttggcgaagtctctaaaattgtggcttcaatgtgggacggtttaggagaagagcaaaaacaggtctataaaaagaaaaccgaggctgcgaagaaggagtacctgaagcaactcgcagcatacagagccagccttgtatccaagagctacagtgaacctgttgacgtgaagacatctcaacctcctcagctgatcaattcgaagccgtcggtgttccatgggcccagccaggcccactcggccctgtacctaagttcccactatcaccaacaaccgggaatgaatcctcacctaactgccatgcatcctagtctccccaggaacatagcccccaagccgaataaccaaatgccagtgactgtctctatagcaaacatggctgtgtcccctcctcctcccctccagatcagcccgcctcttcaccagcatctcaacatgcagcagcaccagccgctcaccatgcagcagccccttgggaaccagctccccatgcaggtccagtctgccttacactcacccaccatgcagcaaggatttactcttcaacccgactatcagactattatcaatcctacatctacagctgcacaagttgtcacccaggcaatggagtatgtgcgttcggggtgcagaaatcctcccccacaaccggtggactggaataacgactactgcagtagtgggggcatgcagagggacaaagcactgtaccttacttgagaatctgaacacctcttctttccactgaggaattcagggaagtgttttcaccatggattgctttgtacagtcaaggcagttctccattttattagaaaatacaagttgctaagcacttaggaccatttgagcttgtgggtcacccactctggaagaaatagtcatgcttctttattatttttttaatcctttatggacattgtttttcttcttccctgaaggaaatttggaccattcagattttatgttggttttttgctgtgaagtgctgcgctctagtaactgccttagcaactgtagatgtctcggataaaagtcctggattttccattggttttcataatgggtgtttatatgaaactactaaagactttttaaatggcttgatgtagcagtcatagcaagtttgtaaatagcatctatgttacactctcctagagtataaaatgtgaatgtttttgtagctaaattgtaattgaaactggctcattccagtttattgatttcacaataggggttaaattggcaaacattcatatttttacttcatttttaaaacaactgactgatagttctatattttcaaaatatttgaaaataaaaagtattcccaagtgattttaatttaaaaacaaattggctttgtctcattgatcagacaaaaagaaactagtattaagggaagcgcaaacacatttattttgtactgcagaaaaattgcttttttgtatcactttttgtgtaatggttagtaaatgtcatttaagtccttttatgtataaaactgccaaatgcttacctggtattttattagatgcagaaacagattggaaacagctaaattacaacttttacatatggctctgtcttattgtttcttcatactgtgtctgtatttaatctttttttatggaacctgttgcgcctatttatgaaataataaatataggtgtttgtaagtaaatttgttagtatttgaaagaggtttctttgatgttttaacttttgctggcaaaaaaaaattcacgcttggtgtgaatactttattatttagtttttacagtaacatgaataaagccaaacctgcttttcatttagcagcaaattaaagtaaccagtccttatttctgcatttctttggttgatgcaaacaaaaaactattatatttaagaactttatttcttcatacgacataacagaattgccctccaagtcacacaagctccaagactaaacaaacagacaggtcctctgtcttaaaaaggttacttcttggttctcagctggttctagtcaattctgaaccaccaccccccgccccccgcaaaaaagtaaaagtcaaaccaaacttcctcaagctgcatgcttttcacaaaatccagaaagcatttaagaattgaactaggggctggaagaagtgaaagggaagcatctaaaaatgaaaggtgagtaaccagatagcaaaagaaaagggaaagccatccaaatttgaaagctgttgatagaaattgagattcttgctgtcttttgtgcctctacaagctactactcattccagaattcctgggtcttccaagaggattcttaaggtaccagagatttgctagggaaccaaaagtgcttgagaatctgcctgagggcttgcatagctttcacattaaaaaaagaaaaagctagcagatttactcctttttaggggatcatatcaagaaagttagtctggttggaaaccaagagaatggctgatgtctctttcttggaatatgtgaaataaatttagcagtttaactaaatacaaatatatgcattgtgtaatccactcagaattaaacagacaaaaggtatgcttgctttggaatgattttaggcattgtacaaccttgaatcacttgagcatgtaataactaataaataatgcagatccatgtgattattaaaatgactgtagctgagagctctaattttcctgtcttgaaactgtataagaactcatgtgattaagttcacagtttattgtttgtctgtttagtattttagaaatataccagcactactaattaactaatgtcttttatttattatattatgataaagtaaaaatttcacttgcattaagtctaaactgagaaggtaattactgggaggagaatgagcagctttgactttgacaggcggtttgtgcaggaaagcacagtgccgtgttgtttacagcttttctagagcagctgtgcgaccagggtagagagtgttgaaattcaataccaaatacagtaaaaacaaatgtaaataaaagaaaacacatcatcaataaaactgttattatgcgtg

SEQ ID NO: 12753 - DNA, 5151 bp, Homo sapiens
gcgccggggctcccgggaatctaccttctcctgcggccggcacgcggttcccagggggccagcggcggtcagccgaggtcgagacgcccgcagggtgccttagcggccggtcgtaccacggcagccccgccgatcaggttcctttgggagacttcgacttgttggcgacctgatggccaaaagaaaggaagaaaatttttcctctcctaaaaatgccaaaaggccaagacaagaagaattggaggattttgataaagatggtgacgaagacgaatgtaaaggtactactttgactgcagcagaagttggaataattgagagtattcacctaaaaaacttcatgtgtcattcaatgcttggaccttttaagtttggttctaatgtcaactttgttgttggcaacaatggaagtgggaagagtgcagtactcacagctctcatagtcggtcttggtggaagagcagttgctactaatagaggatcctctttaaaaggttttgtgaaagatggacagaactctgcagatatctcaataacattgaggaacagaggagatgatgcctttaaagccagtgtgtatggtaactctatacttatacagcaacacatcagcatagatggaagtcgatcttataaacttaaaagtgcaacaggctccgtggtttccacgaggaaagaagagctgattgcaattcttgatcattttaacatccaggtggataatccagtttctgttttaacacaagaaatgagcaagcagttcttacagtctaaaaatgaaggagacaaatacaaattcttcatgaaagcaacgcaacttgaacagatgaaggaagattattcatacattatggaaacgaaagaaagaacaaaggagcagatacatcaaggagaagagcggcttactgaactaaagcgccagtgtgtagagaaagaggaacgttttcaaagtattgctggtttaagtacaatgaagactaatttagagtccttgaaacatgaaatggcttgggcagtggtcaatgaaattgaaaaacaattgaatgccatcagagataatatcaaaattggagaagatcgtgctgctagacttgacaggaaaatggaagaacagcaggtcagacttaatgaggcagaacaaaagtacaaggatattcaagacaaactagaaaagattagtgaagagacaaatgcacgagcaccagaatgtatggcattgaaagcagatgttgttgctaagaaaagggcctataatgaagctgaggttttatataaccgatccttaaacgaatataaagcattaaagaaagatgatgagcagctttgtaaacgaattgaagagctgaaaaaaagtactgaccaatctttggaacctgaacggttggaaagacaaaaaaaaatatcttggttaaaagagagagtaaaggcctttcaaaatcaagaaaattcagtcaatcaagagatcgaacagtttcagcaagccatagaaaaggacaaagaagaacatggcaaaattaagagagaagaattagatgtgaagcatgcactgagctacaatcagaggcaactgaaagaattgaaagatagtaaaactgatcgactcaaaagatttggccctaatgttccagctcttcttgaagccatagatgatgcttatagacaaggacattttacctataaacctgtaggccctttaggagcttgcattcatcttcgggacccagaacttgctttggctattgaatcttgcttaaaagggcttctgcaggcctattgttgccataatcatgctgatgaaagggtccttcaggcactcatgaaaaggttttatttaccagggacctcacggccaccgataatagtttctgagtttcggaatgagatatatgatgtaagacacagagctgcttatcatccagactttccaacagttctgacagctttagaaatagataatgcggttgtggcaaatagcctaattgacatgagaggcatagagacagtgctactaatcaaaaataattctgtagctcgtgcagtaatgcagtcccaaaagccacccaaaaattgtagagaagcttttactgctgatggtgatcaagtttttgcaggacgttattattcatctgaaaatacaagacctaagttcctaagcagagatgtggattctgaaataagtgacttggagaatgaggttgaaaataagacggcccagatattaaatcttcagcaacatttatctgcccttgaaaaagatattaaacacaatgaggaacttcttaaaaggtgccaactacattataaagaactaaagatgaaaataagaaaaaatatttctgaaattcgggaacttgagaacatagaagaacaccagtctgtagatattgcaactttggaagatgaagctcaggaaaataaaagcaaaatgaaaatggttgaggaacatatggagcaacaaaaagaaaatatggagcatcttaaaagtctgaaaatagaagcagaaaataagtatgatgcaattaaattcaaaattaatcaactatcggagctagcagacccacttaaggatgaattaaaccttgctgattctgaagtggataaccaaaaacgagggaaacgacattatgaagaaaaacaaaaagaacacttggataccttaaataaaaagaaacgagaactggatatgaaagagaaagaactagaggagaaaatgtcacaagcaagacaaatctgcccagagcgtatagaagtagaaaaatctgcatcaattctggacaaagaaattaatcgattaaggcagaagatacaggcagaacatgctagtcatggagatcgagaggaaataatgaggcagtaccaagaagcaagagagacctatcttgatctggatagtaaagtgaggactttaaaaaagtttattaaattactgggagaaatcatggagcacagattcaagacatatcaacaatttagaaggtgtttgactttacgatgcaaattatactttgacaacttactatctcagcgggcctattgtggaaaaatgaattttgaccacaagaatgaaactctaagtatatcagttcagcctggagaaggaaataaagctgctttcaatgacatgagagccttgtctggaggtgaacgttctttctccacagtgtgttttattctttccctgtggtccatcgcagaatctcctttcagatgcctggatgaatttgatgtctacatggatatggttaataggagaattgccatggacttgatactgaagatggcagattcccagcgttttagacagtttatcttgctcacacctcaaagcatgagttcacttccatccagtaaactgataagaattctccgaatgtctgatcctgaaagaggacaaactacattgcctttcagacctgtgactcaagaagaagatgatgaccaaaggtgatttgtaacttaacatgccttgtcctgatgttgaaggatttgtgaagggaaaaaaaattctggactctttgatataataaaatgagactggaggcattctgaaatgaaagaaactcctttatatatccaaccacaatcaaacatataaataagcctggaaaaccaactacaaccagcaatttaagattactattactttaagaaaatcaatttcatagtattggttttaaatctttttaagtttttttaatacgatctatttttataggttctttttcagaagtaaaattttgtacatatatacatgtacatatctgtttagtttgggttcatttctataacattttgtaagaaaataaaagtttgagcacctgattatatttagttttgcttttccagatattacattctatagttaccaaaaatggttgaagggagggatttctcattgcagagggtggggtgcaagggaataagacacttgtacggaacactgaagctttgccaacttctacacatgccttttttgcagtcctttaactgtccaccctaccaagagcttataaccagtatcagaactggataatgacgcagtttttcactctgacctccatcatgcttgcctgatttaaaagccctcagtttgcagtccagggactgttcaggcttgtcctcagctgagaggacacaggctagagggactgtgcagaaccaggctgggagaagggctgggaaaactgggagtggagggtggatcctcatggagcaggagagtagctcatggctccaggagcctgaggccatgcagttgatggtgagctgacatcaattctaagactcatcctaattgaggggtgttaaaaagtgtgctgcttagaatgaccaaatatagttattgtaaaaaatgatatttatgaactttttattttagaaaacatgaattttattgctccctgtattatttgtttgatactaggattcatgctaaactttttaagaatgtattggatatcaagaagcattccttacattagtagcaataaatattagaataaatatgaaattgaactattttcagaaaaagggcagtatattaagagcagggactgttctctagttattgaggaaaactggactttgtttgtgtttttggtggaggaagaagtttaagatactttagtcttaaattgaggtttgccaaatgagaagttcaaaaacttgggctttctaatcagaatttccaggaggaggaaagtgtgtgctgaatattttaaacatttcccactgatcatacaaagtctgatttttaaatttacacttataatgcctttgtattaaaattatttttaacatgtgcttttccaaattaaaaatgaagtagagtataccaaatgcataaactttcattagctaaggaactcatgtctgaattttgttgtagttttgaatgttgtgctctttcatacagaacgggaaacataatcctcaggtatcccagcatctcttgttgaattgaagattattcattgctttggcctcacaaagttttgatgtcaactatcataagtgaaaatatcttcctttaatgttctaagtagtgataatattactagaatgaaagaataaaaagaaattgttcttttaaaatatgtgtaacttctaaaaataaaacttaaaatttatatgcaaaaaaaaaaaaaaaaa

SEQ ID NO: 12754 - DNA, 2244 bp, Homo sapiens
cttgtatggttgactttgagtgattcccaggatatttaccctgctattgtcttaccataatcttgatgtgtctagcctcttacaaatgagaaaatcctaccgaggaatttcccatttgtaatagtttgtcttggggagcaaagaggaggatagccaatgatcatgatgatctcctcttttctcacgcagagcaggtgttcatgataaaaagcaagtcttttgtgtcttcatgatctgaagagaggaaacaacacggatcaagatgatcctagacctcctaatcatggggatgattacaaggagttgcagaccctactctctattttgcagtgggtggagttgtggataggggtgacccatcagtcattgagaaatgaatctcctgggtgctacttgtgaaagtgaggatcctctctccctttcctgtggatgcagctgagattctggacagcctagacttcttcctcagtgtcagagtaagattgcctcaatggggcggggcaggacacactgctgacctcaccactgggcgccctgggcagccactgcgaggcctcgtcattttcgagttggtgagacaccgcggcagtcgacttggaagatgctctggtggtagaggtggacttagtagttttaagcagaaccatgaaaacctctgtgacaactccctccagctccaagagtgccgggaggtggggggcggcgcatccgcggcctcgagcttgctacctcagcccatccccaccacccctgacatcgagaacgctgagctcacccccatcttgcccttcctgttccttggcaatgagcaggatgctcaggacctggacaccatgcagcggctgaacatcggctacgtcatcaacgtcaccactcatcttcccctctaccactatgagaaaggcctgttcaactacaagcggctgccagccactgacagcaacaagcagaacctgcggcagtactttgaagaggcttttgagttcattgaggaagctcaccagtgtgggaaggggcttctcatccactgccaggctggggtgtcccgctccgccaccatcgtcatcgcttacttgatgaagcacactcggatgaccatgactgatgcttataaatttgtcaaaggcaaacgaccaattatctccccaaaccttaacttcatggggcagttgctagagttcgaggaagacctaaacaacggtgtgacaccgagaatccttacaccaaagctgatgggcgtggagacggttgtgtgacaatggtctggatggaaaggattgctgctctccattaggagacaatgaggaaggaggatggattctggttttttttctttctttttttttttgtagttgggagtaagtttgtgaatggaaacaaacttgtttaaacactttatttttaacaagtgtaagaagactataacttttgatgccattgagattcacctcccacaaactgacaaattaaggaggttaaagaagtaatttttttaagccaacaataaaaatataatacaacttgtttctcccccttttccttttaagctatttgtagagtttatgactaaatagtctgtgcaggttcatagaccgaagatactacacactttaaaccaattaaaaagaaccaaaagtaaatagaaaagacattgaatcaccaaggcctgggatcaacctgggctgtccacacagaaaacaaaaacccaaccaaaccaagccctgttgtgctcactggtgcaaagagaagatcagggcagcttaagtggtctaagaatccttcaggcattctttaaggagaaaaaggatacctttgattttgtgtgtttcatgctctggattttttttttttttccttctctgggtttaagagattttttttgaaatagtgaggaactgaccattatatgccttcactggcttcttgtgcaataatatgatgttttaagtgtgcaaacaagttagagctggcagctgaatgatagacaaatagtgcaaatttgccagcttggagatagaaaggaattcaacaatatatcaaatactttccttcccacctttttccttttttttttttttttctgatttgattctggttacagtgccataaaccttgttacatatgtatatcagaatgtaagaaaaaaaaatttatttaaaaatatttttcgcaaaaaaaaaaaaaatcttggtgtgtttctgttgattgtgtaaaaatttattttcattatataaatgaaactgg

SEQ ID NO: 12755 - DNA, 1765 bp, Homo sapiens
ttacatttacagtgtagcaaaagagaaagtaactatgttgctgctggagatcaatgaagccgagtgaatgggggctgaatgtgcgagtccatagctgaagaggagcgccagatggtggaggaatacacttatttatgaagtggacttagtagttttaagcagaaccatgaaaacctctgtgacaactccctccagctccaagagtgccgggaggtggggggcggcgcatccgcggcctcgagcttgctacctcagcccatccccaccacccctgacatcgagaacgctgagctcacccccatcttgcccttcctgttccttggcaatgagcaggatgctcaggacctggacaccatgcagcggctgaacatcggctacgtcatcaacgtcaccactcatcttcccctctaccactatgagaaaggcctgttcaactacaagcggctgccagccactgacagcaacaagcagaacctgcggcagtactttgaagaggcttttgagttcattgaggaagctcaccagtgtgggaaggggcttctcatccactgccaggctggggtgtcccgctccgccaccatcgtcatcgcttacttgatgaagcacactcggatgaccatgactgatgcttataaatttgtcaaaggcaaacgaccaattatctccccaaaccttaacttcatggggcagttgctagagttcgaggaagacctaaacaacggtgtgacaccgagaatccttacaccaaagctgatgggcgtggagacggttgtgtgacaatggtctggatggaaaggattgctgctctccattaggagacaatgaggaaggaggatggattctggttttttttctttctttttttttttgtagttgggagtaagtttgtgaatggaaacaaacttgtttaaacactttatttttaacaagtgtaagaagactataacttttgatgccattgagattcacctcccacaaactgacaaattaaggaggttaaagaagtaatttttttaagccaacaataaaaatataatacaacttgtttctcccccttttccttttaagctatttgtagagtttatgactaaatagtctgtgcaggttcatagaccgaagatactacacactttaaaccaattaaaaagaaccaaaagtaaatagaaaagacattgaatcaccaaggcctgggatcaacctgggctgtccacacagaaaacaaaaacccaaccaaaccaagccctgttgtgctcactggtgcaaagagaagatcagggcagcttaagtggtctaagaatccttcaggcattctttaaggagaaaaaggatacctttgattttgtgtgtttcatgctctggattttttttttttttccttctctgggtttaagagattttttttgaaatagtgaggaactgaccattatatgccttcactggcttcttgtgcaataatatgatgttttaagtgtgcaaacaagttagagctggcagctgaatgatagacaaatagtgcaaatttgccagcttggagatagaaaggaattcaacaatatatcaaatactttccttcccacctttttccttttttttttttttttctgatttgattctggttacagtgccataaaccttgttacatatgtatatcagaatgtaagaaaaaaaaatttatttaaaaatatttttcgcaaaaaaaaaaaaaatcttggtgtgtttctgttgattgtgtaaaaatttattttcattatataaatgaaactgg

SEQ ID NO: 12756 - DNA, 2619 bp, Homo sapiens
ttacatttacagtgtagcaaaagagaaagtaactatgttgctgctggagatcaatgaagccgagtgaatgggggctgaatgtgcgagtccatagctgaagaggagcgccagatggtggaggaatacacttatttatgaaactgtcttgagttcttcttgaattgccagttttcagcctcctcatgcctccgtctcctttagacgacagggtagtagtggcactatctaggcccgtccgacctcaggatctcaacctttgtttagactctagttaccttggctctgccaacccaggcagtaacagccaccctcctgtcatcgccaccaccgttgtgtccctcaaggctgcgaatctgacgtatatgccctcatccagcggctctgcccgctcgctgaattgtggatgcagcagtgccagctgctgcactgtggcaacctacgacaaggacaatcaggcccaaacccaagccattgccgctggcaccaccaccactgccatcggaacctctaccacctgccctgctaaccagatggtcaacaataatgagaatacaggctctctaagtccatcaagtggggtgggcagccctgtgtcagggacccccaagcagctagccagcatcaaaataatctaccccaatgacttggcaaagaagatgaccaaatgcagcaagagtcacctgccgagtcagggccctgtcatcattgactgcaggcccttcatggagtacaacaagagtcacatccaaggagctgtccacattaactgtgccgataagatcagccggcggagactgcagcagggcaagatcactgtcctagacttgatttcctgtagggaaggcaaggactctttcaagaggatcttttccaaagaaattatagtttatgatgagaataccaatgaaccaagccgagtgatgccctcccagccacttcacatagtcctcgagtccctgaagagagaaggcaaagaacctctggtgttgaaaggtggacttagtagttttaagcagaaccatgaaaacctctgtgacaactccctccagctccaagagtgccgggaggtggggggcggcgcatccgcggcctcgagcttgctacctcagcccatccccaccacccctgacatcgagaacgctgagctcacccccatcttgcccttcctgttccttggcaatgagcaggatgctcaggacctggacaccatgcagcggctgaacatcggctacgtcatcaacgtcaccactcatcttcccctctaccactatgagaaaggcctgttcaactacaagcggctgccagccactgacagcaacaagcagaacctgcggcagtactttgaagaggcttttgagttcattgaggaagctcaccagtgtgggaaggggcttctcatccactgccaggctggggtgtcccgctccgccaccatcgtcatcgcttacttgatgaagcacactcggatgaccatgactgatgcttataaatttgtcaaaggcaaacgaccaattatctccccaaaccttaacttcatggggcagttgctagagttcgaggaagacctaaacaacggtgtgacaccgagaatccttacaccaaagctgatgggcgtggagacggttgtgtgacaatggtctggatggaaaggattgctgctctccattaggagacaatgaggaaggaggatggattctggttttttttctttctttttttttttgtagttgggagtaagtttgtgaatggaaacaaacttgtttaaacactttatttttaacaagtgtaagaagactataacttttgatgccattgagattcacctcccacaaactgacaaattaaggaggttaaagaagtaatttttttaagccaacaataaaaatataatacaacttgtttctcccccttttccttttaagctatttgtagagtttatgactaaatagtctgtgcaggttcatagaccgaagatactacacactttaaaccaattaaaaagaaccaaaagtaaatagaaaagacattgaatcaccaaggcctgggatcaacctgggctgtccacacagaaaacaaaaacccaaccaaaccaagccctgttgtgctcactggtgcaaagagaagatcagggcagcttaagtggtctaagaatccttcaggcattctttaaggagaaaaaggatacctttgattttgtgtgtttcatgctctggattttttttttttttccttctctgggtttaagagattttttttgaaatagtgaggaactgaccattatatgccttcactggcttcttgtgcaataatatgatgttttaagtgtgcaaacaagttagagctggcagctgaatgatagacaaatagtgcaaatttgccagcttggagatagaaaggaattcaacaatatatcaaatactttccttcccacctttttccttttttttttttttttctgatttgattctggttacagtgccataaaccttgttacatatgtatatcagaatgtaagaaaaaaaaatttatttaaaaatatttttcgcaaaaaaaaaaaaaatcttggtgtgtttctgttgattgtgtaaaaatttattttcattatataaatgaaactgg

SEQ ID NO: 12757 - DNA, 2178 bp, Homo sapiens
gctcagtagcgatagcagcggccgtggaggtggcgttggggactgttttctctcggaggccggagcggagccgcgtctgactgaggcgggcagcaagcggccccctcgctccctccctccctcctccgcgccctccccgccgccaccagccgtcaaacgccaaccgccgctcctggggaggagccgcggctcgcggggccggagccaggcctgcgtccggacatcagccggagccggagcgagagccggggcctcggcgtccccgccctctccccgcctcggccagcgtccgccgggcccccgcgcgtcgcgccatggactcggacgagggctacaactacgagttcgacgaggacgaggagtgcagtgaggaggacagcggcgccgaggaggaggaggacgaagacgacgacgagccggacgatgataccctggatctgggcgaggtggagctggtggagcccgggctgggcgtcggcggggagcgggacggactgctgtgcggggagacgggcggtggcggcggcagcgctctggggcccggcggtggcggcggcggcggcggcggcggtggtggtggcgggccggggcatgagcaggaggaggattaccgctacgaggtgctcacggccgagcagattctacaacacatggtggaatgtatccgggaggtcaacgaggtcatccagaatccagcaactatcacaagaatactccttagccacttcaattgggataaagagaagctaatggaaaggtactttgatggaaacctggagaagctctttgctgagtgtcatgtaattaatccaagtaaaaagtctcgaacacgccagatgaatacaaggtcatcagcacaggatatgccttgtcagatctgctacttgaactaccctaactcgtatttcactggccttgaatgtggacataagttttgtatgcagtgctggagtgaatatttaactaccaaaataatggaagaaggcatgggtcacactatttcgtgtcctgctcatggttgtgatatcttagtggatgacaacacagttatgcgcctgatcacagattcaaaagttaaattaaagtatcagcatttaataacaaatagctttgtagagtgcaatcgactgttaaagtggtgtcctgccccagattgccaccatgttgttaaagtccaatatcctgatgctaaacctgttcgctgcaaatgtgggcgccaattttgctttaactgtggagaaaattggcatgatcctgttaaatgtaagtggttaaagaaatggattaaaaagtgtgatgatgacagtgaaacctccaattggattgcagccaacacaaaggaatgtcccaaatgccatgtcacaattgagaaggatggtggttgtaatcacatggtctgtcgtaaccagaattgtaaagcagagttttgctgggtgtgtcttggcccatgggaaccacatggatctgcctggtacaactgtaaccgctataatgaggatgatgcaaaggcagcaagagatgcacaggagcgatctagggcagccctgcagaggtacctgttctactgtaatcgctatatgaaccacatgcagagcctgcgctttgagcacaaactatatgctcaggtgaaacagaaaatggaggagatgcagcagcacaacatgtcctggattgaggtgcagttcctgaagaaggcagttgatgtcctctgccagtgtcgtgccacactcatgtacacttatgtcttcgctttctacctcaaaaagaataaccagtccattatctttgagaataaccaagcagatctagagaatgccacagaggtgctctcgggctaccttgaacgagatatttcccaagattctctgcaggatataaagcagaaagtacaagacaagtacagatactgtgagagtcgacgaagggttttgttacagcatgtgcatgaaggctatgaaaaagatctgtgggagtacattgaggactgagaatggccctgcataaaatgaactctgaaaactttaccatctagagtgctcatgcaattaaaacaaaacaaacacaaacaaggaggcactaagcctattctgacaccactggtctgtagtaccagaattgttttgttaatggaaagtttaagtaaattatattgtaataaaaaggtagataaaccattgt

SEQ ID NO: 12758 - DNA, 2038 bp, Homo sapiens
gacctgccgggacccttgcccgccgcgcacccgcagtcaccgccgagcgggcggccgggccgggacccgcgagtgtgcaccggcggccgggctggcgccgagcccagagcggaccagcagcagctcaagcgctgcggccgccgcctccccgctgaccccgcgatctgaggctgtcagagatgactctggttctgtccatgaatagattctgcgagcccattgtctcggaaggagctgctgaaattgctgggtaccaaacactatgggaggctgacagctacggaggcccaagccccccagggccagcacaagctcctttgcagggagaccggggagctggtcccccactggcaggatcacattacaggggaatttcaaatcctataacaacatccaagatcacatactttaagaggaagtatgtggaagaagaggattttcacccaccactcagcagctgtagccataaaaccatctcaatttttgaggaacgagcccacatcctttatatgtccttagaaaagctaaagtttatcgatgatcctgaagtgtacctccgaagatctgtccttataaacaatttgatgaaaaggatccatggagaaattatcatgcagaataactggtgcttccctgcctgctctttcaatggcacctctgcccaagagtggtttatggctcaagactgcccttaccgaaaacgaccacggatggccaaagaggaatgtgaaaagtttcatgcctgctgcttttaccaagaatgtggtggccactacctaaatttacccctttctgtcaatgctaatgttggaagtgcctccactgctgcctcctctccctccgcctcttcttcctcctcatcttcctcttcctctccccctttgcctttaccgagttgttcccgccaggtggattttgatgtaggtagtgcatctatttacaagagtgatggccagatacctgccaatgaaatctttgtcactaatgtcagatcacttggtgttcaggaaaaggccaaattaaatgatgagaaagcaaatgatgacaccaacagagatggtggccccctcagccacgaacctgtgggaaatgaccttgcttttgagtgcaaaggccaattttatgattattttgagaccggatataatgaaagaaacaatgtaaatgaatcttggaaaaagtccttacggaaaaaggaggcttcaccaccaagtaacaaactgtgctgcagcaaaggaagtaaaatatgagccatcttctcaccgaactttgaagcatgcacagcatgatcagttagctctcgtaaattttattttgaatggattttgtagttttgtacaacagataaaattatgccatgaacatgccatgtcgttttaatgcctggagagcagattgcgtaaaacatctgtatagcaggcatcagcgagcttcttataaatgtggtgatttttaccaaggaaactattgacttaatgcttaaaagtatatcatagttttcttacggaaaagatcagtagatgagattgggggacaatgtgcccttgcaatatttccattgccccccaaggagcctgtcactagctaagaaatttctacatgtttgccagttaattagggagttatttggtaagcaaatcaatataaccagcaaagatacctgcttcttctatatgatacaatattttttttaaataaaagactaaagacagggagctagatgaaatggcttaatggtgctgttaagtatttgtacctaacagtcttgtgtgacagatgaaaataggatgtaacataatgaaacacacctgtctaggggcggcaatcaacagtcttacacagagagggtattccctgcaagtttctggcttgcctgtgatgggtgatgaggcttttagagaggtgttatacagggcgatttttggtgccttacttttatcttaatttttgccaatgtgaaaattaaggataaatcagagttacagcagggatttaacaaacaggacaaaaaaaaaaaaaaaaaaaaaaaaaaaaaaaa

SEQ ID NO: 12759 - DNA, 1706 bp, Homo sapiens
cgtttttgttgaaagagtcattaacggagttaggagttgatggcagtttcaataacaggtcattgccgagaaaaggatagcactataatatgcagaaatctacaaattctgatacttccgtggaaacactgaattctacccgccaaggcacaggagctgtgcaaatgagaatcaaaaatgccaacagccaccatgacaggctcagccaaagtaaatccatgatcctcaccgatgtcgggaaggtcactgaacctatatccagacacagaaggaatcattcacagcatatcttgaaagatgtcattcctccattggaacaactgatggttgaaaaagaaggttatctgcaaaaagctaaaattgcagatggaggaaagaaactaaggaaaaactggtctacttcctggattgttctttctagtcgaagaattgaattttacaaagaatccaagcaacaggctctgtccaatatgaaaactgggcacaaaccagaaagtgtggatttgtgtggagcacacattgaatgggccaaggaaaaatcgagcagaaagaatgtctttcagatcacaacagtatcaggaaatgagttccttctacagtcagatattgacttcatcatattggattggttccacgctatcaaaaatgcaattgacagattgccaaaggattcaagttgtccatcaagaaacctggaattattcaaaatccaaagatcctctagcactgaattgctaagtcactatgacagtgatataaaagaacagaaaccagagcacagaaaatctttaatgttcagactgcatcacagtgcttccgatacaagcgacaaaaatcgagttaaaagcagattaaagaagtttattacccgaagaccttccctgaaaactctgcaagaaaaaggacttattaaagatcaaatttttggctctcatctgcacaaagtgtgtgaacgtgaaaattccacagttccgtggtttgtaaagcaatgcattgaagctgttgagaaaagaggtctagatgtggatgcaatatatcgagttagtggcaatctgcaaacaatacagaagttaagatttattgtcaaccaagaagagaagctgaatttggacgacagccagtgggaggacatccacgttgtcaccggagcactgaagatgtttttccgggagctgcctgagccgctcttcccttacagtttctttgagcagtttgtggaagcgatcaaaaagcaagacaacaacacaagaattgaagctgtaaaatctcttgtacaaaaactccctccgccaaatcgtgacaccatgaaagtcctctttggacatctaactaagatagtggccaaagcctccaagaacctcatgtccacgcaaagcttggggattgtatttggacctacccttctgcgagctgaaaatgaaacaggaaacatggcgatccacatggtctaccagaaccagatagctgagctcatgctgagtgagtacagtaagatcttcggctcagaggaagactgacagacaagacaagctactgaatacgttcacatctgtcttgatgcctaatatttttacatttctgtaaacatatttctgaaatattttttgcctttcaagcgacagatgcctcattttgtgaaaacttaatgatgattttgtgtttaagttccaaacatttgaataaaataattgacaataaaaaaaaaa

SEQ ID NO: 12760 - DNA, 6671 bp, Homo sapiens
aatgagatcctaagatggcggtggctgcggcggttggcgctgcgtagctgaggtcgaaaaggcggccactggggccgaggcagccaggaaacgtgtgggcctctctgctgcggtctccgagggccgaccgctgccggcggcgggtcgtgggggctgactgtcgctctgcctttgacaggagaggctgcttcttgtagaggaaacagctttgaagtgtggagcgggaaaggagcagtttctgagctgcaaaaactagtttctaaacagagagttaattgttaaatccagtatggccacaggaggaggtccctttgaagatggcatgaatgatcaggatttaccaaactggagtaatgagaatgttgatgacaggctcaacaatatggattggggtgcccaacagaagaaagcaaatagatcatcagaaaagaataagaaaaagtttggtgtagaaagtgataaaagagtaaccaatgatatttctccggagtcgtcaccaggagttggaaggcgaagaacaaagactccacatacgttcccacacagtagatacatgagtcagatgtctgtcccagagcaggcagaattagagaaactgaaacagcggataaacttcagtgatttagatcagagaagcattggaagtgattcccaaggtagagcaacagctgctaacaacaaacgtcagcttagtgaaaaccgaaagcccttcaactttttgcctatgcagattaatactaacaagagcaaagatgcatctacaagtcccccaaacagagaaacgattggatcagcacagtgtaaagagttgtttgcttctgctttaagtaatgacctcttgcaaaactgtcaggtgtctgaagaagatgggaggggagaacctgcaatggagagcagccagattgtaagcaggcttgttcaaattcgcgattatattactaaagctagttccatgcgggaagatcttgtagagaaaaatgagagatctgctaatgttgagcgccttactcatctaatagatcaccttaaagaacaagagaagtcatatatgaaatttcttaaaaaaatccttgccagagatcctcagcaggagcctatggaagagatagaaaatttgaagaaacaacatgatttattaaaaagaatgttacaacagcaggagcaactaagagctctacagggacggcaggctgcacttctagctctgcaacataaagcagagcaagctattgcagtgatggatgattctgttgttgcagaaactgcaggtagcttatctggcgtcagtatcacatctgaactaaatgaagaattgaatgacttaattcagcgttttcataatcagcttcgtgattctcagcctccagctgttccagacaatagaagacaggcagaaagtctttcattaactagggaggtttcccagagcaggaaaccatcagcttcagaacgtttacctgatgagaaagtcgaactttttagcaaaatgagagtgctacaggaaaagaaacaaaaaatggacaaattgcttggagaacttcatacacttcgagatcagcatcttaacaattcatcatcctctccacaaaggagtgtcgatcagagaagtacttcagctccctctgcttctgtaggcttggcaccggttgtcaatggagaatccaatagcctcacatcatctgttccttatcctactgcttctctagtatctcagaatgagagtgaaaacgaaggccacctcaatccatctgaaaaactccagaagttaaatgaagttcgaaagagattgaatgagctaagagaattagttcattattatgaacaaacgtcagacatgatgacagatgctgtgaatgaaaacaggaaagatgaagaaactgaagagtcagaatatgattctgagcatgaaaattccgagcctgttactaacattcgaaatccacaagtagcttccacttggaatgaagtaaatagtcatagtaatgcacagtgtgtttctaataatagagatgggcgaacagttaattctaattgtgaaattaacaacagatctgctgccaacataagggctctaaacatgcctccttctttagattgtcgatataatagagaaggggaacaggagattcatgttgcacaaggtgaagatgatgaggaggaggaggaagaagcagaagaggagggagtcagtggagcttcattatctagtcacaggagcagtctggttgatgagcatccagaagatgctgaatttgaacagaagatcaaccgacttatggctgcaaaacagaaacttagacagttacaagatcttgttgctatggtacaggatgatgatgcagctcaaggagttatctctgccagtgcatcaaatttggatgatttctacccagcagaagaagacaccaagcaaaattcaaataacactagaggaaatgccaataaaacacagaaagatactggagtaaatgaaaaggcaagagagaaattttatgaggctaaactacagcagcaacagagagagctaaaacaattgcaggaagaaagaaagaaactgattgacattcaggagaaaattcaagcattgcaaacggcatgccctgacttacagctgtcagctgctagtgtgggtaactgtcccaccaaaaaatatatgccagctgttacttcaaccccaactgttaatcaacacgagaccagtacaagcaaatctgtttttgagcctgaagattcttcaatagtagataatgagttgtggtcagaaatgagaagacatgaaatgttgagggaggagctgcgacagagaagaaagcagcttgaagctctgatggctgaacatcagaggaggcaaggtctagctgaaactgcatctccagtggctgtgtcattgagaagtgatggatctgagaacctatgtactcctcagcaaagtagaacagaaaaaacgatggcaacttggggagggtctacccagtgtgcactagatgaagaaggagatgaagacggttacctttctgaaggaattgttcggacagatgaagaggaggaagaagagcaagatgccagttccaatgataacttttctgtgtgtccttctaacagtgtgaatcataactcctacaatggaaaggaaactaaaaataggtggaagaacaattgccctttttcggcagatgaaaattatcgtcctttagccaagacaaggcaacagaatatcagcatgcaacggcaagaaaaccttcgttgggtgtcagagctctcttacgtagaagagaaagaacaatggcaagaacaaatcaatcagctaaagaaacagcttgattttagtgtcagtatttgtcagactttgatgcaagaccagcagactctatcttgtctgctacaaactcttctcacgggtccttacagtgttatgcccagcaatgttgcatctcctcaagtacacttcataatgcaccagttgaaccagtgctatactcagctaacatggcaacagaataatgttcagaggttgaaacaaatgctaaatgaacttatgcgccagcaaaatcagcatccagaaaaacctggaggcaaggaaagaggcagtagtgcatcgcaccctccttctcccagtttattttgtcctttcagctttccaacacagcctgtaaatctcttcaatatacctggatttactaacttttcatcatttgcaccaggtatgaatttcagccctttatttccttctaattttggagatttttctcagaatatctctacacccagtgaacagcagcaacccttagcccagaattcttcaggaaaaacagaatatatggcttttccaaaaccttttgaaagcagttcctctattggagcagagaaaccaaggaataaaaaactgcctgaagaggaggtggaaagcagtaggacaccatggttatatgaacaagaaggtgaagtagagaaaccatttatcaagactggattttcagtgtctgtagaaaaatctacaagtagtaaccgcaaaaatcaattagatacaaacggaagaagacgccagtttgatgaagaatcactggaaagctttagcagtatgcctgatccagtagatccaacaacagtgactaaaacattcaagacaagaaaagcgtctgcacaggccagcctggcatctaaagataaaactcccaagtcaaaaagtaagaagaggaattctactcagctgaaaagcagagttaaaaacatcaggtatgaaagtgccagtatgtctagcacatgtgaaccttgcaaaagtaggaacagacattcagcccagactgaagagcctgttcaagcaaaagtattcagcagaaagaatcatgagcaactggaaaaaataataaaatgtaataggtctacagaaatatcttcagaaactgggagtgatttttccatgtttgaagctttgcgagatactatttattctgaagtagctacattaatttctcaaaatgaatctcgtccacattttcttattgaactcttccatgagctgcagctactaaacacagactacttgagacagagggctttatatgcattgcaggacatagtatccagacatatttctgagagccatgaaaaaggagaaaatgtaaagtcagtaaactctggtacttggatagcatcaaactcagaacttactcctagtgagagccttgctactactgatgatgaaacttttgagaagaactttgaaagagaaacccataaaataagtgagcaaaatgatgctgataatgctagtgtcctgtctgtatcatcaaattttgagccttttgcaacagatgatctaggtaacaccgtgattcacttagatcaagcattagccagaatgagagaatatgagcgtatgaagactgaggctgaaagtaactcaaatatgagatgcacctgcaggattattgaggatggagatggtgctggtgcaggtactacagttaataatttagaagaaactcccgttattgaaaatcgtagttcacaacaacctgtaagtgaagtttctaccatcccatgtcctagaattgatactcagcagctggaccggcaaattaaagcaattatgaaagaagtcattccttttttgaaggagcacatggatgaagtatgctcctcgcagcttctaacttcagtaaggcgcatggttttgacccttacccagcaaaatgatgagagcaaagagtttgtaaagttctttcataaacaacttggaagtatattacaggattcactggcaaaatttgctggcagaaaactgaaagactgtggagaagatcttcttgtagagatatctgaagtgttgttcaatgaattggctttctttaagcttatgcaagatttggataataatagtataactgttaaacagagatgcaaaaggaaaatagaagcaactggagtgatacaatcttgtgccaaagaggctaaaaggattcttgaagatcatggctcacctgctggagagattgatgatgaagacaaagacaaggatgaaactgaaacagttaagcagactcaaacatctgaggtgtatgatggtcccaaaaatgtaagatctgatatttctgatcaagaggaagatgaagaaagtgaaggatgtccagtgtctattaatttgtctaaagctgaaactcaggctttaactaattatggaagtggagaagatgaaaatgaggatgaagaaatggaagaatttgaagaaggccctgtggatgtccagacttccctccaggctaacactgaagctactgaagaaaatgaacatgatgaacaggtcctacaacgtgactttaaaaagacagcagaaagcaaaaatgtcccattggaacgagaagccactagtaaaaaaaataactgtcctgtgaaaccctgttacctcaatatcttggaagatgagcaacctttaaatagtgctgcccataaggagtcacctcctactgttgattcaactcaacagcctaaccctttgccgttacgtttacctgaaatggaacccttagtgcctagagtcaaagaagttaaatctgctcaggaaactcctgaaagctctctggctggaagtcctgatactgaatctccagtgttagtgaatgactatgaagcagaatctggtaatataagtcaaaagtctgatgaagaagattttgtaaaagttgaagatttaccactgaaactgacaatatattcagaggcagatctaagaaagaaaatggtagaagaagaacagaaaaaccatttatctggtgaaatatgtgaaatgcagaccgaagaattagctggaaattctgagacactaaaagaacctgaaacggtgggagcccagagtatatgagatgtcttcagaggctcatctaactctgtccttacatactcaatgcatatatgaaaacaatactaaataaacatctgatctgtataaaaatgtaaattagtttgacactgcttttttgataggtgtggtcatttctccccatggtagtttaaaacatcagaaactgaattctggacagatttaagccttgacacactgtgtttttttttttttcccccttcttttttgggtcttcatttttttccccattgtgatgtttggtaacgaatttaaaatgtagttttaaataaagtttggacttatctataaagta

SEQ ID NO: 12761 - DNA, 2114 bp, Homo sapiens
attataaatctagagactccaggattttaacgttctgctggactgagctggttgcctcatgttattatgcaggcaactcactttatcccaatttcttgatacttttccttctggaggtcctatttctctaacatcttccagaaaagtcttaaagctgccttaaccttttttccagtccacctcttaaattttttcctcctcttcctctatactaacatgagtgtggatccagcttgtccccaaagcttgccttgctttgaagcatccgactgtaaagaatcttcacctatgcctgtgatttgtgggcctgaagaaaactatccatccttgcaaatgtcttctgctgagatgcctcacacggagactgtctctcctcttccctcctccatggatctgcttattcaggacagccctgattcttccaccagtcccaaaggcaaacaacccacttctgcagagaatagtgtcgcaaaaaaggaagacaaggtcccagtcaagaaacagaagaccagaactgtgttctcttccacccagctgtgtgtactcaatgatagatttcagagacagaaatacctcagcctccagcagatgcaagaactctccaacatcctgaacctcagctacaaacaggtgaagacctggttccagaaccagagaatgaaatctaagaggtggcagaaaaacaactggccgaagaatagcaatggtgtgacgcagaaggcctcagcacctacctaccccagcctctactcttcctaccaccagggatgcctggtgaacccgactgggaaccttccaatgtggagcaaccagacctggaacaattcaacctggagcaaccagacccagaacatccagtcctggagcaaccactcctggaacactcagacctggtgcacccaatcctggaacaatcaggcctggaacagtcccttctataactgtggagaggaatctctgcagtcctgcatgcagttccagccaaattctcctgccagtgacttggaggctgctttggaagctgctggggaaggccttaatgtaatacagcagaccactaggtattttagtactccacaaaccatggatttattcctaaactactccatgaacatgcaacctgaagacgtgtgaagatgagtgaaactgatattactcaatttcagtctggacactggctgaatccttcctctcccctcctcccatccctcataggatttttcttgtttggaaaccacgtgttctggtttccatgatgcctatccagtcaatctcatggagggtggagtatggttggagcctaatcagcgaggtttctttttttttttttcctattggatcttcctggagaaaatacttttttttttttttttgagacggagtcttgctctgtcgcccaggctggagtgcagtggcgcggtcttggctcactgcaagctccgcctcccgggttcacgccattctcctgcctcagcctcccgagcagctgggactacaggcgcccgccacctcgcccggctaatattttgtatttttagtagagacagggtttcactgtgttagccaggatggtctcgatctcctgaccttgtgatccgcccgcctcggcctccctaacagctgggattacaggcgtgagccaccgcgccctgcctagaaaagacattttaataaccttggctgctaaggacaacattgatagaagccgtctctggctatagataagtagatctaatactagtttggatatctttagggtttagaatctaacctcaagaataagaaatacaagtacgaattggtgatgaagatgtattcgtattgtttgggattgggaggctttgcttatttttttaaaactattgaggtaaagggttaagctgtaacatacttaattgatttcttaccgtttttggctctgttttgctatatcccctaatttgttggttgtgctaatctttgtagaaagaggtcttgtatttgctgcatcgtaatgacatgagtactactttagttggtttaagttcaaatgaatgaaacaaatatttttcctttagttgattttaccctgatttcaccgagtgtttcgatgagtaaatatacagcttaaacat

SEQ ID NO: 12762 - DNA, 4319 bp, Homo sapiens
ggaccccaaaaagaagagagctcagaagccctcccacatgagaagaaacatacgaaagctactccgggaggatcaattggagcctgttaccaaagcagcacagcaagaagagttggaaagaaggaagcgcctggagcagcagaggaaagattatgcagcccctattcctactgttccgctggagttcctccctgaggaaattgctttaagggcaagtgacggtccccaactgcctcctcgggtcttggcccaggaagtcatttgtttggacagtagcagtggcagtgaggatgaaaaaagcagtcgagatgaggtgattgaactgagctctggagaggaggacactctgcacattgtggacagcagtgaatctgtcagtgaagatgatgaggaagaagagaagggtggcacccatgtcaatgatgtcttaaaccagcgtgacgcccttgggcgggtctttgtcaacctaaaccaccctccagaggaggaaaatgtcttccttgccccacagttggcacgggctgtgaaacctcatcagattggcgggatccggttcctttacgataacctagtggagtctctggagaggtttaagaccagcagtggctttggctgtattctggcccacagcatgggtctggggaaaactttgcaagtgatctctttcatcgacgtcctcttccgccacacgccagccaaaacagtccttgccattgtgccggttaatactcttcagaattggctggcagagttcaacatgtggcttccacctcctgaagccctcccggctgacaacaagcctgaagaagtccagcctcggttctttaaagttcacatcttgaatgatgagcacaagacgatggcatctcgtgctaaagtgatggctgattgggtgtcagagggtggcgtgctgctgatggggtacgagatgtacagactcctcactctgaagaaatcatttgccacaggtagaccgaagaaaaccaagaagcgttctcacccagtcatcattgatctagatgaggaagatcggcagcaggagtttcggagagagtttgagaaggctttatgccgccctggccctgatgtagtaatctgtgatgagggacaccgcatcaaaaactgccaggccagcacctcacaggctctgaagaatatccgctctcgccgccgggtggtgctgactgggtaccctctgcaaaacaacctcattgagtactggtgcatggtggactttgtgcgcccagacttccttggcacccggcaggagttcagcaacatgtttgaacgccctatcctgaatgggcaatgtattgacagcacacctcaggacgtccgcctcatgcggtaccggagccatgtcctgcacagtcttctggagggctttgtgcagaggagaggccacactgtgctgaagattcatctccctgccaaggaagaaaatgtgatccttgtgcggctctccaagatccagcgagatttgtatacacagttcatggatcgcttccgggactgtggtagcagcggttggctggggctgaacccccttaaggcattctgtgtgtgttgcaagatctggaatcaccctgatgtgctgtatgaagcccttcagaaggagagcttggccaatgagcaggacctagacgtggaagaacttggctctgcagggaccagtgcccgctgtccaccacagggaacaaaaggcaagggagaggatagcaccttggcttcctcgatgggagaggcaaccaatagcaagttcctacagggcgttggcttcaaccctttccaggagcgaggcaacaacattgtcacatatgaatgggccaaggaccttctgactaattaccagactggagtcctagaaaactctcccaagatggtactgcttttccacctgattgaggaaagtgtgaagcttggggacaagatccttgtgtttagccagagtctttccaccttggctctcatcgaggaattccttggaaaacgagaagtaccctgtccacctggtaccgaggggcaaggagcacagaagtgggttcgaaacatcagctacttccggctagatggtagcacccctgcctttgagagggagcggcttattaatcagttcaatgatcccagcaacctcaccacctggctgttccttctctctacaagggccggatgcttgggtgtgaatctgattggtgccaaccgagtggtggtgtttgatgcttcctggaacccttgccatgatgcccaggcagtatgtcgggtataccgttatggccagaaaaagccctgttacatctatcgccttgtggctgattacactctagaaaagaagatctatgaccgtcagatttccaagcagggcatgtcagatcgggtggtggatgatctaaatccaatgctgaacttcacacggaaagaggtggaaaacctactgcactttgttgagaaggagccagctccccaagtttccttgaacgtaaaggggatcaaggagtcagtcctgcaactggcctgtctgaagtaccctcacctcatcaccaaggagcctttcgagcatgagtcattgctcttgaaccgaaaggatcacaagctaaccaaggctgagaaaaaagcagcaaagaaaagctatgaggaagacaaacgcacatcagtcccctatacccgcccatcgtatgcgcagtattaccctgccagcgatcagagcctgaccagcatccccgccttcagccagagaaactggcagccaactttgaagggtgatgaaaagcctgtggccagtgttcgtcctgtgcagtccacccccatccccatgatgccccggcatgtcccattgggaggaagtgtaagctctgcctccagcacaaatccatccatgaactttcccatcaactacttgcagcgtgcaggagtccttgtgcagaaggtggtcaccacgacagatattgttattcctggactcaacagctccacagatgtacaggcaagaattaatgctggtgagagcatccacatcatccgtgggacaaaagggacgtacatccgtaccagtgatggacggatctttgctgtccgggcaactggcaaaccaaaggttcctgaagatggtcggatggctgcctcaggttcccagggaccttcttgcgagtccacaagcaacggcagacacagtgcctcatcacccaaagcccccgaccctgaggggctggccaggcccgtctctcctgacagcccagagatcatcagtgagcttcagcagtatgcagatgtggctgctgcccgggaatcccgtcagagctccccaagcaccaatgccgccctgcctggccccccggcccaacttatggacagcagtgctgttcccgggacagctctcggaactgagcctcgactagggggtcattgcctcaatagttccctcttggtgactggccagccctgtggtgacaggcacccagtgctggacttaaggggccacaagcgaaagttggccacaccacctgctgcccaggagtcatcccgccggcggtccaggaagggtcatctgccagcccccgtgcagccgtatgaacacgggtatccagtctctggcgggtttgccatgccacccgtctccttaaaccataacctcaccacccccttcacctcccaggctggggagaactccctgtttatgggcagtaccccctcctactaccagctgtccaatttgctggcagatgcccgcctggtgtttccagtgactactgaccctctggtgccagcaggccccgtcagttcctcttccacggctacctcagtcactgccagcaacccctccttcatgctcaacccttctgtgccagggatactacccagctattcactcccattctcacagccactcctgtccgagccgaggatgtttgcgccttttccttcccctgtcttgcccagcaacctttcgcggggcatgtctatctatccaggctacatgtccccacatgcaggctacccagctggtggcctcctacggtcccaggtgcctccatttgactctcatgaggttgccgaggttgggttcagctccaatgatgatgaggataaagacgatgatgtgatagaggtcactgggaaatagctagggagcccctccccacctcacttggggcccccagcaggttgcccaccaagctggaaggcagtgatttagaccttttgagaataggacacttggcaggagggaaaaggaagaggacaaaggagggtggttggccaaagtggcagagctctgttgctgtttaacaaaagaggcaaaaaaaaaaaaaaaaaaaaaaaaaaaa

SEQ ID NO: 12763 - DNA, 8459 bp, Homo sapiens
ggaggttgtggggccgccgccgcggagcaccgtccccgccgccgcccgagcccgagcccgagcccgcgcacccgcccgcgccgccgccgccgccgcccgaacagcctcccagcctgggcccccggcggcgccgtggccgcgtcccggctgtcgccgcccgagcccgagcccgcgcgccggcgggtggcggcgcaggctgaggagatgcggcgcggagcgccggagcagggctagagccggccgccgccgcccgccgcggtaagcgcagccccggcccggcgcccgcgggccattgtccgccgcccgccccgcgccccgcgcagcctgcaggccttggagcccgcggcaggtggacgccgccggtccacacccgccccgcgcgcggccgtgggaggcgggggccagcgctggccgcgcgccgtgggacccgccggtccccagggccgcccggccccttctggacctttccacccgcgccgcgaggcggcttcgcccgccggggcgggggcgcgggggtgggcacggcaggcagcggcgccgtctcccggtgcggggcccgcgccccccgagcaggttcatctgcagaagccagcggacgcctctgttcaacttgtgggttacctggctcatgagaccttgccggcgaggctcggcgcttgaacgtctgtgacccagccctcaccgtcccggtacttgtatgtgttggtgggagtttggagctcgttggagctatcgtttccgtggaaattttgagccatttcgaatcacttaaaggagtggacattgctagcaatgagctcccaaagccatccagatggactttctggccgagaccagccagtggagctgctgaatcctgcccgcgtgaaccacatgcccagcacggtggatgtggccacggcgctgcctctgcaagtggccccctcggcagtgcccatggacctgcgcctggaccaccagttctcactgcctgtggcagagccggccctgcgggagcagcagctgcagcaggagctcctggcgctcaagcagaagcagcagatccagaggcagatcctcatcgctgagttccagaggcagcacgagcagctctcccggcagcacgaggcgcagctccacgagcacatcaagcaacaacaggagatgctggccatgaagcaccagcaggagctgctggaacaccagcggaagctggagaggcaccgccaggagcaggagctggagaagcagcaccgggagcagaagctgcagcagctcaagaacaaggagaagggcaaagagagtgccgtggccagcacagaagtgaagatgaagttacaagaatttgtcctcaataaaaagaaggcgctggcccaccggaatctgaaccactgcatttccagcgaccctcgctactggtacgggaaaacgcagcacagttcccttgaccagagttctccaccccagagcggagtgtcgacctcctataaccacccggtcctgggaatgtacgacgccaaagatgacttccctcttaggaaaacagcttctgaaccgaatctgaaattacggtccaggctaaagcagaaagtggccgaaagacggagcagccccctgttacgcaggaaagacgggccagtggtcactgctctaaaaaagcgtccgttggatgtcacagactccgcgtgcagcagcgccccaggctccggacccagctcacccaacaacagctccgggagcgtcagcgcggagaacggtatcgcgcccgccgtccccagcatcccggcggagacgagtttggcgcacagacttgtggcacgagaaggctcggccgctccacttcccctctacacatcgccatccttgcccaacatcacgctgggcctgcctgccaccggcccctctgcgggcacggcgggccagcaggacaccgagagactcacccttcccgccctccagcagaggctctcccttttccccggcacccacctcactccctacctgagcacctcgcccttggagcgggacggaggggcagcgcacagccctcttctgcagcacatggtcttactggagcagccaccggcacaagcacccctcgtcacaggcctgggagcactgcccctccacgcacagtccttggttggtgcagaccgggtgtccccctccatccacaagctgcggcagcaccgcccactggggcggacccagtcggccccgctgccccagaacgcccaggctctgcagcacctggtcatccagcagcagcatcagcagtttctggagaaacacaagcagcagttccagcagcagcaactgcagatgaacaagatcatccccaagccaagcgagccagcccggcagccggagagccacccggaggagacggaggaggagctccgtgagcaccaggctctgctggacgagccctacctggaccggctgccggggcagaaggaggcgcacgcacaggccggcgtgcaggtgaagcaggagcccattgagagcgatgaggaagaggcagagcccccacgggaggtggagccgggccagcgccagcccagtgagcaggagctgctcttcagacagcaagccctcctgctggagcagcagcggatccaccagctgaggaactaccaggcgtccatggaggccgccggcatccccgtgtccttcggcggccacaggcctctgtcccgggcgcagtcctcacccgcgtctgccaccttccccgtgtctgtgcaggagccccccaccaagccgaggttcacgacaggcctcgtgtatgacacgctgatgctgaagcaccagtgcacctgcgggagtagcagcagccaccccgagcacgccgggaggatccagagcatctggtcccgcctgcaggagacgggcctccggggcaaatgcgagtgcatccgcggacgcaaggccaccctggaggagctacagacggtgcactcggaagcccacaccctcctgtatggcacgaaccccctcaaccggcagaaactggacagtaagaaacttctaggctcgctcgcctccgtgttcgtccggctcccttgcggtggtgttggggtggacagtgacaccatatggaacgaggtgcactcggcgggggcagcccgcctggctgtgggctgcgtggtagagctggtcttcaaggtggccacaggggagctgaagaatggctttgctgtggtccgcccccctggacaccatgcggaggagagcacgcccatgggcttttgctacttcaactccgtggccgtggcagccaagcttctgcagcagaggttgagcgtgagcaagatcctcatcgtggactgggacgtgcaccatggaaacgggacccagcaggctttctacagcgaccctagcgtcctgtacatgtccctccaccgctacgacgatgggaacttcttcccaggcagcggggctcctgatgaggtgggcacagggcccggcgtgggtttcaacgtcaacatggctttcaccggcggcctggacccccccatgggagacgctgagtacttggcggccttcagaacggtggtcatgccgatcgccagcgagtttgccccggatgtggtgctggtgtcatcaggcttcgatgccgtggagggccaccccacccctcttgggggctacaacctctccgccagatgcttcgggtacctgacgaagcagctgatgggcctggctggcggccggattgtcctggccctcgagggaggccacgacctgaccgccatttgcgacgcctcggaagcatgtgtttctgccttgctgggaaacgagcttgatcctctcccagaaaaggttttacagcaaagacccaatgcaaacgctgtccgttccatggagaaagtcatggagatccacagcaagtactggcgctgcctgcagcgcacaacctccacagcggggcgttctctgatcgaggctcagacttgcgagaacgaagaagccgagacggtcaccgccatggcctcgctgtccgtgggcgtgaagcccgccgaaaagagaccagatgaggagcccatggaagaggagccgcccctgtagcactccctcgaagctgctgttctcttgtctgtctgtctctgtcttgaagctcagccaagaaactttcccgtgtcacgcctgcgtcccaccgtggggctctcttggagcacccagggacacccagcgtgcaacagccacgggaagcctttctgccgcccaggcccacaggtctcgagacgcacatgcacgcctgggcgtggcagcctcacagggaacacgggacagacgccggcgacgcgcagacacacggacacgcggaagccaagcacactctggcgggtcccgcaagggacgccgtggaagaaaggagcctgtggcaacaggcggccgagctgccgaattcagttgacacgaggcacagaaaacaaatatcaaagatctaataatacaaaacaaacttgattaaaactggtgcttaaagtttattacccacaactccacagtctctgtgtaaaccactcgactcatcttgtagcttattttttttttaaagaggacgttttctacggctgtggcccgcctctgtgaaccatagcggtgtgcggcggggggtctgcacccgggtgggggacagagggacctttaaagaaaacaaaactggacagaaacaggaatgtgagctgggggagctggcttgagtttctcaaaagccatcggaagatgcgagtttgtgcctttttttttattgctctggtggatttttgtggctgggttttctgaagtctgaggaacaatgccttaagaaaaaacaaacagcaggaatcggtgggacagtttcctgtggccagccgagcctggcagtgctggcaccgcgagctggcctgacgcctcaagcacgggcaccagccgtcatctccggggccaggggctgcagcccggcggtccctgttttgctttattgctgtttaagaaaaatggaggtagttccaaaaaagtggcaaatcccgttggaggttttgaagtccaacaaattttaaacgaatccaaagtgttctcacacgtcacatacgattgagcatctccatctggtcgtgaagcatgtggtaggcacacttgcagtgttacgatcggaatgctttttattaaaagcaagtagcatgaagtattgcttaaattttaggtataaataaatatatatatgtataatatatattccaatgtattccaagctaagaaacttacttgattcttatgaaatcttgataaaatatttataatgcatttatagaaaaagtatatatatatatataaaatgaatgcagattgcgaaggtccctgcaaatggatggcttgtgaatttgctctcaaggtgcttatggaaagggatcctgattgattgaaattcatgttttctcaagctccagattggctagatttcagatcgccaacacattcgccactgggcaactaccctacaagtttgtactttcattttaattattttctaacagaaccgctcccgtctccaagccttcatgcacatatgtacctaatgagtttttatagcaaagaatataaatttgctgttgatttttgtatgaattttttcacaaaaagatcctgaataagcattgttttatgaattttacatttttcctcaccatttagcaattttctgaatggtaataatgtctaaatctttttcctttctgaattcttgcttgtacatttttttttacctttcaaaggtttttaattatttttgtttttatttttgtacgatgagttttctgcagcgtacagaattgttgctgtcagattctattttcagaaagtgagaggagggaccgtaggtcttttcggagtgacaccaacgattgtgtctttcctggtctgtcctaggagctgtataaagaagcccaggggctctttttaactttcaacactagtagtattacgaggggtggtgtgtttttcccctccgtggcaagggcagggagggttgcttaggatgcccggccaccctgggaggcttgccagatgccgggggcagtcagcattaatgaaactcatgtttaaacttctctgaccacatcgtcaggatagaattctaacttgagttttccaaagaccttttgagcatgtcagcaatgcatggggcacacgtggggctctttacccacttgggtttttccactgcagccacgtggccagccctggattttggagcctgtggctgcaaggaacccagggacccttgttgcctggtgaacctgcagggagggtatgattgcctgaccaggacagccagtctttactctttttctcttcaacagtaactgacagtcacgttttactggtaacttattttccagcacatgaagccaccagtttcattccaaagtgtatattgggttcagacttgggggcagaagttcagacacaccgtgctcaggagggacccagagccgagtttcggagtttggtaaagtttacagggtagcttctgaaattaactcaaacttttgaccaaatgagtgcagattcttggattcacttggtcactgggctgctgatggtcagctctgagacagtggtttgagagcaggcagaacggtcttgggacttgtttgactttcccctccctggtggccactctttgctctgaagcccagattggcaagaggagctggtccattccccattcatggcacagagcagtggcagggcccagctagcaggctcttctggcctccttggcctcattctctgcatagccctctggggatcctgccacctgccctcttaccccgccgtggcttatggggaggaatgcatcatctcactttttttttttaagcagatgatgggataacatggactgctcagtggccaggttatcagtggggggacttaattctaatctcattcaaatggagacgccctctgcaaaggcctggcagggggaggcacgtttcatctgtcagctcactccagcttcacaaatgtgctgagagcattactgtgtagccttttctttgaagacacactcggctcttctccacagcaagcgtccagggcagatggcagaggatctgcctcggcgtctgcaggcgggaccacgtcagggagggttccttcatgtgttctccctgtgggtccttggacctttagcctttttcttcctttgcaaaggccttgggggcactggctgggagtcagcaagcgagcactttatatccctttgagggaaaccctgatgacgccactgggcctcttggcgtctgccctgccctcgcggcttcccgccgtgccgcagcgtgcccacgtgcccacgccccaccagcaggcggctgtcccggaggccgtggcccgctgggactggccgcccctccccagcgtcccagggctctggttctggagggccactttgtcaaggtgtttcagtttttctttacttcttttgaaaatctgtttgcaaggggaaggaccatttcgtaatggtctgacacaaaagcaagtttgatttttgcagcactagcaatggactttgttgtttttctttttgatcagaacattccttctttactggtcacagccacgtgctcattccattcttctttttgtagactttgggcccacgtgttttatgggcattgatacatatataaatatatagatataaatatatatgaatatatttttttaagtttcctacacctggaggttgcatggactgtacgaccggcatgactttatattgtatacagattttgcacgccaaactcggcagctttggggaagaagaaaaatgcctttctgttcccctctcatgacatttgcagatacaaaagatggaaatttttctgtaaaacaaaaccttgaaggagaggagggcggggaagtttgcgtcttattgaacttattcttaagaaattgtactttttattgtaagaaaaataaaaaggactacttaaacatttgtcatattaagaaaaaaagtttatctagcacttgtgacataccaataatagagtttattgtatttatgtggaaacagtgttttagggaaactactcagaattcacagtgaactgcctgtctctctcgagttgatttggaggaattttgttttgttttgttttgtttgtttccttttatctccttccacgggccaggcgagcgccgcccgccctcactggccttgtgacggtttattctgattgagaactgggcggactcgaaagagtccccttttccgcacagctgtgttgactttttaattacttttaggtgatgtatggctaagatttcactttaagcagtcgtgaactgtgcgagcactgtggtttacaattatactttgcatcgaaaggaaaccatttcttcattgtaacgaagctgagcgtgttcttagctcggcctcactttgtctctggcattgattaaaagtctgctattgaaagaaaaag

SEQ ID NO: 12764 - DNA, 3655 bp, Homo sapiens
ccggcttttgcgctgggagcccagagcaggaggcagagcccgcgggaagctcggagcactcaggacgccgcgcgcccttccccgccctccctgaccagggagcagctcgctccaggcgcccagccgaggcccccagcccagtgggagcaagtcatagagaacaattcgagagacagagagacggagcgcgctttcctgctcagtcctgaaaagtgagccgctcccgggtttgcaacctcaagcttcgcagcagcggcggcggcggctgccgggaaggaggcaggtgcaggtgcaggagggaggcggctctgggctccgcgcctgggtcttggccatggcctcggtcctggggagcggcagagggtctggagggctgagcagtcaactcaaatgcaagtccaagaggaggaggaggcggaggtccaagcggaaagataaagtaagcatattgtcaaccttcctcgctcctttcaagcacctgagtcctggcatcacaaacacggaggatgacgacaccctcagtaccagcagcgcggaggtgaaggagaaccgcaacgtgggcaacctggccgcgcggccaccgccctccggggaccgggcccggggcggcgcgcccggcgcgaagaggaagcggccgctggaggaggggaatgggggccacttgtgcaaactgcagctggtctggaagaagctgtcgtggtcggtggcgcccaagaacgcgctggtgcagctgcacgagctgaggccgggcctgcagtaccggacagtgtcgcagacgggcccggtgcatgccccggtcttcgcggtagcggtggaggtgaacgggctcacgttcgagggcacaggccccaccaagaagaaggccaagatgcgcgcggcggagctggcactcaggtccttcgtgcagttccccaacgcctgccaggcgcacctggccatgggcgggggcccgggccccggcacggacttcacctccgaccaggccgatttccccgacacgctcttccaggagttcgagcccccggcgccgcgccccggactcgcgggaggccgccccggggacgccgcgcttctgtccgcggcctacgggcgacggcggctgctgtgccgcgcgctggacctggtgggcccgacccccgccacccccgcggccccgggcgagcgcaaccccgtggtgctgctgaaccgcctgcgcgccgggctgcgctacgtgtgtctggcagaaccggccgagcggcgcgcgcggagcttcgtgatggccgtgagcgtggacggcaggacgttcgagggctcggggcgcagcaagaagctggcccggggtcaggccgcgcaggccgcactgcaggagctgttcgacatccagatgcccggccacgcgcccggcagggccaggaggacgccaatgccgcaggaattcgcagactccatatcccagctggtcacacagaagttccgcgaggtgacgacggacctcacgcccatgcacgcccgccataaagcgctggcaggaatcgtcatgaccaaaggcctggatgctcggcaggcgcaggtcgtggccctgtcctcggggaccaagtgcatcagcggcgagcacctcagtgaccaggggctggtggtgaatgactgccacgcggaggtcgtggcccggcgggcgttcctgcacttcctctacacgcagctggagctgcacctgagcaagcggcgcgaggactcagagcgatcgatattcgtgcggttaaaagaaggtggctaccggctgcgagagaacatcctcttccatctctacgtgagcacctccccctgtggagacgcaagactccactctccctacgagatcaccacagacctgcacagcagcaaacacctcgtcaggaagttccgcgggcacctgcgcaccaagatcgagtccggggaagggacggtccccgtgcgtggccccagcgcagtgcagacctgggacggcgtcctgctgggggagcagctgatcaccatgtcctgcacggacaagatcgccaggtggaacgtcctggggctgcagggcgcgctcctgtcccacttcgtggagcccgtgtacctgcagagcatcgtggtgggcagcctgcaccacacgggccacctcgcacgcgtcatgagccaccgcatggagggtgtcggccagctgcccgcctcctaccggcacaaccggcctctcctcagcggcgtgagtgacgccgaggcgcgccagccggggaagtcgccccccttcagcatgaactgggtcgtgggcagcgcggacctggagattatcaacgccaccactgggcggaggagctgtgggggcccatcccggctctgcaagcacgtgctgtctgcacggtgggcgcggctgtatggcaggctgagcacacggacacccagccctggagacacgccctccatgtactgtgaggccaagctgggggcgcacacctaccagtctgtgaaacagcagctgttcaaggcctttcagaaggctggcctgggcacctgggtgaggaaaccaccggagcagcagcagtttctactgactctctaggctgcgggctcctggctgctggagctgagcgggacgctggagggatgggaccgtgtctggggggcgacgtggcgggtcggccggttccctgcattcgttttactttggtgtcccagaaacacgcgagtgtgcaatgtttggacgagcaacaacacaaattcagaacgtgcctctttccagatcgctggccccagaaccctgtcccccacacccaggggcacacgcaccgttgagttagcgccgactcttcctgtggagtctgagggaggggctccattcaggcaaaggggttttagctgcagccttggaaggaggcaccgacacgacaccaggcaggagtgagcctcaggccccgtccctgcaccccacccctgcgtgcgcctcttggtgatgctggggtctcactagcttgagggggcacatgaagataagccacaaatgaagagaaaagccatgcccaccccagccccagagaaaccaataagaatcctctattattttcactattcgtttaggtttttatactccacctcctttcaaaaaagatttaagatgtacgacattaccgaacacctaaaatagaaccagagaaacgaaagccattcccacaaagtgaaggaacagtttccaaaacccctgcgaggcagagttaagacctgtgacgtggggagcctggaaacacctggcccacgcgtgctgcagatgtggggagcctggaaacacccggcccacgcgtgctgcagatgtggggagcctggaaacacccggcccacgcgtgctgcagatgtggggagcctggaaacacccggcccacgcgtgctgtagatgtggggagcctggaaaaacctggcccacgcgtgctgcagatgtggggagcccggaaacacctggcccatgcctgttcagtccgtcatggcgtttggtttatggtggccgatactaagagccactgaggtctgggttgtgtgagggttagctaccaccctataacctccctaccaggtaataaggagaccaagtctttgatcaaattctgattttttaactaaattttcattagaaagcaagcacaaaataaaatcaaaacaacctttaccttca

SEQ ID NO: 12765 - DNA, 13481 bp, Homo sapiens
gctgccgggacgggtccaagatggacggccgctcaggttctgcttttacctgcggcccagagccccattcattgccccggtgctgagcggcgccgcgagtcggcccgaggcctccggggactgccgtgccgggcgggagaccgccatggcgaccctggaaaagctgatgaaggccttcgagtccctcaagtccttccagcagcagcagcagcagcagcagcagcagcagcagcagcagcagcagcagcagcagcagcagcaacagccgccaccgccgccgccgccgccgccgcctcctcagcttcctcagccgccgccgcaggcacagccgctgctgcctcagccgcagccgcccccgccgccgcccccgccgccacccggcccggctgtggctgaggagccgctgcaccgaccaaagaaagaactttcagctaccaagaaagaccgtgtgaatcattgtctgacaatatgtgaaaacatagtggcacagtctgtcagaaattctccagaatttcagaaacttctgggcatcgctatggaactttttctgctgtgcagtgatgacgcagagtcagatgtcaggatggtggctgacgaatgcctcaacaaagttatcaaagctttgatggattctaatcttccaaggttacagctcgagctctataaggaaattaaaaagaatggtgcccctcggagtttgcgtgctgccctgtggaggtttgctgagctggctcacctggttcggcctcagaaatgcaggccttacctggtgaaccttctgccgtgcctgactcgaacaagcaagagacccgaagaatcagtccaggagaccttggctgcagctgttcccaaaattatggcttcttttggcaattttgcaaatgacaatgaaattaaggttttgttaaaggccttcatagcgaacctgaagtcaagctcccccaccattcggcggacagcggctggatcagcagtgagcatctgccagcactcaagaaggacacaatatttctatagttggctactaaatgtgctcttaggcttactcgttcctgtcgaggatgaacactccactctgctgattcttggcgtgctgctcaccctgaggtatttggtgcccttgctgcagcagcaggtcaaggacacaagcctgaaaggcagcttcggagtgacaaggaaagaaatggaagtctctccttctgcagagcagcttgtccaggtttatgaactgacgttacatcatacacagcaccaagaccacaatgttgtgaccggagccctggagctgttgcagcagctcttcagaacgcctccacccgagcttctgcaaaccctgaccgcagtcgggggcattgggcagctcaccgctgctaaggaggagtctggtggccgaagccgtagtgggagtattgtggaacttatagctggagggggttcctcatgcagccctgtcctttcaagaaaacaaaaaggcaaagtgctcttaggagaagaagaagccttggaggatgactctgaatcgagatcggatgtcagcagctctgccttaacagcctcagtgaaggatgagatcagtggagagctggctgcttcttcaggggtttccactccagggtcagcaggtcatgacatcatcacagaacagccacggtcacagcacacactgcaggcggactcagtggatctggccagctgtgacttgacaagctctgccactgatggggatgaggaggatatcttgagccacagctccagccaggtcagcgccgtcccatctgaccctgccatggacctgaatgatgggacccaggcctcgtcgcccatcagcgacagctcccagaccaccaccgaagggcctgattcagctgttaccccttcagacagttctgaaattgtgttagacggtaccgacaaccagtatttgggcctgcagattggacagccccaggatgaagatgaggaagccacaggtattcttcctgatgaagcctcggaggccttcaggaactcttccatggcccttcaacaggcacatttattgaaaaacatgagtcactgcaggcagccttctgacagcagtgttgataaatttgtgttgagagatgaagctactgaaccgggtgatcaagaaaacaagccttgccgcatcaaaggtgacattggacagtccactgatgatgactctgcacctcttgtccattgtgtccgccttttatctgcttcgtttttgctaacagggggaaaaaatgtgctggttccggacagggatgtgagggtcagcgtgaaggccctggccctcagctgtgtgggagcagctgtggccctccacccggaatctttcttcagcaaactctataaagttcctcttgacaccacggaataccctgaggaacagtatgtctcagacatcttgaactacatcgatcatggagacccacaggttcgaggagccactgccattctctgtgggaccctcatctgctccatcctcagcaggtcccgcttccacgtgggagattggatgggcaccattagaaccctcacaggaaatacattttctttggcggattgcattcctttgctgcggaaaacactgaaggatgagtcttctgttacttgcaagttagcttgtacagctgtgaggaactgtgtcatgagtctctgcagcagcagctacagtgagttaggactgcagctgatcatcgatgtgctgactctgaggaacagttcctattggctggtgaggacagagcttctggaaacccttgcagagattgacttcaggctggtgagctttttggaggcaaaagcagaaaacttacacagaggggctcatcattatacagggcttttaaaactgcaagaacgagtgctcaataatgttgtcatccatttgcttggagatgaagaccccagggtgcgacatgttgccgcagcatcactaattaggcttgtcccaaagctgttttataaatgtgaccaaggacaagctgatccagtagtggccgtggcaagagatcaaagcagtgtttacctgaaacttctcatgcatgagacgcagcctccatctcatttctccgtcagcacaataaccagaatatatagaggctataacctactaccaagcataacagacgtcactatggaaaataacctttcaagagttattgcagcagtttctcatgaactaatcacatcaaccaccagagcactcacatttggatgctgtgaagctttgtgtcttctttccactgccttcccagtttgcatttggagtttaggttggcactgtggagtgcctccactgagtgcctcagatgagtctaggaagagctgtaccgttgggatggccacaatgattctgaccctgctctcgtcagcttggttcccattggatctctcagcccatcaagatgctttgattttggccggaaacttgcttgcagccagtgctcccaaatctctgagaagttcatgggcctctgaagaagaagccaacccagcagccaccaagcaagaggaggtctggccagccctgggggaccgggccctggtgcccatggtggagcagctcttctctcacctgctgaaggtgattaacatttgtgcccacgtcctggatgacgtggctcctggacccgcaataaaggcagccttgccttctctaacaaaccccccttctctaagtcccatccgacgaaaggggaaggagaaagaaccaggagaacaagcatctgtaccgttgagtcccaagaaaggcagtgaggccagtgcagcttctagacaatctgatacctcaggtcctgttacaacaagtaaatcctcatcactggggagtttctatcatcttccttcatacctcaaactgcatgatgtcctgaaagctacacacgctaactacaaggtcacgctggatcttcagaacagcacggaaaagtttggagggtttctccgctcagccttggatgttctttctcagatactagagctggccacactgcaggacattgggaagtgtgttgaagagatcctaggatacctgaaatcctgctttagtcgagaaccaatgatggcaactgtttgtgttcaacaattgttgaagactctctttggcacaaacttggcctcccagtttgatggcttatcttccaaccccagcaagtcacaaggccgagcacagcgccttggctcctccagtgtgaggccaggcttgtaccactactgcttcatggccccgtacacccacttcacccaggccctcgctgacgccagcctgaggaacatggtgcaggcggagcaggagaacgacacctcgggatggtttgatgtcctccagaaagtgtctacccagttgaagacaaacctcacgagtgtcacaaagaaccgtgcagataagaatgctattcataatcacattcgtttgtttgaacctcttgttataaaagctttaaaacagtacacgactacaacatgtgtgcagttacagaagcaggttttagatttgctggcgcagctggttcagttacgggttaattactgtcttctggattcagatcaggtgtttattggctttgtattgaaacagtttgaatacattgaagtgggccagttcagggaatcagaggcaatcattccaaacatctttttcttcttggtattactatcttatgaacgctatcattcaaaacagatcattggaattcctaaaatcattcagctctgtgatggcatcatggccagtggaaggaaggctgtgacacatgccataccggctctgcagcccatagtccacgacctctttgtattaagaggaacaaataaagctgatgcaggaaaagagcttgaaacccaaaaagaggtggtggtgtcaatgttactgagactcatccagtaccatcaggtgttggagatgttcattcttgtcctgcagcagtgccacaaggagaatgaagacaagtggaagcgactgtctcgacagatagctgacatcatcctcccaatgttagccaaacagcagatgcacattgactctcatgaagcccttggagtgttaaatacattatttgagattttggccccttcctccctccgtccggtagacatgcttttacggagtatgttcgtcactccaaacacaatggcgtccgtgagcactgttcaactgtggatatcgggaattctggccattttgagggttctgatttcccagtcaactgaagatattgttctttctcgtattcaggagctctccttctctccgtatttaatctcctgtacagtaattaataggttaagagatggggacagtacttcaacgctagaagaacacagtgaagggaaacaaataaagaatttgccagaagaaacattttcaaggtttctattacaactggttggtattcttttagaagacattgttacaaaacagctgaaggtggaaatgagtgagcagcaacatactttctattgccaggaactaggcacactgctaatgtgtctgatccacatcttcaagtctggaatgttccggagaatcacagcagctgccactaggctgttccgcagtgatggctgtggcggcagtttctacaccctggacagcttgaacttgcgggctcgttccatgatcaccacccacccggccctggtgctgctctggtgtcagatactgctgcttgtcaaccacaccgactaccgctggtgggcagaagtgcagcagaccccgaaaagacacagtctgtccagcacaaagttacttagtccccagatgtctggagaagaggaggattctgacttggcagccaaacttggaatgtgcaatagagaaatagtacgaagaggggctctcattctcttctgtgattatgtctgtcagaacctccatgactccgagcacttaacgtggctcattgtaaatcacattcaagatctgatcagcctttcccacgagcctccagtacaggacttcatcagtgccgttcatcggaactctgctgccagcggcctgttcatccaggcaattcagtctcgttgtgaaaacctttcaactccaaccatgctgaagaaaactcttcagtgcttggaggggatccatctcagccagtcgggagctgtgctcacgctgtatgtggacaggcttctgtgcacccctttccgtgtgctggctcgcatggtcgacatccttgcttgtcgccgggtagaaatgcttctggctgcaaatttacagagcagcatggcccagttgccaatggaagaactcaacagaatccaggaataccttcagagcagcgggctcgctcagagacaccaaaggctctattccctgctggacaggtttcgtctctccaccatgcaagactcacttagtccctctcctccagtctcttcccacccgctggacggggatgggcacgtgtcactggaaacagtgagtccggacaaagactggtacgttcatcttgtcaaatcccagtgttggaccaggtcagattctgcactgctggaaggtgcagagctggtgaatcggattcctgctgaagatatgaatgccttcatgatgaactcggagttcaacctaagcctgctagctccatgcttaagcctagggatgagtgaaatttctggtggccagaagagtgccctttttgaagcagcccgtgaggtgactctggcccgtgtgagcggcaccgtgcagcagctccctgctgtccatcatgtcttccagcccgagctgcctgcagagccggcggcctactggagcaagttgaatgatctgtttggggatgctgcactgtatcagtccctgcccactctggcccgggccctggcacagtacctggtggtggtctccaaactgcccagtcatttgcaccttcctcctgagaaagagaaggacattgtgaaattcgtggtggcaacccttgaggccctgtcctggcatttgatccatgagcagatcccgctgagtctggatctccaggcagggctggactgctgctgcctggccctgcagctgcctggcctctggagcgtggtctcctccacagagtttgtgacccacgcctgctccctcatctactgtgtgcacttcatcctggaggccgttgcagtgcagcctggagagcagcttcttagtccagaaagaaggacaaataccccaaaagccatcagcgaggaggaggaggaagtagatccaaacacacagaatcctaagtatatcactgcagcctgtgagatggtggcagaaatggtggagtctctgcagtcggtgttggccttgggtcataaaaggaatagcggcgtgccggcgtttctcacgccattgctaaggaacatcatcatcagcctggcccgcctgccccttgtcaacagctacacacgtgtgcccccactggtgtggaagcttggatggtcacccaaaccgggaggggattttggcacagcattccctgagatccccgtggagttcctccaggaaaaggaagtctttaaggagttcatctaccgcatcaacacactaggctggaccagtcgtactcagtttgaagaaacttgggccaccctccttggtgtcctggtgacgcagcccctcgtgatggagcaggaggagagcccaccagaagaagacacagagaggacccagatcaacgtcctggccgtgcaggccatcacctcactggtgctcagtgcaatgactgtgcctgtggccggcaacccagctgtaagctgcttggagcagcagccccggaacaagcctctgaaagctctcgacaccaggtttgggaggaagctgagcattatcagagggattgtggagcaagagattcaagcaatggtttcaaagagagagaatattgccacccatcatttatatcaggcatgggatcctgtcccttctctgtctccggctactacaggtgccctcatcagccacgagaagctgctgctacagatcaaccccgagcgggagctggggagcatgagctacaaactcggccaggtgtccatacactccgtgtggctggggaacagcatcacacccctgagggaggaggaatgggacgaggaagaggaggaggaggccgacgcccctgcaccttcgtcaccacccacgtctccagtcaactccaggaaacaccgggctggagttgacatccactcctgttcgcagtttttgcttgagttgtacagccgctggatcctgccgtccagctcagccaggaggaccccggccatcctgatcagtgaggtggtcagatcccttctagtggtctcagacttgttcaccgagcgcaaccagtttgagctgatgtatgtgacgctgacagaactgcgaagggtgcacccttcagaagacgagatcctcgctcagtacctggtgcctgccacctgcaaggcagctgccgtccttgggatggacaaggccgtggcggagcctgtcagccgcctgctggagagcacgctcaggagcagccacctgcccagcagggttggagccctgcacggcgtcctctatgtgctggagtgcgacctgctggacgacactgccaagcagctcatcccggtcatcagcgactatctcctctccaacctgaaagggatcgcccactgcgtgaacattcacagccagcagcacgtactggtcatgtgtgccactgcgttttacctcattgagaactatcctctggacgtagggccggaattttcagcatcaataatacagatgtgtggggtgatgctgtctggaagtgaggagtccaccccctccatcatttaccactgtgccctcagaggcctggagcgcctcctgctctctgagcagctctcccgcctggatgcagaatcgctggtcaagctgagtgtggacagagtgaacgtgcacagcccgcaccgggccatggcggctctgggcctgatgctcacctgcatgtacacaggaaaggagaaagtcagtccgggtagaacttcagaccctaatcctgcagcccccgacagcgagtcagtgattgttgctatggagcgggtatctgttctttttgataggatcaggaaaggctttccttgtgaagccagagtggtggccaggatcctgccccagtttctagacgacttcttcccaccccaggacatcatgaacaaagtcatcggagagtttctgtccaaccagcagccatacccccagttcatggccaccgtggtgtataaggtgtttcagactctgcacagcaccgggcagtcgtccatggtccgggactgggtcatgctgtccctctccaacttcacgcagagggccccggtcgccatggccacgtggagcctctcctgcttctttgtcagcgcgtccaccagcccgtgggtcgcggcgatcctcccacatgtcatcagcaggatgggcaagctggagcaggtggacgtgaaccttttctgcctggtcgccacagacttctacagacaccagatagaggaggagctcgaccgcagggccttccagtctgtgcttgaggtggttgcagccccaggaagcccatatcaccggctgctgacttgtttacgaaatgtccacaaggtcaccacctgctgagcgccatggtgggagagactgtgaggcggcagctggggccggagcctttggaagtctgcgcccttgtgccctgcctccaccgagccagcttggtccctatgggcttccgcacatgccgcgggcggccaggcaacgtgcgtgtctctgccatgtggcagaagtgctctttgtggcagtggccaggcagggagtgtctgcagtcctggtggggctgagcctgaggccttccagaaagcaggagcagctgtgctgcaccccatgtgggtgaccaggtcctttctcctgatagtcacctgctggttgttgccaggttgcagctgctcttgcatctgggccagaagtcctccctcctgcaggctggctgttggcccctctgctgtcctgcagtagaaggtgccgtgagcaggctttgggaacactggcctgggtctccctggtggggtgtgcatgccacgccccgtgtctggatgcacagatgccatggcctgtgctgggccagtggctgggggtgctagacacccggcaccattctcccttctctcttttcttctcaggatttaaaatttaattatatcagtaaagagattaattttaacgtaactctttctatgcccgtgtaaagtatgtgaatcgcaaggcctgtgctgcatgcgacagcgtccggggtggtggacagggcccccggccacgctccctctcctgtagccactggcatagccctcctgagcacccgctgacatttccgttgtacatgttcctgtttatgcattcacaaggtgactgggatgtagagaggcgttagtgggcaggtggccacagcaggactgaggacaggcccccattatcctaggggtgcgctcacctgcagcccctcctcctcgggcacagacgactgtcgttctccacccaccagtcagggacagcagcctccctgtcactcagctgagaaggccagccctccctggctgtgagcagcctccactgtgtccagagacatgggcctcccactcctgttccttgctagccctggggtggcgtctgcctaggagctggctggcaggtgttgggacctgctgctccatggatgcatgccctaagagtgtcactgagctgtgttttgtctgagcctctctcggtcaacagcaaagcttggtgtcttggcactgttagtgacagagcccagcatcccttctgcccccgttccagctgacatcttgcacggtgaccccttttagtcaggagagtgcagatctgtgctcatcggagactgccccacggccctgtcagagccgccactcctatccccaggccaggtccctggaccagcctcctgtttgcaggcccagaggagccaagtcattaaaatggaagtggattctggatggccgggctgctgctgatgtaggagctggatttgggagctctgcttgccgactggctgtgagacgaggcaggggctctgcttcctcagccctagaggcgagccaggcaaggttggcgactgtcatgtggcttggtttggtcatgcccgtcgatgttttgggtattgaatgtggtaagtggaggaaatgttggaactctgtgcaggtgctgccttgagacccccaagcttccacctgtccctctcctatgtggcagctggggagcagctgagatgtggacttgtatgctgcccacatacgtgagggggagctgaaagggagcccctcctctgagcagcctctgccaggcctgtatgaggcttttcccaccagctcccaacagaggcctcccccagccaggaccacctcgtcctcgtggcggggcagcaggagcggtagaaaggggtccgatgtttgaggaggcccttaagggaagctactgaattataacacgtaagaaaatcaccattccgtattggttgggggctcctgtttctcatcctagctttttcctggaaagcccgctagaaggtttgggaacgaggggaaagttctcagaactgttggctgctccccacccgcctcccgcctcccccgcaggttatgtcagcagctctgagacagcagtatcacaggccagatgttgttcctggctagatgtttacatttgtaagaaataacactgtgaatgtaaaacagagccattcccttggaatgcatatcgctgggctcaacatagagtttgtcttcctcttgtttacgacgtgatctaaaccagtccttagcaaggggctcagaacaccccgctctggcagtaggtgtcccccacccccaaagacctgcctgtgtgctccggagatgaatatgagctcattagtaaaaatgacttcacccacgcatatacataaagtatccatgcatgtgcatatagacacatctataattttacacacacacctctcaagacggagatgcatggcctctaagagtgcccgtgtcggttcttcctggaagttgactttccttagacccgccaggtcaagttagccgcgtgacggacatccaggcgtgggacgtggtcagggcagggctcattcattgcccactaggatcccactggcgaagatggtctccatatcagctctctgcagaagggaggaagactttatcatgttcctaaaaatctgtggcaagcacccatcgtattatccaaattttgttgcaaatgtgattaatttggttgtcaagttttgggggtgggctgtggggagattgcttttgttttcctgctggtaatatcgggaaagattttaatgaaaccagggtagaattgtttggcaatgcactgaagcgtgtttctttcccaaaatgtgcctcccttccgctgcgggcccagctgagtctatgtaggtgatgtttccagctgccaagtgctctttgttactgtccaccctcatttctgccagcgcatgtgtcctttcaaggggaaaatgtgaagctgaaccccctccagacacccagaatgtagcatctgagaaggccctgtgccctaaaggacacccctcgcccccatcttcatggagggggtcatttcagagccctcggagccaatgaacagctcctcctcttggagctgagatgagccccacgtggagctcgggacggatagtagacagcaataactcggtgtgtggccgcctggcaggtggaacttcctcccgttgcggggtggagtgaggttagttctgtgtgtctggtgggtggagtcaggcttctcttgctacctgtgagcatccttcccagcagacatcctcatcgggctttgtccctcccccgcttcctccctctgcggggaggacccgggaccacagctgctggccagggtagacttggagctgtcctccagaggggtcacgtgtaggagtgagaagaaggaagatcttgagagctgctgagggaccttggagagctcaggatggctcagacgaggacactcgcttgccgggcctgggcctcctgggaaggagggagctgctcagaatgccgcatgacaactgaaggcaacctggaaggttcaggggccgctcttcccccatgtgcctgtcacgctctggtgcagtcaaaggaacgccttcccctcagttgtttctaagagcagagtctcccgctgcaatctgggtggtaactgccagccttggaggatcgtggccaacgtggacctgcctacggagggtgggctctgacccaagtggggcctccttgtccaggtctcactgctttgcaccgtggtcagagggactgtcagctgagcttgagctcccctggagccagcagggctgtgatgggcgagtcccggagccccacccagacctgaatgcttctgagagcaaagggaaggactgacgagagatgtatatttaattttttaactgctgcaaacattgtacatccaaattaaaggaaaaaaatggaaaccatca

SEQ ID NO: 12766 - DNA, 14755 bp, Homo sapiens
gaggccatgtcgggtgaggacgctgaggtccgggcagtctctgaagatgtctccaatggaagcagtggctcgcccagccctggggacacactgccctggaaccttgggaaaacgcagcggagccggcgcagcgggggtggcgctgggagcaacgggagtgtcctggacccagctgagcgggcggtcattcgcatcgcagatgagcgggatcgtgtgcagaagaaaaccttcaccaagtgggtcaacaagcacctcatcaaggcccagaggcacatcagtgacctgtatgaagacctccgcgatggccacaacctcatctccctgctggaggtcctctcgggggacagcctgccccgggagaaggggaggatgcgtttccacaagctgcagaatgtccagattgccctggactacctccggcaccgccaggtgaagctggtgaacatcaggaatgatgacatcgctgacggcaaccccaagctgacccttggcctcatctggacaatcattctgcacttccagatctcagatatccaggtgagtgggcagtcggaggacatgacggccaaggagaagctgctgctgtggtcgcagcgaatggtggaggggtaccagggcctgcgatgcgacaacttcacctccagctggagagacggccgcctcttcaatgccatcatccaccggcacaagcccctgctcatcgacatgaacaaggtgtaccggcagaccaacctggagaacctggaccaggccttctctgtggcggagcgggacctgggagtgacgcggctcctggaccctgaggacgtggatgtccctcagcccgacgagaagtccatcatcacctacgtctcgtcgctgtatgacgccatgccccgcgtgccggacgtgcaggatggggtgagggccaacgagctgcagctgcgctggcaggagtaccgggagctggtgctgctgctgcttcagtggatgcgacaccacacggccgcctttgaggaacgcaggttcccctccagcttcgaggagattgagatcctgtggtctcagttcctgaagtttaaggagatggagctaccagccaaggaggccgacaagaacaggtccaagggcatctaccaatccctggagggagcggtgcaagcaggccagctcaaggtgccccctggctaccacccgctggatgtggagaaggagtggggcaagctgcacgtggccatcctggagcgggagaagcagctccgcagcgagtttgagaggctggagtgtcttcagcgcatcgtgaccaagctgcagatggaggcggggctgtgtgaggagcagctgaaccaggccgacgccctgctgcagtcggatgtccggctgctggctgcaggcaaagtgccacagcgggcgggggaggtggaacgggacttggacaaggcggatagcatgatccggctgctcttcaacgacgtgcagaccctcaaggatggacggcacccgcagggcgagcagatgtaccgcagggtgtaccgtctgcacgagcgcctggtagccatccgcaccgagtacaacctacggctgaaggcaggcgtggcggcccctgcaacccaggtggcccaggtgactctgcagagtgtgcagaggcgccccgagctggaggactccactctgcgctacctgcaggacctgctggcctgggtggaggagaaccagcaccgtgtggatggcgctgagtggggtgtggacctgcccagcgtggaggcgcagctgggcagccaccgaggcctgcaccagtccatcgaagaattccgggccaagatcgagcgggcacggagtgacgagggccagctctcccccgccacccggggtgcctaccgtgactgcctgggtcggctggacctgcagtacgccaagctgctgaactcctccaaggcccgcctcaggtccctggagagcttgcacagctttgtggcagccgccactaaggagctaatgtggctgaatgagaaggaggaggaggaggtgggcttcgactggagcgaccgcaacaccaacatgaccgccaagaaggagagctactcggcgctgatgcgggagctggagctgaaggagaagaagatcaaggagctccaaaatgctggggaccggctgctgcgggaggaccacccggcccggcccacggtggagtccttccaggcggccctgcagacgcagtggagctggatgctacagctgtgctgctgtatcgaggcacacctgaaggagaacgctgcctactttcagttcttctcagatgtgcgggaggccgaggggcagttgcagaagctgcaggaggcactgcgtaggaaatacagttgtgatcgctccgccaccgtcacccggctggaggacctgctgcaggatgcccaggacgagaaggaacagctgaacgagtacaagggccacctctcaggcctggccaagcgggccaaggccgtcgtgcagctgaagccccgccacccagcccaccccatgcggggccgcctgcccctgctggccgtgtgcgactataagcaggtggaggtgactgtgcacaagggtgacgagtgccagctggtgggccctgcacagccgtcccactggaaggtgctcagcagctccggcagcgaggccgccgtgccctccgtgtgcttcctggtgcccccgcccaaccaggaggcccaggaggccgtcaccaggctggaggcccagcaccaggccctggtcacgctgtggcaccagttgcacgtggacatgaagagccttctggcctggcagagccttcgccgcgacgtgcagctcatccgctcctggtccctggccacgttccgcaccctgaagccagaggagcagcgccaagccctgcacagcctggagctgcactaccaggccttcctgcgggacagccaggacgcgggcggcttcggacccgaggaccggctgatggctgagcgcgagtacggctcctgcagccaccactaccagcagctgctgcagagcctggaacagggtgcacaggaagagtctcgctgccagcgctgcatctccgagctcaaagacatccggctgcagctggaggcctgtgagacgcgcaccgtgcaccgcctgcggctgccgctggacaaagagccggcacgggagtgtgcccagcgcatcgccgagcagcagaaggcacaggcagaggtggaggggctgggcaagggggtcgcccggctctctgccgaggccgagaaggtcttggccctaccagagccatcgcctgcggcccccacgctgcgctcggagctggagctgacgctgggcaagctggagcaggtccgcagcctgtctgccatctacctggagaagctcaagaccatcagcctggtgatccgcggcacgcagggggccgaggaggtgctcagggcccacgaggagcagctcaaggaggcccaggccgtgccggccaccctcccggagctcgaggccaccaaggcctctctgaagaagctgcgggcccaggccgaggcacagcagcccacgttcgacgccctgcgggatgagctgcggggggcacaggaggtgggggagcgactgcagcagcggcacggggagcgggacgtggaggtggagcgctggcgggagcgggtcgcccagttgcttgagcgctggcaggctgtgctggcccagaccgacgtgcggcagcgcgagctcgagcaactgggccgccagctgcgttactaccgcgagagtgcagaccccttgggcgcctggctgcaggacgccaggcggcggcaggagcagatccaggccatgccgctggccgacagccaggctgtgcgggagcagctgcggcaggagcaggccctgctggaggagatcgagcgccacggcgagaaggtcgaggagtgccagaggtttgcgaaacagtacatcaacgccatcaaggactatgaactccagctggtgacgtacaaggcgcagcttgagccggtggcctccccggccaagaagcccaaggtccagtcgggatcagagagtgtcatccaggagtacgtggacctgcgtacgcactacagcgagctgaccacactgacgagccagtacatcaagttcatcagcgagactctgcggcgcatggaggaggaggagaggctggctgagcagcagcgggcagaggagcgcgagcggctggccgaggtggaggccgcgctggagaagcagcggcagctggccgaggcgcacgcccaggcaaaggcacaggcggagcgggaggcgaaggagctgcagcagcgcatgcaggaggaggtggtgcggcgggaggaggcggcggtggacgcgcagcagcagaagcgcagcattcaggaggagctgcagcagctgcggcagagctcggaggcggagatccaggccaaggcccggcaggcagaggcggctgagcgcagccggctgcgcatcgaggaggagatccgcgtggtgcgcctgcagttggaggccaccgagcgccagcgtggcggggctgagggggagctgcaggcactgcgtgcacgggcggaggaggctgaggcacaaaagcgacaggcgcaggaggaggccgagcgcttgcggaggcaggtgcaggacgagagccagcgtaagcggcaggcggaggtggagctggcctcgcgcgtgaaggccgaggccgaggcggcgcgcgagaagcagcgggccctgcaggccctggaggagctgcggctgcaggcggaggaggcggagcggcgcctgcggcaggccgaggtggagcgagcgcggcaggtacaggtggccctggagacggcgcagcgcagtgcagaggcggagctgcagagcaaacgcgcctccttcgccgagaagacggcacagctggagcgctccctgcaggaggaacacgtggctgtggcacagctgcgggaggaggctgagcggcgggcacagcagcaggccgaggccgagcgggcgcgcgaggaggcagagcgggagctggagcgctggcagctcaaggccaacgaggcgctacggctgcggctgcaggcggaggaggtggcgcagcagaagagcctggcgcaggccgaggctgagaagcagaaggaggaggcggagcgcgaggcgcggcggcgcggcaaggcggaggagcaggccgtccggcagcgggagctggctgaacaagagctggagaagcagcggcagctggcggaaggcaccgcgcagcagcgcctggccgcggagcaggagttgatccggctgcgggccgagacggagcagggggagcagcagcggcagctgctggaggaggagctggcccggctgcagcgtgaggcggctgcagccacgcagaaacggcaggagctggaagccgagctggccaaggtgcgggccgagatggaggtgctgctggccagcaaggcgagggctgaggaggagtcgcgctccaccagcgagaagtccaagcagaggctggaggccgaggccggccggttccgcgagctggccgaggaggccgcccgcctgcgtgccctggcggaagaggccaagcggcagcggcagctggccgaggaagacgcggcgcggcagcgggccgaggcggagcgggtgcttgcggagaagctggccgccatcggcgaggccacgcggctcaagacggaggcggagatcgcgctcaaggagaaggaggcggagaacgagcgcctgcggcggctggcggaggacgaggccttccagcggcggcggctggaggagcaggccgcgcaacacaaggctgacatcgaggagcgcctggcccagctgcgcaaggcatcggacagcgagctggagcggcagaaggggctggtggaggacacgctgaggcagcggcggcaggtggaggaggagatcctggcgctgaaggcgagcttcgagaaggcggccgctggcaaggcggagctggagctggagctgggacgcatccgcagcaacgcggaggacacgctgcgcagcaaggagcaggccgagctggaggctgcgaggcagcggcagctggcggcggaggaggagcggcggcgccgtgaggctgaggagcgcgtgcagaagagcctggcggccgaggaggaggccgcacggcagcggaaggcggcgctggaggaagtcgagcggctgaaagccaaggtggaggaggcgcggcgcctgcgggagcgagcggagcaggagtcggcgcggcagctgcagctggcccaggaggccgcccagaagcggctgcaggcggaagagaaggcacacgccttcgcggtgcagcagaaggagcaggagctacagcagacgctgcagcaggagcagagcgtgctggaccagctgcgcggcgaggcggaggcggcccggcgggcggctgaggaggcggaggaggcccgggtgcaggcggagcgtgaggcggcgcagtcccggcggcaggtggaagaggccgagcggctgaagcagtcggcagaggagcaggcacaggcccgggctcaggcacaggcggctgcagagaagctgcgcaaggaggccgagcaagaggcggcgcggcgggcacaggcggagcaggcggccctgcggcagaagcaggcagctgacgcggagatggagaagcataagaaattcgccgagcagacgctgcggcagaaggcgcaggtggagcaggagctgacaacactgcggctgcagctggaggagaccgaccaccagaagaacctgctggacgaggagctgcagcggctgaaggcggaggccacggaggccgcacgccagcgcagccaggtggaggaggagctcttctcggtgcgcgtgcagatggaggagctgagcaagctcaaggcacgcatcgaggctgagaaccgcgcactcatcttgcgtgacaaggacaatacgcagcgcttcctgcaggaggaggctgagaagatgaagcaggtggcggaggaggccgcgcggctgagtgtggcggcccaagaggctgcgcgactgcggcagctggcagaggaggacctggcacagcagcgggccttggcagagaagatgctcaaggagaagatgcaggcggtgcaggaggccacgcgactcaaggctgaggcggaactgctgcagcagcagaaggagcttgcgcaggagcaggcgcggcggctgcaggaggacaaggagcagatggcgcagcagctggcggaggagacgcagggcttccagcggacgctggaggccgagcggcagcggcagctggagatgagcgctgaggctgagcgcctcaagctgcgtgtggccgagatgagccgagcccaggcccgcgctgaggaggacgcccagcgcttccggaagcaggcggaggagatcggtgagaagctgcaccgcacggagctcgccacccaggagaaggtgaccctggtgcagacactggagatccagcgacagcagagtgaccatgatgccgagcgcctgcgggaggccatcgctgagctggagcgtgagaaggagaagctccaacaggaggccaaactgctgcagctcaagtctgaggagatgcagacggtgcagcaggagcagctgctgcaggagacgcaggccctgcagcaaagcttcctctctgaaaaggacagcctgctacagcgggagcgcttcatcgagcaggagaaggccaagctggagcagctcttccaggacgaggtggccaaggcacagcagctgcgtgaggagcagcagcggcagcagcagcagatggagcaggaacggcagcggctggtggccagcatggaggaggcgcggcggcggcagcatgaggccgaggagggcgtgcggcgcaagcaggaggagctgcagcagctggagcagcagcggcggcagcaggaggagctgctggctgaggagaaccagaggctgcgtgagcagctgcagctcctggaggagcagcaccgggccgcgctggcgcactcagaggaggtcactgcctcgcaggtggctgccacaaagaccctgcccaatggccgggatgcacttgatggccccgcggcagaggcagagccggagcacagcttcgatggcctgcggcggaaggtgtcagctcagaggctgcaggaggccggcatcctgagtgcggaggagctgcagcggttggcgcagggccacaccacggtggacgagctcgcacggcgggaagacgtgcgccactacctgcagggccgcagcagtatcgcagggctgttgctgaaggccaccaatgagaagctgagtgtttacgccgccctgcagaggcagctgctgagtcccggcacggccctcatcctgctggaggcgcaggcggcctcaggcttcctgctggaccctgtgcggaaccggcggctgaccgtcaacgaggctgtgaaggagggtgtggtgggccccgagctgcaccacaagctgctgtcggccgagcgcgccgtcactggctacaaggacccctacactggccagcagatctctctcttccaagccatgcagaagggcctcatcgtccgggagcacggcatccgcctgctggaggcccagatcgccacgggcggcgttatcgaccccgtgcacagccaccgcgtgcccgtggacgtggcctaccggcgcggctacttcgacgaggagatgaaccgcgtcctggcggaccccagcgacgacaccaagggcttctttgaccccaacacgcacgagaacctcacgtacctgcagctactggagcgctgcgtggaggaccccgagacgggcctgtgccttctgccactcacggataaggctgccaagggcggggagctggtctacactgactccgaggcccgggacgtctttgagaaggccaccgtgtctgcgccgttcggcaagttccagggcaagacggtgaccatttgggagatcatcaactcggaatacttcacggcagagcagcggcgggacctgctgcggcagttccgcacgggccggatcacagtggagaagatcatcaagatcatcatcacggtggtggaggagcaggagcagaagggccggctttgctttgagggcctgcgcagcctggtgccagccgccgagctgctggagagcagggtcatcgaccgcgagctctaccagcagctgcagcgaggtgagcgctctgtgcgagacgtagccgaggtggacactgtgcggcgggctctccggggtgccaacgtcatcgcgggtgtatggctggaggaggcggggcagaagctgagtatctacaatgccctgaagaaagacctgctgccatccgacatggccgtggccctgttggaagcccaggccggcaccgggcacatcatcgaccccgccaccagcgcccggctgaccgtggacgaggcagtgcgtgctggcctggtgggccccgagtttcatgagaagctgctatcagccgagaaggctgtgacagggtacagggacccctacacagggcagagcgtctccctgttccaggccctgaagaagggcctcattccccgggagcagggcctgcgcctgttggacgcccagctgtccacgggcggcatcgtggaccccagcaagagccaccgcgtgcccctggatgtcgcctgcgcccgaggctgcctggatgaggagaccagcagggccctgtcggcaccaagggccgacgccaaggcctacagtgaccccagcacaggggagccggccacctacggcgagctccagcagcggtgccggcccgaccagctgaccgggctgagcctgctgccgctctcagaaaaggctgctcgggcccggcaggaggagctctactcagagctgcaggcccgtgagacctttgaaaagaccccggttgaggtccccgtgggtggcttcaagggcaggacggtgacggtgtgggagctcatcagctctgagtacttcactgcggagcagcggcaggagctgttgcgtcagttccgcacgggcaaggtcaccgtggagaaggtcatcaagattctcattaccatcgtggaggaggtggagaccctgcggcaggagaggctgtccttcagcggcctccgtgcccctgtgccagccagcgagctcctggcttccggggtcctcagcagagcccagtttgagcagctcaaggacggcaagacgacggtcaaggacctttcggagctgggctccgtgcggacgctgctgcagggcagtggctgcctcgccggcatctacctggaggacaccaaggagaaggtgtccatctacgaggccatgcgccggggcctgctgagagccacaacggctgcgctcctgctggaggcgcaggcggccactggcttcctggtggaccccgtgcggaaccagcgcctgtatgtccacgaggccgtgaaggcgggcgtggtgggccccgagcttcacgagcagctgctgtctgccgagaaggccgtcaccggctacagagacccctactcgggcagcaccatctccctcttccaggccatgcagaagggcctggttctccggcagcacggcatccgcctgctggaggcccagatcgccacgggcggcatcatcgaccccgtgcacagccaccgcgtgcctgtggacgtggcctaccagcgcggctacttcagtgaggagatgaaccgcgtcctggcggaccccagcgacgacaccaagggcttctttgaccccaacacgcatgagaacctcacgtacaggcagctgctggagcggtgcgtggaggaccccgagacgggcttgcgccttctgccactgaaaggggcggagaaggctgaggtggtggagaccacgcaggtgtacactgaggaggagacaagaagggcatttgaagagacacagatcgacattcccggcggcggcagccacggcggctccaccatgtccctgtgggaggtgatgcagtcggacctgatccccgaggagcagcgggcccagctgatggctgacttccaggccggccgggtgaccaaggaacgcatgatcatcatcatcatcgagatcattgagaagacagagatcatccgccagcagggtctggcctcctacgactacgtgcgccgccgcctcacggctgaggacctgttcgaggctcggatcatctctctcgagacctacaacctgctccgggagggcaccaggagcctccgtgaggctctcgaggcggagtccgcctggtgctacctctatggcacgggctccgtggctggtgtctacctgcccggttccaggcagacactgagcatctaccaggctctcaagaaagggctgctgagtgccgaggtggcccgcctgctgctggaggcacaggcagccacaggcttcctgctggacccggtgaagggggagcggctgactgtggatgaggctgtgcggaagggcctcgtggggcccgagctgcacgaccgcctgctctcggctgagcgggcggtcaccggctaccgtgacccctacaccgagcagaccatctcgctcttccaggccatgaagaaggagctgatccctactgaggaggccctgcggctgctggatgcccagctggccaccggcggcatcgtggacccccgcctgggcttccaccttcccctggaggtggcttaccagcgtggctacctcaacaaggacacgcacgaccagctgtcagagcccagcgaggtgcgcagctacgtggacccgtccaccgacgagcgcctcagctacacgcagctgctcaggcggtgccgtcgtgacgacggcaccggccagctgctcctgccactgtcggacgcccgcaagctgaccttccgtggcctgcggaagcagatcaccatggaggagctggtgcgctcgcaggtcatggacgaggccacggcgctgcagctgcgggagggcctgacctccatcgaggaggtcaccaagaacttgcagaagttcctggaaggcaccagctgcatcgctggtgtcttcgtggacgccaccaaggaacggctctcggtgtaccaggccatgaagaagggcatcatccgccccggcacagcctttgagctcctggaggcgcaggcggccaccggttacgtcatcgaccccatcaagggactgaagctgacggtggaggaggctgtgcgtatgggcattgtgggccccgagttcaaggacaagctgctgtcggccgagcgcgccgtcactgggtacaaggacccctactctgggaagctcatctccctcttccaggccatgaagaagggcctgatcctgaaggaccatggcatccgcctgctggaggcccagatcgccacgggcggcatcatcgaccctgaggagagccaccggctgcccgtggaggtggcctacaagcgcggcctcttcgatgaggagatgaacgagatcctgaccgacccctcggacgacaccaagggcttctttgaccctaacacggaggagaacctcacctacctgcagctgatggagcgttgtatcactgacccccagacgggcctgtgtctcttgccgctgaaggagaagaagcgggagcggaagacgtcctccaagtcctccgtgcgcaagcgccgagtggtcatcgtggaccccgagacgggcaaggagatgtcagtgtacgaggcctaccgcaagggcctgattgaccaccagacgtacctggagctgtccgagcaggagtgcgagtgggaggagatcaccatctcctcctcggacggcgtggtcaagtccatgatcatcgaccgccgctccgggcgccagtacgacatcgatgatgccatcgccaagaacctcatcgaccgctcggcactggaccagtaccgcgccggcacgctctccatcaccgagttcgccgacatgctctcgggcaacgccggtggtttccgctcccgttcctcctcggtgggatcctcctcctcctaccccatcagccccgccgtctccaggacccagctggcctcctggtcagaccccactgaggagacgggccccgtggctggcatcctggacacggagacgctggagaaggtgtccatcaccgaggccatgcaccggaacctggtggataacatcacggggcagcggctgctggaggcgcaggcctgcaccgggggcatcatcgaccccagcaccggtgagcgcttccctgtcaccgacgccgtcaacaagggcctggtggacaagatcatggtggaccgcatcaacctggcccagaaggccttctgcggcttcgaggacccacgcaccaagaccaagatgtcggccgcccaggccctgaagaagggctggctctactacgaggccggccagcgcttcctggaggtgcagtacctgaccggcggcttgatcgagcccgacacgccgggccgcgtgcccctggacgaggccctgcagcgcggcacggtggacgcccgcaccgcacagaagctgcgtgacgtgggcgcctactccaagtacctcacctgccctaagaccaagctcaagatctcctataaggacgcgctggaccgcagcatggtggaggagggcacggggctgcggctgctggaggctgccgcgcagtccaccaagggctactacagcccctacagcgtcagcggctccggctctaccgctggctcccgcaccggctcgcgcaccggctcccgggccggctcccgccgcggcagctttgacgccaccggctccggcttctccatgaccttctcttcatcctcctactcctcctcgggctacggccgccgctacgcctcggggtcctcggcctccctggggggccctgagtctgccgtggcctgaggctgcctgcgcccaccccgctctgcatgcggcccagcccggctcccaccgaggcgcgggggccgttttcaacgcttaaaggtgtcttcctcccaagtggtgcctaaagtttaaccaaaaagaccagactaatatattaatatatatctgctgtccagacagcctgtatcttgggggacagggctggcccagccctgctggccgcctcaccccctcgggtctcctcactcccttctacctgccactcacacagccaggtgccttggagggtcccaagctgggccccagcccaccctcctgtcttcccagggtagcccgcctgccagtcctagctgcacagggcagctgggcccaaccctgtctgtagagggccctggtgtttctagcactggcctgcacggtgggccttgctggggacggggggccccagtcagcctctctcccagtctacccagagaagccccttccccatgggaagacgaggccctcgggcccagcccccacagtgctgtctgatctgtgctttccagctcaccccccacactcactcctgagacccctggcctccggcgtcagcctccagcctctgttcccctagtaagtgccttccatgtcggcctctaaccccaggccccgaggacccagacccagtggggaggcggacgttccagccggcatggctgggaactgcagacctgtcctcctggtgggtccaggggcccctccagcttgtggagccccacactggggtgccgcctgcccgtctctctcccatggagccccagccccctttgggcccagggacaccagccaggctctgtgctgaccctcctgttgcacccagccctggtctcagcagcgaccacccctgcctccaccctctgagctttgcatgttccactaaccccgggcgggtggcaggtggaggtgtcaggctgctggcgcctctgcaagggcagaacactaacctgaccgtgggcggggccttgcggtatccgcccccaataaaagcaattccaacctt

SEQ ID NO: 12767 - DNA, 2882 bp, Homo sapiens
gtgcagcctgagaggaaacaaagtgctgcgagcaggagacggcggcggcgcgaaccctgctgggcctccagtcaccctcgtcttgcattttcccgcgtgcgtgtgtgagtgggtgtgtgtgttttcttacaaagggtatttcgcgatcgatcgattgattcgtagttcccccccgcgcgcctttgccctttgtgctgtaatcgagctcccgccatcccaggtgcttctccgttcctctaaacgccagcgtctggacgtgagcgcaggtcgccggtttgtgccttcggtccccgcttcgccccctgccgtcccctccttatcacggtcccgctcgcggcctcgccgccccgctgtctccgccgcccgccatggcgactgcgacccccgtgccgccgcggatgggcagccgcgctggcggccccaccacgccgctgagccccacgcgcctgtcgcggctccaggagaaggaggagctgcgcgagctcaatgaccggctggcggtgtacatcgacaaggtgcgcagcctggagacggagaacagcgcgctgcagctgcaggtgacggagcgcgaggaggtgcgcggccgtgagctcaccggcctcaaggcgctctacgagaccgagctggccgacgcgcgacgcgcgctcgacgacacggcccgcgagcgcgccaagctgcagatcgagctgggcaagtgcaaggcggaacacgaccagctgctcctcaactatgctaagaaggaatctgatcttaatggcgcccagatcaagcttcgagaatatgaagcagcactgaattcgaaagatgcagctcttgctactgcacttggtgacaaaaaaagtttagagggagatttggaggatctgaaggatcagattgcccagttggaagcctccttagctgcagccaaaaaacagttagcagatgaaactttacttaaagtagatttggagaatcgttgtcagagccttactgaggacttggagtttcgcaaaagcatgtatgaagaggagattaacgagaccagaaggaagcatgaaacgcgcttggtagaggtggattctgggcgtcaaattgagtatgagtacaagctggcgcaagcccttcatgagatgagagagcaacatgatgcccaagtgaggctgtataaggaggagctggagcagacttaccatgccaaacttgagaatgccagactgtcatcagagatgaatacttctactgtcaacagtgccagggaagaactgatggaaagccgcatgagaattgagagcctttcatcccagctttctaatctacagaaagagtctagagcatgtttggaaaggattcaagaattagaggacttgcttgctaaagaaaaagacaactctcgtcgcatgctgacagacaaagagagagagatggcggaaataagggatcaaatgcagcaacagctgaatgactatgaacagcttcttgatgtaaagttagccctggacatggaaatcagtgcttacaggaaactcttagaaggcgaagaagagaggttgaagctgtctccaagcccttcttcccgtgtgacagtatcccgagcatcctcaagtcgtagtgtacgtacaactagaggaaagcggaagagggttgatgtggaagaatcagaggcgagtagtagtgttagcatctctcattccgcctcagccactggaaatgtttgcatcgaagaaattgatgttgatgggaaatttatccgcttgaagaacacttctgaacaggatcaaccaatgggaggctgggagatgatcagaaaaattggagacacatcagtcagttataaatatacctcaagatatgtgctgaaggcaggccagactgttacaatttgggctgcaaacgctggtgtcacagccagccccccaactgacctcatctggaagaaccagaactcgtggggcactggcgaagatgtgaaggttatattgaaaaattctcagggagaggaggttgctcaaagaagtacagtctttaaaacaaccatacctgaagaagaggaggaggaggaagaagcagctggagtggttgttgaggaagaacttttccaccagcagggaaccccaagagcatccaatagaagctgtgcaattatgtaaaattttcaactgtcttcctcaaaataaagaagtatggtaatccttacctgtatacagtgcagagccttctcagaagcacagaatatttttatatttcctttatgtgaatttttaagctgcaaatctgatggccttaatttcctttttgacactgaaagttttgtaaaagaaatcatgtccatacactttgttgcaagatgtgaattattgacactgaacttaataactgtgtactgttcggaaggggttcctcaaattttttgactttttttgtatgtgtgttttttctttttttttaagttcttatgaggaggggagggtaaataaaccactgtgcgtcttggtgtaatttgaagattgccccatctagactagcaatctcttcattattctctgctatatataaaacggtgctgtgagggaggggaaaagcatttttcaatatattgaacttttgtactgaatttttttgtaataagcaatcaaggttataattttttttaaaatagaaattttgtaagaaggcaatattaacctaatcaccatgtaagcactctggatgatggattccacaaaacttggttttatggttacttcttctcttagattcttaattcatgaggagggtgggggagggaggtggagggagggaagggtttctctattaaaatgcattcgttgtgttttttaagatagtgtaacttgcttaaatttcttatgtgacattaacaaataaaaaagctcttttaatat

SEQ ID NO: 12768 - DNA, 2627 bp, Homo sapiens
ttccattggaaactgattgggcagatttgaaaattaagctttcacaatcacaatttttatgagagttcattcagttttggagaagtcgaggaaagaattgggaattgaaattttgatgtggcctgataggatcaggtggggcttttgataggaagtgagtgttttgggttgtttcttgactggattatgatgcggaatacagcgggtagagggccgattaagttttagtcattagtgtagcttttcagtatacacgccttttcattttcagtccctttcagaagaaaagaccacaggcatcagaaatcaatcaacttgctaatttatgccagattccactggagatctgccttcccaagactttactgactggtgaagaacaggaaatgaacaattcccagggaagagtgaccttcgaggatgtcactgtgaacttcacccagggggagtggcagcggctgaatcccgaacagagaaacttgtacagggatgtgatgctggagaattacagcaaccttgtctctgtgggacaaggggaaaccaccaaacccgatgtgatcttgaggttggaacaaggaaaggagccatggttggaggaagaggaagtgctgggaagtggccgtgcagaaaaaaatggggacattggagggcagatttggaagccaaaggatgtgaaagagagtctcgcaagagaagtcccatcaatcaataaggaaacgctgactacgcagaaaggtgtagaatgtgacggatctaagaaaatacttccactgggcatagatgatgtatcttccttgcaacactatgtacaaaataattctcacgatgataatggatacagaaaattagttggcaataatccatccaaatttgtaggacaacaactgaaatgtaatgcctgtagaaagttattcagttcaaagtcacgccttcaaagtcacctgaggaggcatgcctgtcaaaaaccctttgaatgtcatagctgtggaagagcattcggggagaagtggaagcttgataaacatcagaaaactcacgcagaggaaaggccctataaatgtgagaactgtggaaatgcctacaagcagaagtcaaatctctttcaacatcagaaaatgcatactaaagagaaaccctatcagtgtaagacatgtggaaaagccttttcctggaaatcatcctgcattaatcatgagaaaattcataatgccaagaaatcctatcagtgtaatgaatgtgagaaatccttcaggcagaactcaaccctcattcaacataaaaaagttcacactggacaaaaaccctttcaatgtacggactgtggaaaggctttcatttacaagtcagatcttgtgaaacaccagagaatacacacgggagagaaaccctataaatgtagcatatgtgagaaggccttttcccagaaatccaatgtcatcgatcatgagaaaattcacactgggaagagagcttatgagtgtgatctatgtggaaatacctttatccagaagaaaaacctcattcaacataaaaaaatccatactggggaaaagccctatgaatgtaacagatgtggaaaagccttctttcagaagtcaaaccttcatagccatcagaaaactcatagcggagagaggacctatagatgtagtgaatgtggaaaaaccttcatccggaaattaaaccttagtttgcataaaaaaacccatactggacaaaaaccttatggatgttctgaatgcggtaaagccttcgctgacaggtcataccttgttaggcaccagaaaagaattcactccagataggagccccatgcacttaaaaaaacatgggaagatatggttgcctggaattgtcaccccagaattccatgttgaaatggcctctaatttggaggctatttttgaaggtagcgaggacttattatcacagtatcctttgaaaacccattcggcatactcactcagcaaatgtttattaagtataaatatttattagatgccttttgtgtaccaggaactcttaaacactgaagatgtagcaataaaccaaatgtgctaaaaccctgatggagttttattccagtgaataatgaccagtggtatccatatctttaaaaacgtttaaaagactatacttttggccaggcgtggtggctcaaatgcctgtaatcccagtactttgggaggctgaggtgggcgcatcacctgaggtcaggagttcgagaccagcatgaccaacatggtgaaaccctgtctctaccaaaaatacaaaaattagccaggcatagttgtgggcacctgtaatcccagctacccgggaggctgaggcaggagaattgcttgaacctgggaggtagaggttgcagtgagccaatattgcaccattgcactcctgcctgggcaacaagagcaaaatttcatctcaaaaataagataaaataaaataaacaaataagacagcactttatacttttagggatgatttctataattcatgagtggagaggtttctctagaggtgtaggggactggaaaccacatccaggaagtacagctttctctcctgagcatgaaggtatcttggcatttcttcactgcaattgccatttgccttttttgtttttc

SEQ ID NO: 12769 - DNA, 974 bp, Homo sapiens
atttctgaagtgagactaggaagagaagatgaacaattccctggattatctggcctaccctgttatcgtctctaatcacaggcaaagcacaaccttcagaaagaaactggactttggccactacgtatctcacaagaatagaatacaaatagcgaagcctactgttgataccaaacctccagtggcgcacacaaatcacattttaaaattgagcaaactacagggtgaacaaaagaaaatcaacaaaatcgagtatgaaaacaagcaactgtgtcagaaaatcgcaaatgcccatcgcggccctgccaaggtggattgctggaatgaatatttttccaagagcttaaacagagaaacaaggaaccgcgagctagtgagaatcaccatggaaaaccagggcattctgaagaggcttgttgatcgcaaaccccactatgaccgcagggcatctgagatagactggcagaattcaaggcgctatatcagaaataccacgagatatcttctctcccaaaatgaataggttactcaccatggaaaagatacaagagaaggccctaggatttcttggctgctcaggatctcaagacactcccgactggctgaatgctccatcttcagatgcttcaataaagcttggaacataaaatgcgtaagttacatttaggggacccaaaggctttatgttctcattccaaaatggggcaggcagaaggaaagatgcaatgagcatttttatttggggctatgaaaagaagttttaacgagagagagagagagaaatctgagagaactctttaaaacatacaccatcatcaccatcccgtggaagaagaaaagctggggtgagatcatccagccacaagtacagcactgtcaaaatggaaaacgaaatcacatgacaacatcaaggttcagaaaacacaaggaacaaatgccattagttcctctgtgaatacacacgatcggaaaag

SEQ ID NO: 12770 - DNA, 3649 bp, Homo sapiens
cctgtaaggcggggagacaatgagtaaactctccttccgagcgcgggcgctggacgccgccaagccgctgcctatctaccgcggcaaggacatgcctgatctcaacgactgcgtctccatcaaccgggccgtgccccagatgcccaccgggatggagaaggaggaggaatcggaacatcatttacagcgagcaatttcagcacagcaagtgtttagagaaaaaaaagagagtatggtcattcctgttcctgaggcagagagcaacgtcaactattacaatcgcttgtacaaaggagagtttaaacagccaaaacagttcattcatattcagccttttaatctagacaacgagcaaccagattatgatatggattcagaagatgagactttattaaatagacttaacagaaagatggaaattaagcctttgcaatttgaaattatgattgacagacttgaaaaagccagttctaatcagcttgtaacacttcaagaagcaaaactgctgctaaacgaagatgattaccttattaaagctgtatatgactactgggtgagaaaacgtaaaaactgcagggggccatccctcattcctcagataaaacaagagaaaagagatggctctaccaacaatgacccttatgttgcctttcggagaagaacagagaaaatgcaaactcgaaagaatcgtaagaatgatgaagcctcttatgaaaagatgttgaaactgagacgagaatttagtagagccataacaattttggaaatgattaagagaagagagaaaacaaaacgagaattattgcacttaaccttagaagttgtggagaaaagataccatttgggagactatggtggtgaaatccttaatgaagtaaaaatcagtagatcagaaaaagagttatatgccactccagcaactcttcataatggaaatcatcacaaagttcaagaatgtaaaactaagcaccctcatcatttgtctttgaaagaagaggcttctgatgtggttcgtcaaaagaagaagtacccaaagaagcctaaagcagaggctttgataacatctcagcaacccactcctgagacattgcctgtgatcaataagagtgacattaagcaatatgattttcacagctcagatgaagatgaatttccacaggtattgtccccagtatcagaaccggaagaagaaaatgatcctgatggtccctgtgctttcagaaggcgggcaggatgccagtattatgctcctcgtttggaccaagctaaccattcatgtgaaaattcagaattggcagatttggataagttgaggtataggcattgccttacaacacttacagtcccaagaagatgtataggatttgcaaggaggcgaattggcagaggtggaagggtcataatggaccgaatatccacagaacatgacccagtcctgaaacagatagaccctgaaatgctgaatagtttttcaagctcttcccaaactatagacttttcttctaatttctctcggaccaatgcttccagtaaacattgtgaaaatagactgtctctttctgaaatattaagcaatatcagatcatgtcgactacagtgtttccagccaaggctactaaatttacaggacagtgatagtgaagaatgtacctcaagaaaaccagggcagactgtgaacaataaaagagtttctgcagcatctgtagctttattgaacaccagcaagaatggcatatcagtaacagggggtatcacagaagagcagtttcagacacatcagcagcagttagttcagatgcaaaggcagcaacttgcccagcttcagcagaaacagcaatctcagcattcctcgcaacagacacatccaaaagcacagggctcaagcacctctgactgtatgtctaaaacacttgactcagccagcgcccactttgctgcatctgcagtggtcagtgcacctgttccaagtcgcagtgaggtagccaaggaacagaacactggccacaacaacataaacggtgttgtccagccttcaggaacctctaaaacattatactccaccaatatggctttatcatccagcccagggatttcagctgtacagcttgtaaggacagttggccacaccactacaaaccacttaatcccagcattgtgcacaagcagtcctcagacacttcccatgaacaattcctgcctgacaaatgcagtgcacctcaataatgtcagtgttgtttctccagtcaatgtgcatatcaatacacggacttcagcaccatcgccaacagccttaaaacttgccacagttgctgccagtatggacagagtgccaaaggttactcccagcagtgccatcagcagcatagcaagagagaaccacgaaccagaaagattgggcttaaatggaatagcagagacaacagtagctatggaagtgacataacctaaaacacgtggctctgacctgtgctgatggtgtgcagtcattcatattccagctgaatgcaaaaggcaacactctgtggatcacagagtgtaacaatggacctaaatggactatagtatattggatgttaaatccatatatgatgtatattttgtaaaattgggaaaatcactaccttgtaaaatagtttatttgtatcatcaatattatttctgttacttgaatagtagatattcatcatcatgcttttgcacttgaatttgcaactgaatggattttaaaaaataattctttaatgggatcatgagcatgaaatgggatcctgcatcacttgttttaactatttattttgccatgtttacattttgtatcttgtaaaaataaatccaactttgtgtctaaaaagttaaagattcatagctaggaaatgaaattcttgtaatttttttctaaaggaactgtaaagttttcacttggttcattttgtttcacaatttgactagatggactttttggtaaatactttagtggcatttcactgtcaaatatgaagttcaaggcaaaatagtattttctattactgtgcaggggaaagggatggatcgatacatgcaaatttaatgtagtaactcacttttccatatattttgaatgtatatttctatttatgataccaatttataaaaaataattacacagaaaaaatggaataggaaaaattatgcatctagcacatttaaactgtgcaaatatgaaaatttttcgaggattacattttatctgaaggctgcatattttaactggctttaaaactgtaacacatcacataaaagatactttaccaggtatgtattgcattatatcattgcaataattattggaagtctagatatcgagccatcccaggtgttgggcggggggagggttgtggcaagattgtcttttcaattttggagagttttcctgtggctacaaggcaagtaacgggttggaaaaagtctgactgtaagcgttggacaccttcatagtgtagtgttttagtgactttttttatacggttcttgtaaattagatacgtgtagtggtgtttcagaatgtttgtttatgcactagttcagacaactttccctgttacttgttcttgataagtgaaaactgcagggaaataaaaaatacatatcaaaacaaaaaaaaaaaaaaaaa

SEQ ID NO: 12771 - DNA, 4454 bp, Homo sapiens
gtggtttggggaaagtgtaggggcaaccaaagatcatcggcttgactaggccctttgccctgaacctcatgaagaaatgataggaggcagacatatgtgcctaaaaagagcgttgagctcagagaagagcaactcggagttttgggggtgtgctttgatttgtgtacatcaatggcagaatcatccagcgaatcagatcacttccgctgtcgtgaccgattgagtccatgggctgccagatcaacgcacaggggaactcgaagtcttcctacagtagaagttaccgagaaggtcaacactataacaagtactttacaggataccagtcggaacctgcgacaagtggaccagatgcttggacgataccgagaatacagtaatggacaggcgggtgcgatagaacatttaaaagaaagcttggaacaatcaatcgaccaactccggagtcaacgtttattgagaaactcaggagggagaagtatttctgttacaagtttgagtgcaagtgaccttgatggtggcactgggtcagagctccatcattttccacctacctcacctctcaaggactatggggatccacagggtattaaacgaatgagatcaagaactggtgtccggtttgttcaagagactgatgatatgactcagcttcatggttttcatcagtctcttcgagacctcagcagtgaacaaattcgccttggagatgatttcaacagggagctttccagaaggagccggtcagatgccgaaacaaaaagggctttggaagaattgactgaaaaacttaatgaagcccagaaacaagaagtggtttcagatcgggtggagcggcggcttcaggaactggagagagagatgcgcacagaaagggagctggtggaaagacgccaggatcaactgggactcatgtccctgcagctacaggaggcactaaagaaacaagaagctaaagcagatgagcatgagggggcaataaaaaataagctaagacaaactgaaactgagaagaatcaacttgaacaggaattggagctatctcgaaggttattgaatcaatcagaaggcagccgagaaacacttttgcatcaggtagaagaactgcgtacacaacttacgaaagcagaaggtgatcgaaagggtttacagcatcaagtatctcagatttccaagcaacagtcaaactatcaggatgaacaaggggaggactggagatttaggagaggggttgagcgggaaaaacaggacctggagaagcaaatgtcagatttgagagtgcagctgaacttcagcgcaatggcatctgagttagaggaagtgaaacggtgcatggagagaaaagacaaggagaaagcacatttggcatcacaagtagagaatttaacacgtgaactggagaatggggaaaaacagcaactgcagatgttggatcgacttaaggagatccagaatcactttgacacatgtgaggccgagcgtaagcatgctgaccttcagatctcagagctgactcgccatgcggaggatgcaaccaagcaggctgagcggtacctcagtgagctccagcagtcagaggctctgaaagaggaggcggagaagaggagggaagacctgaaactgaaagctcaagaatccattaggcagtggaagcttaagcataagaagttagaacgagcgttggagaaacaatctgaaactgttgatgaactgacaggcaagaataatcagattttaaaagaaaaggatgaattgaaaacccagctgtatgcagcattacaacaaatagagaatcttcgaaaggaattgaatgatgtcctaacaaagcgtgcccttcaggaggaggagcttcactccaaggaggagaaattacgtgatattaagtctcatcaagctgaccttgaattggaagttaagaattccctggataccatccatagactggagagcgaattgaaaaagcagagtaagatccaaagccagatgaaagttgagaaagctcacttggaggaagaaattgcagagctcaagaagagccaggcccaggacaaagctaaacttcttgagatgcaagagtccatcaaggacctgagtgccatccgagcagatcttgctaataaattggctgaggaagagagagccaagaaagcagtgcttaaggacctttctgacctcactgcacaggcaaaatccagggatgaagaaacagctacaatcatcacacagttaaagctggaacgagatgtgcaccagagggagctgaaagatctcacatcatcattgcagagtgtgaaaacaaaacacgaacagaatatccaggagcttatgaagcactttaagaaagaaaagagtgaggctgagaatcatatcaggactctgaaggctgaaagtttagaagagaagaatatggctaaaattcatcgtggtcagctggagaagttgaaatcacagtgtgacagactgacagaggaattaacccagaatgaaaatgagaacaaaaaactgaagctaaaatatcaatgtttgaaggatcaactagaagaaagggaaaaacatataagcattgaagaggagcacttaaggaggatggaagaggccagattgcagctcaaggatcaacttctttgcttggagactgaacaggaatccattcttggtgtgataggaaaggaaattgatgcagcttgtaaaacattctccaaggactcagtggagaaattaaaagttttttcatctggtcctgatatacattatgacccacatcgctggttagcagaaagcaagactaaacttcagtggctctgtgaggaactgaaagagagagaaaacagagagaaaaatctgcgacaccagctgatgctctgcagacaacaactcaggaatttgactgaaaacaaggaatctgagttgcagtgtctctttcaacagatagaaaggcaggagcagcttctggatgaaatacatcgtgagaagagagatctactggaagagacccaaagaaaagatgaagaaatgggatctctgcaggaccgtgtaattgcattagaaacgagtacccaagtggccttggaccatctggagtctgtgcctgagaaactgagcctactagaagatttcaaagacttcagagattcctgcagttcatctgagagaactgatggaagatattccaaatacagggttcgcagaaattctcttcagcatcaccaagatgacaccaagtacagaaccaaaagtttcaaaggtgacagaacctttctggaaggttcccacactcgtgggttagatcactcatcctcttggcaggatcacagtcgcttcctgtctagtccaagattttcatacgtgaactcatttaccaaaagaactgttgctccagattcagcttcaaacaaggaagatgccacaatgaatggaacaagttcacaacccaaaaaagaggaatatgggagctaaaaaagcaaatgtaatttgttattttacatgagtatgttacaaataataacatctctattcttacagcaatttggcccagattatctaacagacatacctgcagctttggctctttggtattgccaaacattgacaaaagtgacaatactgttggtccttgtgaatggtaaaccaatccaaataatatcagatcatgaatgatgtgcagctaatttatttgcaacttatactagcacagaaagaatgatattttttcactttgtattttcctttttcaagtgtggtcagtcacattttcccaaccaaaatttggatttctaattgaggccttttaaaaattactggctaaaaagaaggaaaatgagtttcccttgaggcaaaagttgccagcactttagattcagggagcatttatatacaactgattttttgaaaaattttctccctaataaattatcatgtgttataacatgtggagatgtgcatatataacattagacagtccactttataaatgctcaggacttttatatctatcatcttaacagtccacaactgcataccgtagctgaaaattatttccaatcatccatttttaatagcaataaagaattcataaatgatatctgaactgtagagcactgtaaagaattcatagcacaatttatttatttgtctttttgtggccaaatatcctactgtgatcacttcagtcatatcctggaccgtctttggtttactgtgactaaaatcatagcaccaaactcctttgtccatgagatttatatataatcttgtataatttggtcctatctgcttctaccatcccaacttttttcatcaaagtgtctaagaacgtattccctttacacgctgatctcctagtggagaaggatttatattaaatgctaagtaatagtaaactttcaggaactgaatcctattgggtcatggattctgcatagacaagggcaataaagcaatacctttgtaatatg

SEQ ID NO: 12772 - DNA, 7522 bp, Homo sapiens
gcggccgggccgggccgcgggagcaggcggaggcggaggcggcgggggcaggaggatgtcgcagccgccgctgctccccgcctcggcggagactcggaagttcacccgggcgctgagtaagccgggcacggcggccgagctgcggcagagcgtgtctgaggtggtgcgcggctccgtgctcctggcaaagccaaagctaattgagccactcgactatgaaaatgtcatcgtccagaagaagactcagatcctgaacgactgtttacgggagatgctgctcttcccttacgatgactttcagacggccatcctgagacgacagggtcgatacatatgctcaacagtgcctgcgaaggcggaagaggaagcacagagcttgtttgttacagagtgcatcaaaacctataactctgactggcatcttgtgaactataaatatgaagattactcaggagagtttcgacagcttccgaacaaagtggtcaagttggataaacttccagttcatgtctatgaagttgacgaggaggtcgacaaagatgaggatgctgcctcccttggttcccagaagggtgggatcaccaagcatggctggctgtacaaaggcaacatgaacagtgccatcagcgtgaccatgaggtcatttaagagacgatttttccacctgattcaacttggcgatggatcctataatttgaatttttataaagatgaaaagatctccaaagaaccaaaaggatcaatatttctggattcctgtatgggtgtcgttcagaacaacaaagtcaggcgttttgcttttgagctcaagatgcaggacaaaagtagttatctcttggcagcagacagtgaagtggaaatggaagaatggatcacaattctaaataagatcctccagctcaactttgaagctgcaatgcaagaaaagcgaaatggcgactctcacgaagatgatgaacaaagcaaattggaaggttctggttccggtttagatagctacctgccggaacttgccaagagtgcaagagaagcagaaatcaaactgaaaagtgaaagcagagtcaaacttttttatttggacccagatgcccagaagcttgacttctcatcagctgagccagaagtgaagtcatttgaagagaagtttggaaaaaggatccttgtcaagtgcaatgatttatctttcaatttgcaatgctgtgttgccgaaaatgaagaaggacccactacaaatgttgaacctttctttgttactctatccctgtttgacataaaatacaaccggaagatttctgccgatttccacgtagacctgaaccatttctcagtgaggcaaatgctcgccaccacgtccccggcgctgatgaatggcagtgggcagagcccatctgtcctcaagggcatccttcatgaagccgccatgcagtatccgaagcagggaatattttcagtcacttgtcctcatccagatatatttcttgtggccagaattgaaaaagtccttcaggggagcatcacacattgcgctgagccatatatgaaaagttcagactcttctaaggtggcccagaaggtgctgaagaatgccaagcaggcatgccaaagactaggacagtatagaatgccatttgcttgggcagcaaggacattgtttaaggatgcatctggaaatcttgacaaaaatgccagattttctgccatctacaggcaagacagcaataagctatccaatgatgacatgctcaagttacttgcagactttcggaaacctgagaagatggctaagctcccagtgattttaggcaatctagacattacaattgataatgtttcctcagacttccctaattatgttaattcatcatacattcccacaaaacaatttgaaacctgcagtaaaactcccatcacgtttgaagtggaggaatttgtgccctgcataccaaaacacactcagccttacaccatctacaccaatcacctttacgtttatcctaagtacttgaaatacgacagtcagaagtcttttgccaaggctagaaatattgcgatttgcattgaattcaaagattcagatgaggaagactctcagccccttaagtgcatttatggcagacctggtgggccagttttcacaagaagcgcctttgctgcagttttacaccatcaccaaaacccagaattttatgatgagattaaaatagagttgcccactcagctgcatgaaaagcaccacctgttgctcacattcttccatgtcagctgtgacaactcaagtaaaggaagcacgaagaagagggatgtcgttgaaacccaagttggctactcctggcttcccctcctgaaagacggaagggtggtgacaagcgagcagcacatcccggtctcggcgaaccttccttcgggctatcttggctaccaggagcttgggatgggcaggcattatggtccggaaattaaatgggtagatggaggcaagccactgctgaaaatttccactcatctggtttctacagtgtatactcaggatcagcatttacataattttttccagtactgtcagaaaaccgaatctggagcccaagccttaggaaacgaacttgtaaagtaccttaagagtctgcatgcgatggaaggccacgtgatgatcgccttcttgcccactatcctaaaccagctgttccgagtcctcaccagagccacacaggaagaagtcgcggttaacgtgactcgggtcattattcatgtggttgcccagtgccatgaggaaggattggagagccacttgaggtcatatgttaagtacgcgtataaggctgagccatatgttgcctctgaatacaagacagtgcatgaagaactgaccaaatccatgaccacgattctcaagccttctgccgatttcctcaccagcaacaaactactgaagtactcatggtttttctttgatgtactgatcaaatctatggctcagcatttgatagagaactccaaagttaagttgctgcgaaaccagagatttcctgcatcctatcatcatgcagtggaaaccgttgtaaatatgctgatgccacacatcactcagaagtttcgagataatccagaggcatctaagaacgcgaatcatagccttgctgtcttcatcaagagatgtttcaccttcatggacaggggctttgtcttcaagcagatcaacaactacattagctgttttgctcctggagacccaaagaccctctttgaatacaagtttgaatttctccgtgtagtgtgcaaccatgaacattatattccgttgaacttaccaatgccatttggaaaaggcaggattcaaagataccaagacctccagcttgactactcattaacagatgagttctgcagaaaccacttcttggtgggactgttactgagggaggtggggacagccctccaggagttccgggaggtccgtctgatcgccatcagtgtgctcaagaacctgctgataaagcattcttttgatgacagatatgcttcaaggagccatcaggcaaggatagccaccctctacctgcctctgtttggtctgctgattgaaaacgtccagcggatcaatgtgagggatgtgtcacccttccctgtgaacgcgggcatgactgtgaaggatgaatccctggctctaccagctgtgaatccgctggtgacgccgcagaagggaagcaccctggacaacagcctgcacaaggacctgctgggcgccatctccggcattgcttctccatatacaacctcaactccaaacatcaacagtgtgagaaatgctgattcgagaggatctctcataagcacagattcgggtaacagccttccagaaaggaatagtgagaagagcaattccctggataagcaccaacaaagtagcacattgggaaattccgtggttcgctgtgataaacttgaccagtctgagattaagagcctactgatgtgtttcctctacatcttaaagagcatgtctgatgatgctttgtttacatattggaacaaggcttcaacatctgaacttatggatttttttacaatatctgaagtctgcctgcaccagttccagtacatggggaagcgatacatagccagaacaggaatgatgcatgccagattgcagcagctgggcagcctggataactctctcacttttaaccacagctatggccactcggacgcagatgttctgcaccagtcattacttgaagccaacattgctactgaggtttgcctgacagctctggacacgctttctctatttacattggcgtttaagaaccagctcctggccgaccatggacataatcctctcatgaaaaaagtttttgatgtctacctgtgttttcttcaaaaacatcagtctgaaacggctttaaaaaatgtcttcactgccttaaggtccttaatttataagtttccctcaacattctatgaagggagagcggacatgtgtgcggctctgtgttacgagattctcaagtgctgtaactccaagctgagctccatcaggacggaggcctcccagctgctctacttcctgatgaggaacaactttgattacactggaaagaagtcctttgtccggacacatttgcaagtcatcatatctgtcagccagctgatagcagacgttgttggcattgggggaaccagattccagcagtccctgtccatcatcaacaactgtgccaacagtgaccggcttattaagcacaccagcttctcctctgatgtgaaggacttaaccaaaaggatacgcacggtgctaatggccaccgcccagatgaaggagcatgagaacgacccagagatgctggtggacctccagtacagcctggccaaatcctatgccagcacgcccgagctcaggaagacgtggctcgacagcatggccaggatccatgtcaaaaatggcgatctctcagaggcagcaatgtgctatgtccacgtaacagccctagtggcagaatatctcacacggaaagaagcagtccagtgggagccgccccttctcccccacagccatagcgcctgcctgaggaggagccggggaggcgtgtttagacaaggatgcaccgccttcagggtcattaccccaaacatcgacgaggaggcctccatgatggaagacgtggggatgcaggatgtccatttcaacgaggatgtgctgatggagctccttgagcagtgcgcagatggactctggaaagccgagcgctacgagctcattgccgacatctacaaacttatcatccccatttatgagaagcggagggattttgagaggctggcccatctgtatgacacgctgcaccgggcctacagcaaagtgaccgaggtcatgcactcgggccgcaggcttctggggacctacttccgggtagccttcttcgggcaggcagcgcaataccagtttacagacagtgaaacagatgtggagggattctttgaagatgaagatggaaaggagtatatttacaaggaacccaaactcacaccgctgtcggaaatttctcagagactccttaaactgtactcggataaatttggttctgaaaatgtcaaaatgatacaggattctggcaaggtcaaccctaaggatctggattctaagtatgcctacatccaggtgactcacgtcatccccttctttgacgaaaaagagttgcaagaaaggaaaacagagtttgagagatcccacaacatccgccgcttcatgtttgagatgccatttacgcagaccgggaagaggcagggcggggtggaagagcagtgcaaacggcgcaccatcctgacagccatacactgcttcccttatgtgaagaagcgcatccctgtcatgtaccagcaccacactgacctgaaccccatcgaggtggccattgacgagatgagtaagaaggtggcggagctccggcagctgtgctcctcggccgaggtggacatgatcaaactgcagctcaaactccagggcagcgtgagtgttcaggtcaatgctggcccactagcatatgcgcgagctttcttagatgatacaaacacaaagcgatatcctgacaataaagtgaagctgcttaaggaagttttcaggcaatttgtggaagcttgcggtcaagccttagcggtaaacgaacgtctgattaaagaagaccagctcgagtatcaggaagaaatgaaagccaactacagggaaatggcgaaggagctttctgaaatcatgcatgagcagctgggatgatctgccccctggaggagaagacgagcgtcttaccgaattcccttcacatcttcaacgccatcagtgggactccaacaagcacaatggttcacgggatgaccagctcgtcttcggtcgtgtgattacatctcatggcccgtgtgtggggacttgctttgtcatttgcaaactcaggatgctttccaaagccaatcactggggagaccgagcacagggaggaccaggggaaggggagagaaaggaaataaagaacaacgttatttcttaacagactttctataggagttgtaagaaggtgcacatatttttttaaatctcactggcaatattcaaagttttcattgtgtcttaacaaaggtgtggtagacactcttgagctggacttagattttattcttccttgcagagtagtgttagaatagatggcctacagaaaaaaaaggttctgggatctacatggcagggagggctgcactgacattgatgcctgggggaccttttgcctcgaggctgagctggaaaatcttgaaaatattttttttttcctgtggcacattcaggttgaatacaagaactatttttgtgactagtttttgatgacctaagggaactgaccattgtaatttttgtaccagtgaaccaggagatttagtgcttttatattcatttccttgcatttaagaaaatatgaaagcttaaggaattatgtgagcttaaaactagtcaagcagtttagaaccaaaggcctatattaataaccgcaactatgctgaaaagtacaaagtagtacagtatattgttatgtacatatcattgttaatacagtcctggcattctgtacatatatgtattacatttctacatttttaatactcacatgggcttatgcattaagtttaattgtgataaatttgtgctgttccagtatatgcaatacactttaatgttttattcttgtacataaaaatgtgcaatatggagatgtatacagtctttactatattaggtttataaacagttttaagaatttcatccttttgccaaaatggtggagtatgtaattggtaaatcataaatcctgtggtgaatggtggtgtactttaaagctgtcaccatgttatattttcttttaagacattaatttagtaattttatatttgggaaaataaaggtttttaattttatttaactggaatcactgccctgctgtaattaaacattctgtaccacatctgtattaaaaagacattgctgacc

SEQ ID NO: 12773 - DNA, 5723 bp, Homo sapiens
gcagccgccacattcaacaggcagcagcgcagcgggcgcgccgctggggagagcaagcggcccgcggcgtccgtccgtccttccgtccgcggccctgtcagctggagcgcggcgcaggctctgccccggcccggcggctctggccggccgtccagtccgtgcggcggaccccgaggagcctcgatgtggatggccccgcgaagttaagttctgggctcgcgcttccactccgccgcgccttcctcccagtttccgtccgctcgccgcaccggcttcgttcccccaaatctcggaccgtcccttcgcgccccctccccgtccgcccccagtgctgcgttctccccctcttggctctcctgcggctgggggaggggcgggggtcaccatggccgaggcgcctcaggtggtggagatcgacccggacttcgagccgctgccccggccgcgctcgtgcacctggccgctgcccaggccggagtttagccagtccaactcggccacctccagcccggcgccgtcgggcagcgcggctgccaaccccgacgccgcggcgggcctgccctcggcctcggctgccgctgtcagcgccgacttcatgagcaacctgagcttgctggaggagagcgaggacttcccgcaggcgcccggctccgtggcggcggcggtggcggcggcggccgccgcggccgccaccggggggctgtgcggggacttccagggcccggaggcgggctgcctgcacccagcgccaccgcagcccccgccgcccgggccgctgtcgcagcacccgccggtgccccccgccgccgctgggccgctcgcggggcagccgcgcaagagcagctcgtcccgccgcaacgcgtggggcaacctgtcctacgccgacctcatcaccaaggccatcgagagctcggcggagaagcggctcacgctgtcgcagatctacgagtggatggtcaagagcgtgccctacttcaaggataagggtgacagcaacagctcggcgggctggaagaattcaattcgtcataatctgtccctacacagcaagttcattcgtgtgcagaatgaaggaactggaaaaagttcttggtggatgctcaatccagagggtggcaagagcgggaaatctcctaggagaagagctgcatccatggacaacaacagtaaatttgctaagagccgaagccgagctgccaagaagaaagcatctctccagtctggccaggagggtgctggggacagccctggatcacagttttccaaatggcctgcaagccctggctctcacagcaatgatgactttgataactggagtacatttcgccctcgaactagctcaaatgctagtactattagtgggagactctcacccattatgaccgaacaggatgatcttggagaaggggatgtgcattctatggtgtacccgccatctgccgcaaagatggcctctactttacccagtctgtctgagataagcaatcccgaaaacatggaaaatcttttggataatctcaaccttctctcatcaccaacatcattaactgtttcgacccagtcctcacctggcaccatgatgcagcagacgccgtgctactcgtttgcgccaccaaacaccagtttgaattcacccagcccaaactaccaaaaatatacatatggccaatccagcatgagccctttgccccagatgcctatacaaacacttcaggacaataagtcgagttatggaggtatgagtcagtataactgtgcgcctggactcttgaaggagttgctgacttctgactctcctccccataatgacattatgacaccagttgatcctggggtagcccagcccaacagccgggttctgggccagaacgtcatgatgggccctaattcggtcatgtcaacctatggcagccaggcatctcataacaaaatgatgaatcccagctcccatacccaccctggacatgctcagcagacatctgcagttaacgggcgtcccctgccccacacggtaagcaccatgccccacacctcgggtatgaaccgcctgacccaagtgaagacacctgtacaagtgcctctgccccaccccatgcagatgagtgccctggggggctactcctccgtgagcagctgcaatggctatggcagaatgggccttctccaccaggagaagctcccaagtgacttggatggcatgttcattgagcgcttagactgtgacatggaatccatcattcggaatgacctcatggatggagatacattggattttaactttgacaatgtgttgcccaaccaaagcttcccacacagtgtcaagacaacgacacatagctgggtgtcaggctgagggttagtgagcaggttacacttaaaagtacttcagattgtctgacagcaggaactgagagaagcagtccaaagatgtctttcaccaactcccttttagttttcttggttaaaaaaaaaaacaaaaaaaaaaaccctcctttttttcctttcgtcagacttggcagcaaagacatttttcctgtacaggatgtttgcccaatgtgtgcaggttatgtgctgctgtagataaggactgtgccattggaaatttcattacaatgaagtgccaaactcactacaccatataattgcagaaaagattttcagatcctggtgtgctttcaagttttgtatataagcagtagatacagattgtatttgtgtgtgtttttggtttttctaaatatccaattggtccaaggaaagtttatactctttttgtaatactgtgatgggcctcatgtcttgataagttaaacttttgtttgtactacctgttttctgcggaactgacggatcacaaagaactgaatctccattctgcatctccattgaacagccttggacctgttcacgttgccacagaattcacatgagaaccaagtagcctgttatcaatctgctaaattaatggacttgttaaacttttggaaaaaaaaagattaaatgccagctttgtacaggtcttttctatttttttttgtttattttgttatttgcaaatttgtacaaacatttaaatggttctaatttccagataaatgatttttgatgttattgttgggacttaagaacatttttggaatagatattgaactgtaataatgttttcttaaaactagagtctactttgttacatagtcagcttgtaaattttgtggaaccacaggtatttggggcagcattcataattttcattttgtattctaactggattagtactaattttatacatgcttaactggtttgtacactttgggatgctacttagtgatgtttctgactaatcttaaatcattgtaattagtacttgcatattcaacgtttcaggccctggttgggcaggaaagtgatgtatagttatggacactttgcgtttcttatttaggataacttaatatgtttttatgtatgtattttaaagaaatttcatctgcttctactgaactatgcgtactgcatagcatcaagtcttctctagagacctctgtagtcctgggaggcctcataatgtttgtagatcagaaaagggagatctgcatctaaagcaatggtcctttgtcaaacgagggattttgatccacttcaccattttgagttgagctttagcaaaagtttcccctcataattctttgctcttgtttcagtccaggtggaggttggttttgtagttctgccttgaggaattatgtcaacactcatacttcatctcattctcccttctgccctgcagattagattacttagcacactgtggaagtttaagtggaaggagggaatttaaaaatgggacttgagtggtttgtagaatttgtgttcataagttcagatgggtagcaaatggaatagaacttacttaaaaattggggagatttatttgaaaaccagctgtaagttgtgcattgagattatgttaaaagccttggcttaagaatttgaaaatttctttagcctgtagcaacctaaactgtaattcctatcattatgttttattactttccaattacctgtaactgacagaccaaattaattggctttgtgtcctatttagtccatcagtattttcaagtcatgtggaaagcccaaagtcatcacaatgaagagaacaggtgcacagcactgttcctcttgtgttcttgagaaggatctaatttttctgtatatagcccacatcacacttgctttgtcttgtatgttaattgcatcttcattggcttggtatttcctaaatgtttaacaagaacacaagtgttcctgataagatttcctacagtaagccagctgtattgtaagcttcccaccgtgatgatcatttttttgaagattcattgaacagccaccactctatcatcctcattttggggcagtccaagacatagctggttttagaaacccaagttcctctaagcacagcctcccgggtatgtaactgaacttggtgccaaagtacttgtgtactaatttctattactacgtactgtcactttcctcccgtgccattactgcatcataatacaaggaacctcagagcccccatttgttcattaaagaggcaactacagccaaaatcactgttaaaatcttactacttcatggagtagctcttaggaaaatatatcttcctcctgagtctgggtaattatacctctcccaagcccccattgtgtgttgaaatcctgtcatgaatccttggtagctctctgagaacagtgaagtccagggaaaggcatctggtctgtctggaaagcaaacattatgtggcctctggtagtttttttcctgtaagaatactgactttctggagtaatgagtatatatcagttattgtacatgattgctttgtgaaatgtgcaaatgatatcacctatgcagccttgtttgatttattttctctggtttgtactgttattaaaagcatattgtattatagagctattcagatattttaaatataaagatgtattgtttccgtaatatagacgtatggaatatatttaggtaatagatgtattacttggaaagttctgctttgacaaactgacaaagtctaaatgagcacatgtatcccagtgagcagtaaatcaatggaacatcccaagaagaggataaggatgcttaaaatggaaatcattctccaacgatatacaaattggacttgttcaactgctggatatatgctaccaataaccccagccccaacttaaaattcttacattcaagctcctaagagttcttaatttataactaattttaaaagagaagtttcttttctggttttagtttgggaataatcattcattaaaaaaaatgtattgtggtttatgcgaacagaccaacctggcattacagttggcctctccttgaggtgggcacagcctggcagtgtggccaggggtggccatgtaagtcccatcaggacgtagtcatgcctcctgcatttcgctacccgagtttagtaacagtgcagattccacgttcttgttccgatactctgagaagtgcctgatgttgatgtacttacagacacaagaacaatctttgctataattgtataaagccataaatgtacataaattatgtttaaatggcttggtgtctttcttttctaattatgcagaataagctctttattaggaattttttgtgaagctattaaatacttgagttaa

SEQ ID NO: 12774 - DNA, 4236 bp, Homo sapiens
ggtgggcggggggaggaggcggccctagcgccattttgtgggagcgaagcggtggctgggctgcgcttgggtccgtcgctgcttcggtgtccctgtcgggcttcccagcagcggcctagcgggaaaagtaaaagatgtctgaatatattcgggtaaccgaagatgagaacgatgagcccattgaaataccatcggaagacgatgggacggtgctgctctccacggttacagcccagtttccaggggcgtgtgggcttcgctacaggaatccagtgtctcagtgtatgagaggtgtccggctggtagaaggaattctgcatgccccagatgctggctggggaaatctggtgtatgttgtcaactatccaaaagataacaaaagaaaaatggatgagacagatgcttcatcagcagtgaaagtgaaaagagcagtccagaaaacatccgatttaatagtgttgggtctcccatggaaaacaaccgaacaggacctgaaagagtattttagtacctttggagaagttcttatggtgcaggtcaagaaagatcttaagactggtcattcaaaggggtttggctttgttcgttttacggaatatgaaacacaagtgaaagtaatgtcacagcgacatatgatagatggacgatggtgtgactgcaaacttcctaattctaagcaaagccaagatgagcctttgagaagcagaaaagtgtttgtggggcgctgtacagaggacatgactgaggatgagctgcgggagttcttctctcagtacggggatgtgatggatgtcttcatccccaagccattcagggcctttgcctttgttacatttgcagatgatcagattgcgcagtctctttgtggagaggacttgatcattaaaggaatcagcgttcatatatccaatgccgaacctaagcacaatagcaatagacagttagaaagaagtggaagatttggtggtaatccaggtggctttgggaatcagggtggatttggtaatagcagagggggtggagctggtttgggaaacaatcaaggtagtaatatgggtggtgggatgaactttggtgcgttcagcattaatccagccatgatggctgccgcccaggcagcactacagagcagttggggtatgatgggcatgttagccagccagcagaaccagtcaggcccatcgggtaataaccaaaaccaaggcaacatgcagagggagccaaaccaggccttcggttctggaaataactcttatagtggctctaattctggtgcagcaattggttggggatcagcatccaatgcagggtcgggcagtggttttaatggaggctttggctcaagcatggattctaagtcttctggctggggaatgtagacagtggggttgtggttggttggtatagaatggtgggaattcaaatttttctaaactcatggtaagtatattgtaaaatacatatgtactaagaattttcaaaattggtttgttcagtgtggagtatattcagcagtatttttgacatttttctttagaaaaaggaagagctaaaggaattttataagttttgttacatgaaaggttgaaatattgagtggttgaaagtgaactgctgtttgcctgattggtaaaccaacacactacaattgatatcaaaaggtttctcctgtaatattttatccctggacttgtcaagtgaattctttgcatgttcaaaacggaaaccattgattagaactacattctttaccccttgttttaatttgaaccccaccatatggatttttttccttaagaaaatctccttttaggagatcatggtgtcacagtgtttggttcttttgttttgttttttaacacttgtctcccctcatacacaaaagtacaatatgaagccttcatttaatctctgcagttcatctcatttcaaatgtttatggaagaagcacttcattgaaagtagtgctgtaaatattctgccataggaatactgtctacatgctttctcattcaagaattcgtcatcacgcatcacaggccgcgtctttgacggtgggtgtcccatttttatccgctactctttatttcatggagtcgtatcaacgctatgaacgcaaggctgtgatatggaaccagaaggctgtctgaacttttgaaaccttgtgtgggattgatggtggtgccgaggcatgaaaggctagtatgagcgagaaaaggagagagcgcgtgcagagacttggtggtgcataatggatattttttaacttggcgagatgtgtctctcaatcctgtggctttggtgagagagtgtgcagagagcaatgatagcaaataatgtacgaatgttttttgcattcaaaggacatccacatctgttggaagacttttaagtgagtttttgttcttagataacccacattagatgaatgtgttaagtgaaatgatacttgtactccccctacccctttgtcaactgctgtgaatgctgtatggtgtgtgttctcttctgttactgatatgtaagtgtggcaatgtgaactgaagctgatgggctgagaacatggactgagcttgtggtgtgctttgcaggaggacttgaagcagagttcaccagtgagctcaggtgtctcaaagaagggtggaagttctaatgtctgttagctacccataagaatgctgtttgctgcagttctgtgtcctgtgcttggatgctttttataagagttgtcattgttggaaattcttaaataaaactgatttaaataatatgtgtctttgttttgcagccctgaatgcaaagaattcatagcagttaattccccttttttgacccttttgagatggaactttcataaagtttcttggcagtagtttattttgcttcaaataaacttatttgaaaagttgtctcaagtcaaatggattcatcacctgtcatgcattgacacctgatacccagacttaattggtatttgttcttgcattggccaaagtgaaaatttttttttttcttttgaaatctagttttgaataagtctgggtgaccgcacctaaaatggtaagcagtaccctccggctttttcttagtgcctctgtgcatttgggtgatgttctatttacatggcctgtgtaaatctccattgggaagtcatgccttctaaaaagattcttatttgggggagtgggcaaaatgttgattattttctaatgctttgtagcaaagcatatcaattgaaaagggaatatcagcaccttcctagtttgggatttgaaaagtggaattaattgcagtagggataaagtagaagaaaccacaaattatcttgtgcctgaaatccattaagaggcctgatagctttaagaattagggtgggttgtctgtctggaagtgttaagtggaatgggctttgtcctccaggaggtgggggaatgtggtaacattgaatacagttgaataaaatcgcttacaaaactcacactctcacaatgcattgttaagtatgtaaaagcaataacattgattctctgttgtacttttttgtaactaattctgtgagagttgagctcattttctagttggaagaatgtgatatttgttgtgttggtagtttacctaatgcccttacctaattagattatgataaataggtttgtcattttgcaagttacataaacatttatcaatgaagtcatcctttagacttgtaatcgccacattgtttcattattcagtttcctctgtaaagggatcttgagttgttttaattttttttttctgcatctgaatctgcatgatttccaaaccctgtaccatctgaattttgcattttagcacttgcactattactcagcagcagtaacatggtaacacttaaaatggtactcggggacctccaaagactaaactgacaagccttcaaggagcccaggggtaagttaacttgtcaacggcatggtttaatcccttctttacacttgtgtaaatttcagttactggtcatagaaggctttcaatgttgagtggccttttattaacatgtttatggtactgcatagatacgggtatttattttaccctaagaagattttgaagtttaaaagtacttaaactatttggcaaagatttgtttttaaaaatctatttggtcaatctaaatgcattcattctaaaaaattttttgaaccagataaataaaatttttttttgacaccacaaaaaaaaaaaaaaaaaaaa

SEQ ID NO: 12775 - DNA, 1567 bp, Homo sapiens
agagaaaggcatccaggccccgccaggagagacggtgcctcgctctgttgcccagactggagtgcagtggtgtgatcataactcagtatagcctagaactcctgagctcaagcaatcctcccacctcagcctttcaagcagctaggagtacagttgggagccactgtacctggttactgtcacgggatcacctgcctttttggctgctgcacctgaacagagtcatcatgcctcgaggtcagaagagtaaactccgtgccagggaaaaacgccgtcaggcccgaggagggctggaagatttgatagatgctctggacattttagaagaggaggaagaatctcccccctctgcctctgcttgtttgaaggatgttttccagagttcacttgatggggcatccaacaatccccatggacttcgggaagcccaatccaccagcacatctgctacagctgcttcacacacaagacatcccgaaggagtcaacgaccaaatggaagaaaggccaatatgcacacaagatctagaagccactgatagctttcccagaggccctgtagatgagaaagtaattatattggtgcattacttgctgtacaagtaccaaatgaaagagcccattacaaaggcagatatgctgagaaatgtaacccaaatgtccaagagccagttccctgtaatcctgagcagagcttctgagcacctggagctgatctttggtcttgacctgaaggaagtggagcctaataagcacatctatgtccttgtcaacaaactagatctaggctgtgatgcaaagctgagtgatgaaacaggcgtgcccaagactggcctgctgatgactgtcctgggtattatcttcacaaatggcaattgtgtcgctgaggaggaagtctggaaagtgtttaacacgatggggttatatgacggaattgagcacttcatgtttggggagcccaggaagctccttaccaaagatttggtgaaagaaaattacctggagtaccagcaagtgcccaacagtgatcctccacgctatcaattcctatggggcccaagagcccatgctgaaaccagcaagatgaaagttcttgagtttttggccaaggtaaatgatacagctcccagtgaattctcaaactggtatacagaggctttacaagatgaggaagagagagccagagccagagttgcagccaaggctcgcgttagtgccacagccggtgcacgttccaaggttaagtccagcaagtcctcccaactgcagtaaagtctgagggagattcttcatttgtgtttgaaaagaaatgcacattctgagctgtgggaggtcagggtgggactggagacaacacagtgaataatatgtttgtgttaatgttctatgtgatggcttggaatttttgaagatgttgttcctttaatagatggttaaagtagcttcactatctaagtttatgaatgacattgctcaaatttttctgtatgtgagattaagagtaagcgatttattgctttataagtctaattgggaaactctccatttatttagtgatcgaaacacga

SEQ ID NO: 12776 - DNA, 3578 bp, Homo sapiens
acttccggacgggactcccctctgtccgcgcctcacatctccccttcctctcgcctagtcctgtgccgttttccgtccgcgactcttccggcccagagctttcggagtgcggttgctcaggggaagccgtcgccgcccccgcctcggggccgagtgagagtgcccgtcgcgtcgcgccgcgtcgccccccgggccgcctccttgccgccagtggcgggctccgttctccctcgaagcactccccccagctccatgaatggaaatcggctccgcaggacccgctggggcccagcccctactcatggtgcccagaagacctggctatggcaccatgggcaaacccattaaactgctggctaactgttttcaagttgaaatcccaaagattgatgtctacctctatgaggtagatattaaaccagacaagtgtcctaggagagtgaacagggaggtggttgactcaatggttcagcattttaaagtaactatatttggagaccgtagaccagtttatgatggaaaaagaagtctttacaccgccaatccacttcctgtggcaactacaggggtagatttagacgttactttacctggggaaggtggaaaagatcgacctttcaaggtgtcaatcaaatttgtctctcgggtgagttggcacctactgcatgaagtactgacaggacggaccttgcctgagccactggaattagacaagccaatcagcactaaccctgtccatgccgttgatgtggtgctacgacatctgccctccatgaaatacacacctgtggggcgttcatttttctccgctccagaaggatatgaccaccctctgggagggggcagggaagtgtggtttggattccatcagtctgttcggcctgccatgtggaaaatgatgcttaatatcgatgtttctgccactgccttctacaaagcacaacctgtaattcagttcatgtgtgaagttcttgatattcataatattgatgagcaaccaagacctctgactgattctcatcgggtaaaattcaccaaagagataaaaggtttgaaggttgaagtgactcattgtggaacaatgagacggaaataccgtgtttgtaatgtaacaaggaggcctgccagtcatcaaacctttcctttacagttagaaaacggccaaactgtggagagaacagtagcgcagtatttcagagaaaagtatactcttcagctgaagtacccgcaccttccctgtctgcaagtcgggcaggaacagaaacacacctacctgccactagaagtctgtaatattgtggcagggcaacgatgtatcaagaagctaacagacaatcagacttccactatgatcaaggcaacagcaagatctgcaccagatagacaagaggaaattagcagattggtaagaagtgcaaattatgaaacagatccatttgttcaggagtttcaatttaaagttcgggatgaaatggctcatgtaactggacgcgtacttccagcacctatgctccagtatggaggacggaatcggacagtagcaacaccgagccatggagtatgggacatgcgagggaaacaattccacacaggagttgaaatcaaaatgtgggctatcgcttgttttgccacacagaggcagtgcagagaagaaatattgaagggtttcacagaccagctgcgtaagatttctaaggatgcagggatgcccatccagggccagccatgcttctgcaaatatgcacagggggcagacagcgtagagcccatgttccggcatctcaagaacacatattctggcctacagcttattatcgtcatcctgccggggaagacaccagtgtatgcggaagtgaaacgtgtaggagacacacttttgggtatggctacacaatgtgttcaagtcaagaatgtaataaaaacatctcctcaaactctgtcaaacttgtgcctaaagataaatgttaaactcggagggatcaataatattcttgtacctcatcaaagaccttctgtgttccagcaaccagtgatctttttgggagccgatgtcactcatccacctgctggtgatggaaagaagccttctattgctgctgttgtaggtagtatggatgcacacccaagcagatactgtgccacagtaagagttcagagaccccgacaggagatcatccaggacttggcctccatggtccgggaacttcttattcaattttataagtcaactcggttcaagcctactcgtatcatcttttatcgggatggtgtttcagaggggcagtttaggcaggtattatattatgaactactagcaattcgagaagcctgcatcagtttggagaaagactatcaacctggaataacctacattgtagttcagaagagacatcacactcgattattttgtgctgataggacagaaagggttggaagaagtggcaatatcccagctggaacaacagttgatacagacattacacacccatatgagttcgatttttacctctgtagccatgctggaatacagggtaccagtcgtccttcacactatcatgttttatgggatgataactgctttactgcagatgaacttcagctgctaacttaccagctctgccacacttacgtacgctgtacacgatctgtttctatacctgcaccagcgtattatgctcacctggtagcatttagagccagatatcatcttgtggacaaagaacatgacagtgctgaaggaagtcacgtttcaggacaaagcaatgggcgagatccacaagctcttgccaaggctgtacagattcaccaagataccttacgcacaatgtacttcgcttaaatagtccaagtatattctctgagaggaagtactgaaagatgaattgacatacaacgtatgtttccagtgaagtcaattgagtaaggacacctccagccatacagaaaccaacactgtgtgggggccaaggtctgatccttatgttaatacaaggaagattgtttacttcatcaaggaacacagcatcattatgcaatatgaaaccagccaactgctttttgtgcggtctcctataggaagtatcgcaattgttttgttttcatttcttgtagtctaacccttttaatgcctttacctcaagttgcttggcagcacaactatctttgcaaaaaaaagtaaagaaaaagtaaatgatggtttaaaaaatacacaccttcatgaataatcaaagtgatttttcagaattatgtgtgcaaaaaattaatgtgcattcatatattcttgtaaaaggtgtctgtgtatttttaaaatatatacatccatacttcatatgcatatatatctagatctggattgataatagatatatatgtgtctgttatatattttagagttcattccattggggaattttctttcccttttattctacccccactaccgcctttatttctctatttcccttgccttcatcacctacatttttttcccagtcctaccagtgacattcaaatgttgatgtatctggttcgtttgaatataaaatatggcaaactaaaaaaaaaaaaaaaaaaaaaaa

SEQ ID NO: 12777 - DNA, 3320 bp, Homo sapiens
acttccggacgggactcccctctgtccgcgcctcacatctccccttcctctcgcctagtcctgtgccgttttccgtccgcgactcttccggcccagagctttcggagtgcggttgctcaggggaagccgtcgccgcccccgcctcggggccgagtgagagtgcccgtcgcgtcgcgccgcgtcgccccccgggccgcctccttgccgccagtggcgggctccgttctccctcgaagcactccccccagctccatgaatggaaatcggctccgcaggacccgctggggcccagcccctactcatggtgcccagaagacctggctatggcaccatgggcaaacccattaaactgctggctaactgttttcaagttgaaatcccaaagattgatgtctacctctatgaggtagatattaaaccagacaagtgtcctaggagagtgaacaggtagatttagacgttactttacctggggaaggtggaaaagatcgacctttcaaggtgtcaatcaaatttgtctctcgggtgagttggcacctactgcatgaagtactgacaggacggaccttgcctgagccactggaattagacaagccaatcagcactaaccctgtccatgccgttgatgtggtgctacgacatctgccctccatgaatttctgccactgccttctacaaagcacaacctgtaattcagttcatgtgtgaagttcttgatattcataatattgatgagcaaccaagacctctgactgattctcatcgggtaaaattcaccaaagagataaaaggtttgaaggttgaagtgactcattgtggaacaatgagacggaaataccgtgtttgtaatgtaacaaggaggcctgccagtcatcaaacctttcctttacagttagaaaacggccaaactgtggagagaacagtagcgcagtatttcagagaaaagtatactcttcagctgaagtacccgcaccttccctgtctgcaagtcgggcaggaacagaaacacacctacctgccactagaagtctgtaatattgtggcagggcaacgatgtatcaagaagctaacagacaatcagacttccactatgatcaaggcaacagcaagatctgcaccagatagacaagaggaaattagcagattggtaagaagtgcaaattatgaaacagatccatttgttcaggagtttcaatttaaagttcgggatgaaatggctcatgtaactggacgcgtacttccagcacctatgctccagtatggaggacggaatcggacagtagcaacaccgagccatggagtatgggacatgcgagggaaacaattccacacaggagttgaaatcaaaatgtgggctatcgcttgttttgccacacagaggcagtgcagagaagaaatattgaagggtttcacagaccagctgcgtaagatttctaaggatgcagggatgcccatccagggccagccatgcttctgcaaatatgcacagggggcagacagcgtagagcccatgttccggcatctcaagaacacatattctggcctacagcttattatcgtcatcctgccggggaagacaccagtgtatgcggaagtgaaacgtgtaggagacacacttttgggtatggctacacaatgtgttcaagtcaagaatgtaataaaaacatctcctcaaactctgtcaaacttgtgcctaaagataaatgttaaactcggagggatcaataatattcttgtacctcatcaaagaccttctgtgttccagcaaccagtgatctttttgggagccgatgtcactcatccacctgctggtgatggaaagaagccttctattgctgctgttgtaggtagtatggatgcacacccaagcagatactgtgccacagtaagagttcagagaccccgacaggagatcatccaggacttggcctccatggtccgggaacttcttattcaattttataagtcaactcggttcaagcctactcgtatcatcttttatcgggatggtgtttcagaggggcagtttaggcaggtattatattatgaactactagcaattcgagaagcctgcatcagtttggagaaagactatcaacctggaataacctacattgtagttcagaagagacatcacactcgattattttgtgctgataggacagaaagggttggaagaagtggcaatatcccagctggaacaacagttgatacagacattacacacccatatgagttcgatttttacctctgtagccatgctggaatacagggtaccagtcgtccttcacactatcatgttttatgggatgataactgctttactgcagatgaacttcagctgctaacttaccagctctgccacacttacgtacgctgtacacgatctgtttctatacctgcaccagcgtattatgctcacctggtagcatttagagccagatatcatcttgtggacaaagaacatgacagtgctgaaggaagtcacgtttcaggacaaagcaatgggcgagatccacaagctcttgccaaggctgtacagattcaccaagataccttacgcacaatgtacttcgcttaaatagtccaagtatattctctgagaggaagtactgaaagatgaattgacatacaacgtatgtttccagtgaagtcaattgagtaaggacacctccagccatacagaaaccaacactgtgtgggggccaaggtctgatccttatgttaatacaaggaagattgtttacttcatcaaggaacacagcatcattatgcaatatgaaaccagccaactgctttttgtgcggtctcctataggaagtatcgcaattgttttgttttcatttcttgtagtctaacccttttaatgcctttacctcaagttgcttggcagcacaactatctttgcaaaaaaaagtaaagaaaaagtaaatgatggtttaaaaaatacacaccttcatgaataatcaaagtgatttttcagaattatgtgtgcaaaaaattaatgtgcattcatatattcttgtaaaaggtgtctgtgtatttttaaaatatatacatccatacttcatatgcatatatatctagatctggattgataatagatatatatgtgtctgttatatattttagagttcattccattggggaattttctttcccttttattctacccccactaccgcctttatttctctatttcccttgccttcatcacctacatttttttcccagtcctaccagtgacattcaaatgttgatgtatctggttcgtttgaatataaaatatggcaaactaaaaaaaaaaaaaaaaaaaaaaa

SEQ ID NO: 12778 - DNA, 8459 bp, Homo sapiens
ggtcattgctgtattccttaggtgctgcaaagtctcattttgagtgtggaatggtgggcggtgttcatcctgaggcagcagtgagagtcgtccagtccatggctcgtttcatggctgcctatttcaccaatcagcagctttgcattttgccccctcatcatgtgaatgttcttcccccacttcatattaaaacagagcagtcctttcgacttattcctctgcaacactctaaggtggccagtgttgttagagatcagaatctctctaatgtgtggacagttgaatatgcacttgaattactatttattggtggcctggttccagaggctgtgtggttggcatataaacttggagactggaagacgtctgtttcaattggtgtggctttccagctgttctgtaaacgtgatagcaatttcatgaggtccaagaaaaagagtctgaatctaccactccgtatgactccagcacagatttttcaggaaaaactgcagtgtgttttaggtcaaccagcctctttggaagcaaaaaatgaaatgggctcaaaatataaacagtttacagccaaaatttggaaacacctcaaatgtccgtcaactggtgaatggataagcaaattcaaatatatctttaaaatggaataacaaatagtgaagaggaacaaattgctgataacttgtgacaacatagatgaatcacagaaccgtcatgatcccattgaagaggaagatgcaaatctgctatttggttcagtacaagaagtactgaaagcatcagttatggccgatgcagatattctttcggagacatttcaacttctgatagactctgccaaggacttcagtaaaagactgtggggcttagtgccattcggcttgtatcttccagctcctccattgtactgtccccagccagctattcttagtgaagaagatggtgatgatcttcttttaaaagctgaaaaaaataatcgccagaaggtatctggaatccttcagcgtgttctcctgcttttccgggcggctcagtgttcttttcctgtagcacagtggtatatattgcagttgaggtgggcaagaaaagtcatgcagaagattcgaatgaaaggatcccttccttcactgagtccttttcctcagtcattacttaattactgtaaaggaggtatcgcattttttagacctggagcagctggagaccacaagcttgatgaagtttccattagagcaataggttgcttcagagaactttgtgctctgtgttggatgctgcatgtccgtgataagttatcctatagttgcaggcaatatcagaaagcaagagaaaatgtaaaaggagaaaaggaccttgaagtggagtttgattcttgtatgattgagcactgtcttagtgcagtggaatgggcttatagaatgctgcctttctctcggttttttaatatggaagaacttattcaggatataattttgagccttattggagaactgccaccaatcagaaaggtagcagaaattttcgtgaaagcatttccctatcctgaggacgtgagggttcctttaagagacaaatatcactctcttcaccagagactcagacactgtgttgtgaaaggaccccagactgaggaaatgatgtctgttgtcatgcattctatccagaaagtgagggtgaaagctctaaaacgtgtgcggagaaatataggctcttttgaagtgaatatatgggaaccaattgaagaagagaaaccagatgaggctccaggtgttgacagatattccctggggactagtttgagcagaagtacactcacagaactaggagattctgtggttcacagtgatgcagatacgttctctgaagctttgtcggttgaagaaaaaagtaggataaatatctatcaaagaaatgccccaaatcacatggaattaacatcaattcataagccaactgataaaaggaaaatgtgtaatcagaaagaaaatcctacaaagaaagaagatcatgaaaagttatcacaaaatacacttcctgtaataggtgtttgggaatttgaacgtgatgatgatgaatatattaaattccttgatctgtttttgagttacattcttgaaagagacctaccttattccagggatgctgacattccatttctaactagtttttctggaaagcttagagaacatgaacttaattctttactttttgatgtacatacaacattaaaacgacatcagagcaaaactaaaagccagaatgtgtttagagctggttcttgctttgttgttgctcctgagtcctatgaatcagaaaaatcatcctctttaaatgatgaatatggcatgcatttagaaaaccagaaactttcatcatcagtactggttaatcaagggatcaaaccttttttacaatatccttcgaatgaagtcaataagaatgaaggaatgagtggattatttggtttaaaacaaaggtcaatttacaaaatacaagatgacactagagagaaatgtctaatccagagatcatcaaaccacattttttggactcccaagtccattaaaactagaagatgtattttcaaagctattcagtgcaatgatattaaccctcaagaagatcttcctttagcactaaacacttttggcagtataggaagactgctggaatggatgataaggtggtctaatagaaggctactctgtgattctggtataactgagtcatcctctgagtacagtccagtaattcgtgtaaagacctctacagctgccattcttacatcattatggcttttggaacaaccctattttgctacatataaggcaaaaaatgccattattaagatggtagagaatcgtgacactgggtgtcagattggacccaatattgagagggagagcaaatcagatgctggcggttcagttgcagtagcaactccaggtggaactgaggaaagaaatggtcagaataaatcttgtcaaaatatcttgaaaatgccaactgaagcaaaaaatcctgatataaaagaaatcaatgatgatattatttccatcactcataatactaaaaaagaatttatagatattgatgagaatcttttagaagtagaagcatttacagaagaggaaatggatatgcacatatcagactatgaagaagacattgaagaatctgttggaggtttcagaagtcccagtcttgccatttgcatgatgactttaccacagcagttagaagaagagttcacagaagaggttcagtgtcaaagggaagaaccactggagacaattatggaggaaaaatcgactgaacaaaaaggtatgatcgaagccttttcacatcctgggcataccactcctcaatcaatgcaagtagatacgagttcagaaatttctagtgcacagatttctacatataaagaaaaatcttcctcagttccacttctgatatcaaatggagtcaatgttgcttcacaaccacctgctccaacacctcagaagacccagagaaatgaattcacggctcagttaccagattgttcggagtccgttaggcagatgctgcaagatgaaatgtttaaattagttcagctgcaacagatcaacttcatgagcctaatgcaaatagtaggatcatcctttgctaatctcccagatacacaacaacttgtacagcagtctcagtctgtgcatttaggggaaagccaagaatcaaacctaagaggatgtggtgatgttgaagacagcaacaaaaatcttaaggagagattttttattaaaccacagtcaatgggagagaacgccagagagcctcgcaagaacagcccacactgccatgaaggaactatcccatctggtcaaaatagtactggaaacgtacagaatgttccacatgggagtattcctttatgtcaattaaatggccagccccggaaaaaaggaccaattccatcatctcaaaacttaccatccacttcgttttatccagctcctgctggaaatactcacctctaccttttgtccacaccttctgttgttcagaaggcacctagacttatcccacatgcaaaaacatttagtcctggtgatggctttcctttgcttcaatttaagtctaaacaagaattccagccccttttcttacatacaggaagtattccacaagttcccttcaggcctttgccacaaccaagagaggcttggggattatctgactccttccaacctgctctgccacagagagcagcacaaactactccagcatcccatttgaatgtaagccagtataacactgaagccagaaaaaaagaagttgagcagaagacgtgggcagaaactgtaattacagaaattcctaatcatgtgaacttggatcaatatgttggacaagaaaatttgacacctcaacaggactcttcagtgtttataaaaccagaaaaactatttgatgttaagccagggacccttgagatatctcctcaccattcctttggacttccgttactatacctgccacttaaacctcctaatatgtttccatcaacctcaagagcatctattacagttccctcaacacctatccaacctatagcagaagaaagaaaatacccaagattgtcattacttcattcacatttgtccccagaaaataggtgcaaaaaaacacaacttatcccacttgaaaacctcattgcgtttaaacaaagccaacagaaactaacacataatttatttgaacaaggtgatgctggacaccttcaacttctaaaggtcaaaatagaaccacctgaagtaagacaaggaaaggacagtaaaaaaaggcaaagaagaagagctgagaaagagctgcaagaaaaaagatgtgagaaactgaggagaaaaccaaatgtgacttttcgaccagagaattccataattaataatgatgattcagaaatcattaagaaacccaaggaacaacaagaacattgtggttcccatcctttggatgacttcgacgttccttttgaaatgctacaagatgataatacttcagctggattgcatttcatggcctctgtaaaaaagaaagctataggaagtcaagatgcaagtacaaatacagacccagaacatgagcctttgactgctcctcagctcttggtcccagatgtctatctaaatctgaagctttccagtgaaatgtcagagaaaccttggtcaccctcaatacctcatacagtaacaaacttggttggacatacttatataaatgtgattgacattgaagctaatgatcttctacaggaattacctgtgagagaagagccttcaaatgataatgttatcaaacagcaaagcgatcatctagcagttccatcgtctgcagagttacattatatggcagcttcagttactaatgctgttcccccacataattttaagagtcaaggtctgccaaaaccagagttccgattcaaaggacagagcacaaagtcagactctgcagaagattatctattgtggaaacggctgcaaggtgtctctgcagcttgccctgcaccaagctctgcagctcaccaactagagcatctcagtgctaagcttcagaaaattgacgagcagttgctagcaatacagaacattgctgaaaacatagaacaggatttccccaagcctgaaatgctagatctacattgtgataagattggaccagtggatcacattgaattctcttctggccctgaattcaaaaaaacattagcttcaaaaaccattagcatttctgaagaagtgcgttttttgacccatatggatgaagaagatcaaagtgacaaaaaggagacttcagaacctgaattttcaataacagaaaattattctggtcagaaaacctgtgtgtttcctactgccgattcagctgtcagcctttccagttccagtgatcagaatactacttctcctggtatgaatagcagtgatgaattgtgtgagagtgtttcagtacatccgctccagatgactggattgactgatattgcagacattattgatgaccttataattaaagacggagtttccagtgaagaacttggcttaacagaacaagctatgggcacctccagaattcagcattattctggcagacattcacaaagaactgacaaggaaagaagagagattcaagcctggatgaaaagaaaacgaaaagaaagaatggcaaagtacttaaatgagctggcagaaaagagagggcaagaacatgatcctttctgtcccagaagcaatccactttacatgacttcaagggaaataaggctgagacaaaagatgaagcatgaaaaagacagattgctgctctctgaacactatagtcgtcgaatctcacaagcgtacggtctgatgaatgaactgttatctgagtcagtacagctaccaactctaccacagaaaccattgcctaacaaacccagccctactcagtcttccagttgtcaacactgcccttctccaagaggagagaatcaacatggtcacagttttctaataaatcgacctggaaaagtcaaatatatgtccaaaccgagttatatccataagaggaagtcttttgggcaacctcaaggctcaccttggccacatggaactgccactttcaccatacagaaaaaagctggtggagccaaagcagcagtaagaaaggctacgcagtctccagttaccttccaaaaaggctctaatgctccgtgtcatagtctgcagcatacaaaaaaacatggaagtgctgggcttgcacctcaaaccaagcaggtgtgtgtagagtatgaaagagaggagactgtggtgagtccctggacgataccttcagaaatccataagattcttcatgagagtcacaattcccttctacaagacttgtctccaactgaagaggaagagccagagcatccttttggggtgggcggtgtggacagcgtgtctgagagcactggcagcatcctcagcaagctggactggaatgccatcgaagacatggtggccagcgtggaggaccagggcctgtctgtccactgggccctggacctgtaagacctggatatcattgggtttccatgcacaggccagcacctcagtaatgtggttctgaaagattaacaggtttaagggacagaagcaatgaaagaagcaatgtgaattttccatttgctttcatattattacctggattagccattaccagaggaaaaataaacatttctcagtaactttgcctttatggggaaagggttgactattgatgtattatatgtttttgtatttgatgcatcattaggcataatttttaaaatgataagtacctttcaagccaagtttgcataacctactttcaataaaaaccctctatcttgcctcctcctttattaccctctgagttttgagaaacaaccatatacagatgaatctaataggaaaaaaaaaaatcttttcattgagaagaaaatcagtctcacctgagaactcaattatgaaccctattttaaaacacctatgcagggtttagcctaggagtgaaaagaaaaaccaactaccttttaccaaccctgaatctctaaataagcaaagtttcatggaggccaggagatcttctgtcttctgccctgtagcctgaagccttggaggaagaaacaggaatggatgctttgggcaggaaagtaagggaatatgactccggcctctagaaggctcatcttaaatttgtaagaaccatggtacagagacctgattagtttttggtattgtgctccaataatgtcatagttttaagagataatttttatgagaattgactaagaaccagtatccttcaactacttcatcaatgtttggtataatataaaagcacactatcatctgaaaaagctattaaatacccctctttttccaaatatctacctgtgtgaagccaggttttacaacatgtattgcagcaagttgaatgcagaagcaggtatggtaattcagctgccttctatcaagctaaacattaaagagatttgtagaactataaaacaatgctactctccttaccaaattgttttagaaaatagctttataggctaacattattgttaattgtcatttaattgttttgtcatttaaaatattttaaattgttttctgttagtttcttttttgtatattctatgggtattttattgatacatgatagttgtacatttttatggggtgcatgtgatattttgatatgtgcatacaatgtgtagcaatcaaatcagggtaattgggatattcatcacctcaaacatttatcatttatttgtgttggaaacattcaaaccttttcttctagctatttatccattgttggatacttatatcaattctatatcttagctgttgtgaatagagctgcaataaatgtaggagtgcagatatctctttaaaaaaaaaaaaaaaaaa

SEQ ID NO: 12779 - DNA, 5162 bp, Homo sapiens
cagggccggtgggatcccctcgggctcccgccttagcatgctggccgggacatctggtgaacatggcctctgctactgcggcagcagcacgacggggcctcggccgggctctccctctcctctggcgtggctaccagaccgagcggggcgtttacggctaccggccgaggaagcccgagagccgcgagccccagggcgccctggagcgccccccagttgatcatggccttgccaggttggtgacagtatattgtgagcatggtcataaagctgccaaaatcaaccccctcttcaccggacaagccctgctggagaatgtgcctgaaatccaagccctggtgcagacactgcagggacccttccacacggcaggattattgaacatggggaaggaagaggcctcacttgaggaagtgttagtctatctcaatcaaatctactgtgggcagatttctattgaaacctcccaacttcagagccaggatgagaaagactggtttgccaagcggtttgaggaactgcaaaaggagacgtttaccacagaagagcgaaaacatctgtcgaaactaatgctggaatctcaggagtttgaccactttctggccaccaagttctcgacagtgaagcgatatggaggcgaaggggctgaaagcatgatgggctttttccacgagctgctgaaaatgtcggcctacagcgggatcactgatgtcattattgggatgccccatagagggaggctgaatttattgacaggccttctgcagttccctccagagctgatgttccgtaaaatgcgaggcttaagtgaatttccagagaatttctcagccactggagacgtcctgtctcacctgacctcctctgtggacctgtactttggggcgcaccatcccctccatgtgacaatgttgcccaatccctcgcacctggaggccgtcaaccccgtggccgtgggcaaaactcgcggcaggcagcagtctcgccaagacggcgattactctccagacaactcagcccagccgggggacagggtcatttgcttacaggtccatggtgatgcttctttctgtggtcaagggattgttcctgaaacattcacgctgtccaatctcccacatttcagaattggtgggagtgtgcatttgattgttaataaccagctgggttacaccactccagctgaaagaggaaggtcttctttatactgcagtgatattgggaagcttgtgggctgtgccatcatccatgtcaatggagacagcccagaggaagtggtccgtgccacacgactggcttttgaataccaacgccagttccgcaaggatgtgattattgatctgttgtgctacaggcagtggggccacaatgagctggatgagccattctacaccaaccccatcatgtacaaaatcatcagagctcgaaagagcattccagacacatatgcagagcacctcattgctggcggactcatgacgcaggaggaggtgtctgaaataaaatcctcctactatgccaagttgaatgatcacttaaataacatggcccactacaggccccctgccctgaacctgcaggcccactggcagggcctggctcagccagaagcgcaaatcaccacctggagtacaggtgtgcccctcgacctcctgcggtttgttggcatgaagtctgtagaggtgccaagagagctgcagatgcacagtcacctgctgaagacacatgttcagtccagaatggagaagatgatggacggaatcaagctagactgggccaccgcggaagctcttgccttgggttctttacttgctcaaggttttaatgttcgtctaagtggccaagatgttggtcgtggaactttcagtcagaggcatgcaatcgtggtttgccaggagacggatgacacctacatccccctgaaccatatggacccaaatcagaaggggtttctagaggtcagcaacagccccctgtcagaagaggccgtcctgggattcgaatatgggatgagcattgagagcccaaagttactgcccctgtgggaggcacagtttggcgatttcttcaatggtgcccagatcatctttgacacattcatctctggaggagaggccaagtggctcctacaaagcggcattgtcatcctccttccacatggctacgatggggctgggccagaccactcatcctgtcgaatagagcgtttcctgcagatgtgtgacagtgcggaagagggggtggacggagacactgtgaacatgtttgtggttcacccaacaactcctgcacagtatttccacttgcttaggagacagatggtccggaacttcagaaaaccactcattgttgcttcccctaagatgttactcaggctcccggcagccgtgtcaactcttcaagaaatggcaccaggaacaacatttaacccggtcattggtgattcatctgtggatccaaaaaaggttaagaccctcgtgttctgctccggcaaacatttctactccctggtgaaacaaagagaatctctgggggccaagaagcatgactttgccatcatccgagtagaggaactctgccccttcccgttggattctttacagcaagagatgagcaaatacaaacatgttaaagatcatatttggagtcaggaggaacctcagaacatgggtccgtggtcgtttgtttctccaaggtttgaaaagcagctggcctgcaagctccgtctggtgggccggccccctttgccagtacccgctgtaggaattggcacagttcacttgcaccagcatgaagatatcctcgccaagaccttcgcttgatgatgacttttgaagaaacactatttctctttaagaaaatggccattaaggccgggtggggtggcacatgcctgtaatcccagcactttgggaggccaaggctggtggatcacctgaggtcaggagttcgagaccagcctggccaacacggtgaaaccccgcctctactaaaaatacaaaaaatagccgggtgtggtggtgggcacctgtgatcccagcttcctgggaggctgaggcaagagaatcgcttgaatctgggaggcggaggttgcagtgagccaggatcacaccattgctgtccagcctgggtgacagagcaagactgcgtttcaaaaaaaaaaaaaaaaaaacccattaaaagaggcctccttcctccactctctcaacccctctgttgggtaacatgaaaagactgtattcctctaagatgttgggattgatatacgtgatttaatctgcaataggtggaataaccaggggaactggttatgaatatgtgaatgcaaccagcaaatttatccttgaaggtgtgatggtagaaataggaaaacaacaaaagaaaaacaataacaaaaaaagaaagtgtgatggctgggtgcagtggctcacgcctgtaatcccagcactttgggaggcttaggcggctggatcacctgaggtcaggagttcaagaccagcctggtcaacgtggtgaaacgccgtttctactaaaaatatgaaaattagttgggtgtggtggcatgcgcttgtagtctcagctactccggaggctgaggcaggagaattgcttgaacctggaaggcagaggttgcagtgagccgaaatggcgccactgtactccaacctgggcgacagagcaagactccatctcataaattaaaaggaaagtatgatagtgttatggattttagctctgagtgagctggaaaactaggtcattatctagatgatttcagacttgaccctaattgaccatatatgaccaggaaacacttctgagtttacagctccgtggagatgacctcaacactgcctcttgatttgtttgatgcatgtcactttcattaattttccccctcctttttgaaagtcctgtggcagtactaatattttcattttatgtaatctctggtgctgctttccagtcactgtatgaagtgtctccccaacactagcaaatctaggtcctactaaatacaaatctctgggtggatgatcttctagtactgtatttttaaattaaggagttttagttataatgaaattgatttgtagtctgttttgccgtaaacttgtttttctttaaattgttcttacagtgatatcttactatttttaactgtctggggtttctgatatggggatttcagcccctggttaatcagtcttgtccctacaagtccctgatgcagtatgtttatttgtgatgtttaaagaacatttcttggctgggcgctgcggcttgcgcctgtaatctcagcactttgggaggctgagatgggtggatcacctgaggttgggagttcgagaccagcctgacaaaacatagtgaaaccccgtctctactaaaaatacaaaaattagctgggcgtggtggtgggtgtctgtaatcccagctattcgggaggctgaggcaggagaatcgcttgaacccaggaggtggaggttgcagtgagctgagatcctgccactgcactccagtctgggtgacagagcaagactccatctcaaaaaataaataaatagaaagagagagagaggaaaaaaaaagaaaagaacacttctttatttgagggactttcccaacaccaggtgcttggggatttcttagagatcaccaaccgactccctcactgtgaaattaaaccaagtactggaaacgtaactaaacagcgaaccatgtagcttcacctgactcagtgctgggggcctctaccatctactgtgcttgtgtcatgatgctttttctctgaagtggtgtgggaagtaccaggggactggcagaagcccaggccctctctacttttaccagcaactgatcatgtctttcagaatccatgtacatataggctgttctagccacagtggtagatttatgattcacatccgaaagtgtgccttagttatcaatttaacatttctctagtattcatatcccttttcttaccatatacctcagtgtatccttcctgtgtcaagccttataaatcatgtaatttagtgccactcatgtaaatcagtaaaatcacaaaggtctatttaatgaaaacgatttaccaatgttgtttttttttaacaagaaaaaaaataaaagcacattgtcattttttttcctcaaaa

SEQ ID NO: 12780 - DNA, 1007 bp, Homo sapiens
caaaggcagcgcgcgccgcgagctgtcgcgtctggtcgtggtctggcggagctgcggttggcttgtggcgtctccgccgccgccgccctcccttcctcttccccatcttcttctctcggtcccgggagcccccgcccggagagagtcgcggttgctgatcgtggtgcttgagtagagccgtggttggtgacagcatgacgagcgaggtgatagaagacgagaagcaattctattccaaggccaagacctactggaaacaaatcccacccacggtggacggcatgcttggggggtatggccacatctccagcatcgacatcaacagctcccggaagtttctgcagaggtttttgagggaaggcccgaacaagacaggaacgtcctgtgccctggactgtggagctggcattgggaggatcaccaagcggctgctcctgccgctgttcagagaggtggatatggtcgacataacggaggacttcctggttcaagccaagacctacctgggggaggagggcaagagggtgaggaactacttctgttgtgggctccaggacttcaccccggagccggactcttacgacgtgatctggatccagtgggtgataggccacctcaccgatcagcacctggccgagttcctgcggcgctgcaagggcagcctccgccccaacggcatcatcgtcatcaaagacaacatggcccaggagggcgtgattctggacgacgtggacagcagcgtgtgccgggaccttgacgtggtccgcaggatcatctgcagtgcaggcctcagcctcctggccgaggagaggcaggagaacctccccgatgagatctaccatgtctatagctttgccctgagatgagccggggctggcaggagaaactgaggaaccacagtcctggtggggggagctggcagctgggcaagatccaggcgccacgctggcggttcgtgagtgtcgaggcaccactaaatatagctgtctgccgtccactcataaaaa

SEQ ID NO: 12781 - DNA, 1877 bp, Homo sapiens
ccgcgacggcgcgcccccggcggctgctgcggcggcgggagcgaggcgaccgctgaggccgcggagagtgacggcggcccggccgacgggagccggggcggggcggcggcccagcgaaggagcgcgcgggcggtctggccccgccccctccccgcccgccttcccggtgaccttcaggggcccgggtggcgggcgcaggcccctgcggcggcggcgggatgttcgtgcaggaggagaagatcttcgcgggcaaggtgctgcggctgcacatctgcgcgtccgacggcgccgagtggctggaggaggccaccgaggacacctcggtggagaagctcaaggagcgctgcctcaagcactgtgctcatgggagcttagaagatcccaaaagtataacccatcataaattaatccacgctgcctcagagagggtgctgagtgatgccaggaccatcctggaagagaacatccaggaccaagatgtcctattattgataaaaaagcgtgctccatcaccacttcccaagatggctgatgtctcagcagaagaaaagaaaaaacaagaccagaaagctccagataaagaggccatactgcgggccaccgccaacctgccctcctacaacatggaccgggccgcggtccagaccaacatgagagacttccagacagaactccggaagatactggtgtctctcatcgaggtggcgcagaagctgttagcgctgaacccagatgcggtggaattgtttaagaaggcgaatgcaatgctggacgaggacgaggatgagcgtgtggacgaggctgccctgcggcagctcacggagatgggctttccggagaacagagccaccaaggcccttcagctgaaccacatgtcggtgcctcaggccatggagtggctaattgaacacgcagaagacccgaccatagacacgcctcttcctggccaagctcccccagaggccgagggggccacagcagctgcctccgaggctgccgcgggagccagcgccaccgatgaggaggccagagatgagctgacggaaatcttcaagaagatccggaggaaaagggagtttcgggctgatgctcgggccgtcatttccctgatggagatggggttcgacgagaaagaggtgatagatgccctcagagtgaacaacaaccagcagaatgccgcgtgcgagtggctgctgggggaccggaagccctctccggaggagctggacaagggcatcgaccccgacagtcctctctttcaggccatcctggataacccggtggtgcagctgggcctgaccaacccgaaaacattgctagcatttgaagacatgctggagaacccactgaacagcacccagtggatgaatgatccagaaacggggcctgtcatgctgcagatctctagaatcttccagacactaaatcgcacgtaggtggcgttgttccactcggctatcaggccacagcagccccctggtgcggcccgagaccgggcagagtggacctcacctggaaactcaccttcagcgcctcagccctggactgttagaggtgctgcagctgctcctgctctctgatcttattgcttataaactttggtgacggtagtgtgtaaggccgtatttttagcatctgacaggtgtttacaaaaaagtggttgtcgcactgggaagtggagtgatggcctcgtctccagtgctcctctgggctcttgagttgctgcttgaattgccgtgtagacatttgcttggagagtccacttgttatttgacggaggtaggtttcaacccagagttaatgtcaagcatgctaatttaactagtcactcacagatgacttttctttaataaagtcccttttcctaaaaaaaaaaa

SEQ ID NO: 12782 - DNA, 2297 bp, Homo sapiens
caccggtaccgtggtggaagcgcgccctgggctgccgggggcgcggccgcggtggcacttggacccgaggaggcggcagctctaccgtcgcaggactctgcccttccccaagagaggaaccagaaggaggacctatcagcccttgaaattctaaaagtcatgtcccttgggtcagaattgttcagggatgtggccatagtcttctcccaagaagaatggcagtggttggcacctgctcagagggatttgtacagagacgtgatgttggagacctacagcaacctggtctcactgggtcttgccgtttccaaacctgatgtgatctccttcctagagcaaggcaaagagccctggatggtggagagagtggtgtctggaggcctgtgtccagtattggagtccagatatgataccaaggaattatttccaaagcagcatgtttatgaagtcgaatcaccccaatgggagataatggaaagccttacaagttatggtcttgagtgttcaagtttccaagatgattgggaatgcagaaaccagtttgacagacaacagggaaatccagacagacatttccatcagatgatcatcagacatgaagaaatgcccacttttgaccagcatgcatcccttactttttatcagaaaattcatactagagaaaaaccttttgggtataataaatgtagaaaagacttctggcaaaaggaactccttattaatcatcaaggaatttatactaatgagaaaccctataaatgtaaggaatgtgggaaggcctttaaatatggctcacgactaattcaacatgagaatattcattctggtaagaaaccatatgaatgtaaggaatgtggaaaggccttcaattctggttcaaattttatacaacatcagagagttcatactggtgagaaaccgtatgaatgtaaagattgtgagaaggcctttagtcgaagctcacagttgattgaacatcagcgaactcacacaggcgagaaaccctatcagtgtaaggaatgtggcaaggccttcaatcggatctcacatcttaaagtacattatagaattcatactggtgaaaaaccctatgcatgcaaggaatgtgggaaaacctttagtcatcgttctcagttgattcaacatcagactgttcatactggcaggaaactctatgaatgtaaggaatgtgggaaggcttttaatcaaggctcaactcttatacgacatcagagaattcataccggtgagaaaccctatgagtgcaaagtatgtggaaaggcctttagagtgagctcacaactcaagcaacatcagagaattcacactggagagaaaccctaccaatgtaaggtatgtggtagggccttcaaacgggtctcacatcttactgtacattacagaattcatacaggtgaaaagccatatgaatgtaaggaatgtgggaaggcttttagtcattgctcacaattgattcatcatcaggttattcacactgagaaaaagccctatgaatataaggaatgtgagaagaccttgagtcatgattcaactaccgttcaacctcagagaatgcataatagagaaacacatgtgaatataataaatgtagaaaagccttccatcagcagttaccccttactaatcatcagagaatttatgttggcaagcaaccatatgaatggaagtaatggggaaagcccattagcctaggctaattgtgactgtgacttacttctccctcttggagaaagacttgaagaatgtaatgccagtgacaatgccttcattcagaggtaagcctttatcctaagtctgaaaattcatatcaaagaaaattttatggatgtaaattgttcagatcataattgtcaaaaatgctgggaaaggttgggagaaattttatttctaacacattccagaaccacattttctaaccacagtgtagtaattttatcaagagcaaaagttatagttttcttacaagttaaaaaaacagccagattatcatttgcttaacaaagaaatcatgcaattaccataaatggtaatgaaaagaatgaattgagagtttaacatgccaagagatgtgaaatgtggccaaagagatgtgagggtaaggggaaagccaaagctacactggaggaatttttatagcctttgaatgcatgcatatacatgaaaatctgaaagataaactcatatgcactaaacatgctattcaagtctaccaaacatccaggcagtgaaagaagaaagtaacagaaaatgatgaaataaagagaccatcttacaat

SEQ ID NO: 12783 - DNA, 3599 bp, Homo sapiens
gcccgttgtctgtgtgtgggactgaggggccccgggggcggtgggggctcccggtgggggcagcggtggggagggagggcctggacatggcgctgaggggccgccccgcgggaagatgaataagggctggctggagctggagagcgacccaggcctcttcaccctgctcgtggaagatttcggtgtcaagggggtgcaagtggaggagatctacgaccttcagagcaaatgtcagggccctgtatatggatttatcttcctgttcaaatggatcgaagagcgccggtcccggcgaaaggtctctaccttggtggatgatacgtccgtgattgatgatgatattgtgaataacatgttctttgcccaccagctgatacccaactcttgtgcaactcatgccttgctgagcgtgctcctgaactgcagcagcgtggacctgggacccaccctgagtcgcatgaaggacttcaccaagggtttcagccctgagagcaaaggatatgcgattggcaatgccccggagttggccaaggcccataatagccatgccaggcccgagccacgccacctccctgagaagcagaatggccttagtgcagtgcggaccatggaggcgttccactttgtcagctatgtgcctatcacaggccggctctttgagctggatgggctgaaggtctaccccattgaccatgggccctggggggaggacgaggagtggacagacaaggcccggcgggtcatcatggagcgtatcggcctcgccactgcaggggagccctaccacgacatccgcttcaacctgatggcagtggtgcccgaccgcaggatcaagtatgaggccaggctgcatgtgctgaaggtgaaccgtcagacagtactagaggctctgcagcagctgataagagtaacacagccagagctgattcagacccacaagtctcaagagtcacagctgcctgaggagtccaagtcagccagcaacaagtccccgctggtgctggaagcaaacagggcccctgcagcctctgagggcaaccacacagatggtgcagaggaggcggctggttcatgcgcacaagccccatcccacagccctcccaacaaacccaagctagtggtgaagcctccaggcagcagcctcaatggggttcaccccaaccccactcccattgtccagcggctgccggcctttctagacaatcacaattatgccaagtcccccatgcaggaggaagaagacctggcggcaggtgtgggccgcagccgagttccagtccgcccaccccagcagtactcagatgatgaggatgactatgaggatgacgaggaggatgacgtgcagaacaccaactctgcccttaggtataaggggaagggaacagggaagccaggggcattgagcggttctgctgatgggcaactgtcagtgctgcagcccaacaccatcaacgtcttggctgagaagctcaaagagtcccagaaggacctctcaattcctctgtccatcaagactagcagcggggctgggagtccggctgtggcagtgcccacacactcgcagccctcacccacccccagcaatgagagtacagacacggcctctgagatcggcagtgctttcaactcgccactgcgctcgcctatccgctcagccaacccgacgcggccctccagccctgtcacctcccacatctccaaggtgctttttggagaggatgacagcctgctgcgtgttgactgcatacgctacaaccgtgctgtccgtgatctgggtcctgtcatcagcacaggcctgctgcacctggctgaggatggggtgctgagtcccctggcgctgacagagggtgggaagggttcctcgccctccatcagaccaatccaaggcagccaggggtccagcagcccagtggagaaggaggtcgtggaagccacggacagcagagagaagacggggatggtgaggcctggcgagcccttgagtggggagaaatactcacccaaggagctgctggcactgctgaagtgtgtggaggctgagattgcaaactatgaggcgtgcctcaaggaggaggtagagaagaggaagaagttcaagattgatgaccagagaaggacccacaactacgatgagttcatctgcacctttatctccatgctggctcaggaaggcatgctggccaacctagtggagcagaacatctccgtgcggcggcgccaaggggtcagcatcggccggctccacaagcagcggaagcctgaccggcggaaacgctctcgcccctacaaggccaagcgccagtgaggactgctggccctgactctgcagcccactcttgccgtgtggccctcaccagggtccttccctgccccacttccccttttcccagtattactgaatagtcccagctggagagtccaggccctgggaatgggaggaaccaggccacattccttccatcgtgccctgaggcctgacacggcagatcagccccatagtgctcaggaggcagcatctggagttggggcacagcgaggtactgcagcttcctccacagccggctgtggagcagcaggacctggcccttctgcctgggcagcagaatatatattttacctatcagagacatctatttttctgggctccaacccaacatgccaccatgttgacataagttcctacctgactatgctttctctcctaggagctgtcctggtgggcccaggtccttgtatcatgccacggtcccaactacagggtcctagctgggggcctgggtgggccctgggctctgggccctgctgctctagccccagccaccagcctgtccctgttgtaaggaagccaggtcttctctcttcattcctcttaggagagtgccaaactcagggacccagcactgggctgggttgggagtagggtgtcccagtggggttggggtgagcaggctgctgggatcccatggcctgagcagagcatgtgggaactgttcagtggcctgtgaactgtcttccttgttctagccaggctgttcaagactgctctccatagcaaggttctagggctcttcgccttcagtgttgtggccctagctatgggcctaaattgggctctaggtctctgtccctggcgcttgaggctcagaagagcctctgtccagcccctcagtattaccatgtctccctctcaggggtagcagagacagggttgcttataggaagctggcaccactcagctcttcctgctactccagtttcctcagcctctgcaaggcactcagggtgggggacagcaggatcaagacaacccgttggagcccctgtgttccagaggacctgatgccaaggggtaatgggcccagcagtgcctctggagcccaggccccaacacagccccatggcctctgccagatggctttgaaaaaggtgatccaagcaggcccctttatctgtacatagtgactgagtggggggtgctggcaagtgtggcagctgcctctgggctgagcacagcttgacccctctagcccctgtaaatactggatcaatgaatgaataaaactctcctaagaatctcctgagaaaaaaaaaaaaaaaaa

SEQ ID NO: 12784 - DNA, 5515 bp, Homo sapiens
cttttttcccttcttcaggtcaggggaaagggaatgcccaattcagagagacatgggggcaagaaggacgggagtggaggagcttctggaactttgcagccgtcatcgggaggcggcagctctaacagcagagagcgtcaccgcttggtatcgaagcacaagcggcataagtccaaacactccaaagacatggggttggtgacccccgaagcagcatccctgggcacagttatcaaacctttggtggagtatgatgatatcagctctgattccgacaccttctccgatgacatggccttcaaactagaccgaagggagaacgacgaacgtcgtggatcagatcggagcgaccgcctgcacaaacatcgtcaccaccagcacaggcgttcccgggacttactaaaagctaaacagaccgaaaaagaaaaaagccaagaagtctccagcaagtcgggatcgatgaaggaccggatatcgggaagttcaaagcgttcgaatgaggagactgatgactatgggaaggcgcaggtagccaaaagcagcagcaaggaatccaggtcatccaagctccacaaggagaagaccaggaaagaacgggagctgaagtctgggcacaaagaccggagtaaaagtcatcgaaaaagggaaacacccaaaagttacaaaacagtggacagcccaaaacggagatccaggagcccccacaggaagtggtctgacagctccaaacaagatgatagcccctcgggagcttcttatggccaagattatgaccttagtccctcacgatctcatacctcgagcaattatgactcctacaagaaaagtcctggaagtacctcgagaaggcagtcggtcagtcccccttacaaggagccttcggcctaccagtccagcacccggtcaccgagcccctacagtaggcgacagagatctgtcagtccctatagcaggagacggtcgtccagctacgaaagaagtggctcttacagcgggcgatcgcccagtccctatggtcgaaggcggtccagcagccctttcctgagcaagcggtctctgagtcggagtccactccccagtaggaaatccatgaagtccagaagtagaagtcctgcatattcaagacattcatcttctcatagtaaaaagaagagatccagttcacgcagtcgtcattccagtatctcacctgtcaggcttccacttaattccagtctgggagctgaactcagtaggaaaaagaaggaaagagcagctgctgctgctgcagcaaagatggatggaaaggagtccaagggttcacctgtatttttgcctagaaaagagaacagttcagtagaggctaaggattcaggtttggagtctaaaaagttacccagaagtgtaaaattggaaaaatctgccccagatactgaactggtgaatgtaacacatctaaacacagaggtaaaaaattcttcagatacagggaaagtaaagttggatgagaactccgagaagcatcttgttaaagatttgaaagcacagggaacaagagactctaaacccatagcactgaaagaggagattgttactccaaaggagacagaaacatcagaaaaggagacccctccacctcttcccacaattgcttctcccccaccccctctaccaactactacccctccacctcagacaccccctttgccacctttgcctccaataccagctcttccacagcaaccacctctgcctccttctcagccagcatttagtcaggttcctgcttccagtacttcaactttgcccccttctactcactcaaagacatctgctgtgtcctctcaggcaaattctcagccccctgtacaggtttctgtgaagactcaagtatctgtaacagctgctattccacacctgaaaacttcaacgttgcctcctttgcccctcccacccttattacctggaggtgatgacatggatagtccaaaagaaactcttccttcaaaacctgtgaagaaagagaaggaacagaggacacgtcacttactcacagaccttcctctccctccagagctccctggtggagatctgtctcccccagactctccagaaccaaaggcaatcacaccacctcagcaaccatataaaaagagaccaaaaatttgttgtcctcgttatggagaaagaagacaaacagaaagcgactgggggaaacgctgtgtggacaagtttgacattattgggattattggagaaggaacctatggccaagtatataaagccagggacaaagacacaggagaactagtggctctgaagaaggtgagactagacaatgagaaagagggcttcccaatcacagccattcgtgaaatcaaaatccttcgtcagttaatccaccgaagtgttgttaacatgaaggaaattgtcacagataaacaagatgcactggatttcaagaaggacaaaggtgccttttaccttgtatttgagtatatggaccatgacttaatgggactgctagaatctggtttggtgcacttttctgaggaccatatcaagtcgttcatgaaacagctaatggaaggattggaatactgtcacaaaaagaatttcctgcatcgggatattaagtgttctaacattttgctgaataacagtgggcaaatcaaactagcagattttggacttgctcggctctataactctgaagagagtcgcccttacacaaacaaagtcattactttgtggtaccgacctccagaactactgctaggagaggaacgttacacaccagccatagatgtttggagctgtggatgtattcttggggaactattcacaaagaagcctatttttcaagccaatctggaactggctcagctagaactgatcagccgactttgtggtagcccttgtccagctgtgtggcctgatgttatcaaactgccctacttcaacaccatgaaaccgaagaagcaatatcgaaggcgtctacgagaagaattctctttcattccttctgcagcacttgatttattggaccacatgctgacactagatcctagtaagcggtgcacagctgaacagaccctacagagcgacttccttaaagatgtcgaactcagcaaaatggctcctccagacctcccccactggcaggattgccatgagttgtggagtaagaaacggcgacgtcagcgacaaagtggtgttgtagtcgaagagccacctccatccaaaacttctcgaaaagaaactacctcagggacaagtactgagcctgtgaagaacagcagcccagcaccacctcagcctgctcctggcaaggtggagtctggggctggggatgcaataggccttgctgacatcacacaacagctgaatcaaagtgaattggcagtgttattaaacctgctgcagagccaaaccgacctgagcatccctcaaatggcacagctgcttaacatccactccaacccagagatgcagcagcagctggaagccctgaaccaatccatcagtgccctgacggaagctacttcccagcagcaggactcagagaccatggccccagaggagtctttgaaggaagcaccctctgccccagtgatcctgccttcagcagaacagatgacccttgaagcttcaagcacaccagctgacatgcagaatatattggcagttctcttgagtcagctgatgaaaacccaagagccagcaggcagtctggaggaaaacaacagtgacaagaacagtgggccacaggggccccgaagaactcccacaatgccacaggaggaggcagcagcatgtcctcctcacattcttccaccagagaagaggccccctgagccccccggacctccaccgccgccacctccaccccctctggttgaaggcgatctttccagcgccccccaggagttgaacccagccgtgacagccgccttgctgcaacttttatcccagcctgaagcagagcctcctggccacctgccacatgagcaccaggccttgagaccaatggagtactccacccgaccccgtccaaacaggacttatggaaacactgatgggcctgaaacagggttcagtgccattgacactgatgaacgaaactctggtccagccttgacagaatccttggtccagaccctggtgaagaacaggaccttctcaggctctctgagccaccttggggagtccagcagttaccagggcacagggtcagtgcagtttccaggggaccaggacctccgttttgccagggtccccttagcgttacacccggtggtcgggcaaccattcctgaaggctgagggaagcagcaattctgtggtacatgcagagaccaaattgcaaaactatggggagctggggccaggaaccactggggccagcagctcaggagcaggccttcactgggggggcccaactcagtcttctgcttatggaaaactctatcgggggcctacaagagtcccaccaagagggggaagagggagaggagttccttactaacccagagacttcagtgtcctgaaagattcctttcctatccatccttccatccagttctctgaatctttaatgaaatcatttgccagagcgaggtaatcatctgcatttggctactgcaaagctgtccgttgtattccttgctcacttgctactagcaggcgacttaggaaataatgatgttggcaccagttccccctggatgggctatagccagaacatttacttcaactctaccttagtagatacaagtagagaatatggagaggatcattacattgaaaagtaaatgttttattagttcattgcctgcacttactggtcggaagagagaaagaacagtttcagtattgagatggctcaggagaggctctttgatttttaaagttttggggtggggggttgtgtgtggtttctttcttttgaattttaatttaggtgttttgggtttttttcctttaaagagaatagtgttcacaaaatttgagctgctctttggcttttgctataagggaaacagagtggcctggctgatttgaataaatgtttctttcctctccaccatctcacattttgcttttaagtgaacactttttccccattgagcatcttgaacatactttttttccaaataaattactcatccttaaagtttactccactttgacaaaagatacgcccttctccctgcacataaagcaggttgtagaacgtggcattcttgggcaagtaggtagactttacccagtctctttccttttttgctgatgtgtgctctctctctctctttctctctctctctctctctctctctctctctgtctgtctcgcttgctcgctctcgctgtttctctctctttgaggcatttgtttggaaaaaatcgttgagatgcccaagaacctgggataattctttactttttttgaaataaaggaaaggaaattcaaaaaaaaaaaaaaaaaaaaaaaaaaaaaaaaaaaaaaaaaaaaaaaaaaaaaaaaaaaaaaaaaa

SEQ ID NO: 12785 - DNA, 8583 bp, Homo sapiens
ggcttccgctggtggcctagagcggggcccggtatggaggtgggctagaggccgacgccagccagagagcgaaatgttcttttggggccagagtctgggcatatatgaatgcaaatccgtgttttgttcacaactaagcccagctgagacgatcacttttctgtaggccatttgtccaggtacagaatgagcacatgttgttggtgtacgccaggtggtgcttccaccattgacttcctaaagcgctatgcttccaacactccgtccggtgaatttcaaacagccgacgaagacctctgctactgcttggagtgtgtggctgagtaccacaaagcaagagatgaattgccattcttgcatgaggttttatgggaattagaaaccttacgtctcataaatcactttgaaaaatccatgaaggcagaaattggagatgatgatgagttatatatagtagacaataatggagagatgccactgtttgacatcactgggcaagactttgaaaataagcttcgagttcctcttcttgaaatactgaaatatccttacttgcttctacatgaacgtgttaacgagttatgtgttgaagcactttgtcggatggaacaagccaattgctcctttcaggtgtttgataaacatccagggatctatttgtttttagtccatcccaatgaaatggttcggcgttgggctatcttgactgcaagaaacttggggaaagtggacagagatgattattatgacttacaagaagttttactttgcctttttaaagtcattgagttggggcttttagagagtccagacatttatacttcttctgtcctagagaagggtaaactgattcttctgccctcacacatgtatgatactaccaactacaaaagctattggttaggtatttgcatgttgctgaccattcttgaggaacaagccatggattccctgttgttgggctcagacaaacaaaatgattttatgcaatcgatacttcacactatggagagggaagcagatgatgatagtgtggatcctttctggccagcgttacactgttttatggtgattctggatcgccttggatctaaggtctggggtcaacttatggatcctattgtggcatttcaaaccattatcaacaacgcaagctacaatagagagatccgacatatacggaacagctctgtaaggaccaagttagaaccggagtcctatctggatgatatggtgacttgcagccagatcgtatacaattacaatcctgaaaagaccaaaaaggattctggatggagaacagccatttgcccagattattgtcctaacatgtatgaagaaatggaaacattagccagtgtacttcagtcagatattggtcaagacatgcgtgttcataacagcacatttctatggttcatcccttttgtccagtccctcatggatcttaaggatttgggtgtggcttacatagcacaggttgttaatcatctgtactctgaagtcaaagaagtcctcaaccaaacagatgctgtgtgtgacaaagtcactgaattttttcttctaattttggtatcagtgattgaactgcatagaaataaaaaatgtttgcatttgctgtgggtaagttcccagcaatgggtggaagccgtcgtcaaatgtgccaagcttcctaccactgcgtttacacggagttctgagaaatcatctggaaattgctccaaaggaacagcaatgatatcttcactgtcattgcattccatgccatctaactctgtacaacttgcttatgtgcagctgattagaagtctccttaaagaaggttatcagcttgggcagcagtctctttgcaagcgattctgggataagctcaacttattccttagaggaaatttatctctaggttggcagttgactagtcaggaaacccatgagctacaaagttgcttaaagcaaattattagaaacataaaattcaaagcacctccatgtaacacttttgtggatctgacttctgcatgtaaaatctctcctgcatcttataataaagaagaaagtgaacaaatggggaagacgtctagaaaagatatgcattgtttggaagcttccagcccaacattttctaaagaaccaatgaaagtgcaagacagtgtatcgatcaaagcagataacactatagaaggtgacaataatgagcaaaattatataaaggatgtgaaactagaggaccatctcttagctgggtcatgcttaaagcagagtagtaaaaacatttttactgaaagagctgaagatcaaattaaaataagtacaaggaagcagaagtctgtaaaagagatctcttcatatacaccaaaggactgtacttcaagaaatggtccagaaaggggatgtgacagaggaataatagtatcaacacgtttgttgactgattctagcactgatgctttggaaaaagtgtccacatcgaatgaagatttctctttaaaggatgatgctcttgctaaaacctcaaaacgaaaaactaaggtacagaaagatgaaatctgtgcaaagttatcacatgtaataaagaagcaacacaggaagagtactttggtcgataatactatcaatttagatgaaaatttgactgtatctaacattgagagtttctattcaaggaaagatacaggagttcagaaaggagatggtttcatacacaatctttctttagaccctagtggtgttctggatgataagaatggagaacaaaaatctcaaaacaatgtattgccaaaagagaaacaattaaagaatgaagaattagttattttctctttccatgaaaacaattgtaaaatacaggaatttcatgttgatggtaaagaattgatcccttttacagaaatgaccaatgcttcagagaagaaatcatctccctttaaagatcttatgactgtacctgaatcaagagatgaggagatgagtaatagtaccagtgtgatttattctaacttgacaagagaacaggcccctgacatcagtcctaaatctgacaccttaacggattctcagatagacagagaccttcacaaattatctttactagctcaagccagtgttattacgttcccatccgattcacctcagaactcatcgcagctgcaaaggaaagtaaaagaagataaaagatgtttcacagctaaccaaaataatgttggagatacctcccgtggacaggttattattatttcagattctgatgatgatgatgatgaaagaatcctgagtcttgagaaactcactaaacaggacaaaatatgccttgagagggaacatccagagcagcacgtttcaacagttaatagtaaggaggaaaagaatccagtaaaggaagaaaagacagagactctttttcagtttgaggaatctgattctcagtgttttgagtttgaaagttcatctgaagtgttttcagtttggcaagatcatccagacgataataattcagttcaagatggtgagaaaaaatgtttggctcctatagccaatactacaaatggtcagggttgtacagattatgtatctgaagttgttaaaaaaggagcagagggcattgaagaacacacaagaccacggagtatttctgttgaagaattttgtgaaattgaagtaaaaaagcctaagagaaaacgatctgaaaaaccaatggctgaagatcctgtgaggccttcatcttctgtcagaaatgagggccagtctgatactaataagagagagcttgtgggaaatgattttaaaagtattgatagaaggacttcaactcccaattcacgtattcagagagccactacggtttcacaaaagaagtcttcaaagctttgtacttgtacagaacccatcaggaaagttccagtttctaagacccctaagaaaactcattcagatgccaaaaaaagacagaatagaagttcaaattacctaagttgtagaacaactcctgctatagtgccgccaaagaaatttcgtcagtgtcctgagccaacttcaacagctgagaaacttggcctgaaaaagggtcctcgtaaggcatatgagttgtcccagcggtctttggattatgtagctcaattacgtgatcatggcaaaactgttggagtagttgatacccgaaaaaagactaaattaatttctcctcagaacctgtctgtcagaaataataagaaacttctgactagtcaagaacttcagatgcaaaggcagatcagacccaaatcacaaaaaaatagacgaagactttctgattgtgaaagtacagatgttaaaagagcagggtcacatacagcacagaattctgacgtatttgtaccagaatctgataggtcagattataattgtacaggaggaactgaggtacttgccaacagtaacagaaaacagttaataaaatgcatgccttctgaaccagaaaccataaaagcaaaacatgggtctccagcaactgatgatgcttgccctttgaaccagtgtgattctgtagtgttaaatggaacagtaccaacaaatgaagtaattgtctccacttcagaagaccctctgggtggaggtgatccaacagcacgtcatatagagatggcagctttgaaagaaggagagcctgactccagcagtgatgcagaggaagataacttatttttaacccaaaatgatcctgaagatatggatttatgttcacaaatggagaatgacaattataaactcattgaactaattcatggaaaagatacagttgaggttgaagaagattctgtaagtcggcctcagttggaatctttgagtggcacaaagtgtaagtacaaagattgtcttgaaaccacaaaaaaccagggtgaatactgcccaaaacactctgaagtgaaagcagcagatgaagatgtatttcgtaaacctggcttgcctcctcctgcatctaaacctttgagacctaccactaagatttttagctcaaagagtacttcacgaattgctggtctttctaaatctttggaaacttcttcagcactttcaccgtctctaaaaaataagtcaaaggggatacagtcgattttgaaagtaccacagccagttcccctcatagctcagaagccagttggtgaaatgaagaattcgtgcaatgttcttcatcctcagtctccgaataattccaacaggcaaggttgcaaagttccatttggtgaaagcaaatattttccatcttcctctccagtaaacattcttttgtcatcacagtctgtctctgacaccttcgttaaagaggtcttaaaatggaaatatgaaatgtttttgaactttggtcagtgtgggccccctgcaagtctttgtcagtccatctcaagacctgtgcctgtcagatttcacaattatggagattattttaatgtttttttccctttgatggtattgaatacttttgaaacagtggcacaagaatggctcaactctccaaatagagagaatttctatcagttgcaagtacgaaaatttcctgccgattatataaaatactgggagtttgcagtttatctggaagaatgtgaactggctaaacagctttatccaaaggaaaacgatttggtgtttttagctcctgagagaataaatgaagagaagaaagatacaaagagaaatgacatacaagatctccacgaatatcattctggttatgttcataaatttcgccgcacgtcagtcatgcgtaatgggaaaactgagtgttacctttccatccagactcaagagaactttccggccaatttaaacgaacttgtgaattgtattgtaatcagttctctggtaactacacaaaggaagttgaaagccatgtctctgttgggtagtcggaaccaactggctagagctgttctgaatccaaaccctatggacttctgtacaaaagatttactgactacaacatctgagagaattattgcgtacttaagagatttcaatgaagatcaaaagaaagcaatagaaactgcatatgctatggtgaaacactcaccatcagttgccaaaatctgcttgattcatggaccacctggaacaggaaaatcaaaaactattgttggcctcctctatcgtctactgacagagaaccagaggaaggggcattcagacgaaaactccaatgccaaaatcaaacaaaaccgtgtcctcgtgtgtgcaccttccaatgcagctgttgatgaactcatgaaaaaaattatccttgaattcaaagaaaaatgtaaagacaagaagaatcctttaggaaactgtggagatataaatttagtacgactgggtccagaaaagtctattaatagtgaggttctaaagttcagtttggacagccaagtaaaccacagaatgaaaaaagagttaccttctcatgttcaggcgatgcataaaagaaaggaatttctagattatcagctggatgagctttcccggcagcgagctctatgccgaggtggacgggaaatacagaggcaagaattagatgaaaacatttccaaagtttctaaggaaaggcaggaacttgcttctaaaattaaagaggttcaaggacgcccacagaaaacacagagtatcatcatcttagagtcccatatcatctgctgcacgttgagcacaagtggtggtttactacttgagtctgctttccgtgggcaagggggtgtccccttcagctgtgtcattgttgatgaggctggacagtcttgtgaaattgagactcttactccactcatccatcgctgcaataagctcatcctagtaggagatcctaagcagctccctccgacagtcatctctatgaaagcacaggagtatggctacgaccagtcaatgatggctcgcttctgcagactgctggaagagaatgtagaacacaacatgatcagcaggctgcccattctacagctcactgttcagtacaggatgcatccagacatatgcctcttcccttctaattatgtttataacagaaacttaaaaacaaatagacagacagaagccattcgatgttcatcagattggccatttcagccataccttgtgtttgatgttggagatggttcagaaagacgggataatgactcatatataaatgttcaagaaataaaactggtgatggaaataattaagcttattaaagacaaaagaaaggatgttagttttcgaaacattggcataataactcattacaaggcccagaagacgatgattcagaaggatttggacaaagagttcgatagaaaaggaccagcagaagtagacactgtggatgcattccagggtcggcagaaggattgtgttattgttacgtgtgtcagagcaaatagcatccaaggttcaattggattcctggcaagtttgcagagattgaatgtcaccatcacacgagccaagtacagcctcttcatcctcggacatttgaggaccctgatggaaaaccagcattggaatcagctgattcaggatgctcagaagcgtggtgccattattaagacctgtgacaaaaactatagacatgatgcagtgaagattctgaaactcaagcctgtgctgcagagaagtctcactcaccctcctaccatagccccagaggggtccagaccccagggtggtttgcccagcagcaagctagacagtggatttgccaagacatctgttgctgcttctctataccacacaccctctgactccaaggaaattactcttactgttacttcaaaggaccctgaaagacctcctgttcatgaccaacttcaggacccacgactgctgaagaggatgggcattgaggtcaaaggaggaatattcctttgggatccacaaccctcgagcccccagcatcctggagcaacacctcctacgggcgagccgggcttccctgtcgttcaccaggacctgagccatatacagcagcccgctgctgtagtggctgctctgagcagccacaaacctcccgtgcggggcgaacctccagctgccagtcccgaggcttccacgtgtcagagcaaatgtgatgacccggaagaggagctctgtcacaggagagaggccagggctttcagtgaaggggagcaggagaagtgtggttccgagacccatcacaccaggaggaactctaggtgggacaagaggacactggagcaggaggacagcagttccaagaaaagaaagcttttataggaaagcccagtgacatgggccagcagccacagcatattgtaaactgaagatgaccagctcgtgggaccatctagataagcttgttttttgtaaggagtttgtgtgctgttggaaaacatggaaaatgcatccttaacacctgagcctctggtcatcttcagtattttctgtcatttgcaaaagctttcagagggcattgtgtatccgtaataatgtccttgaagtcagagactggaaatgttgatctcttagtcttctatagacaaggaggtcagactggagtgaatgttgtaaaagttgaaatgtatatttgtatagcaaataacaaaatccttttaaaattcaaaaaaaaaaaaaaaaaaa

SEQ ID NO: 12786 - DNA, 2875 bp, Homo sapiens
gaattctccggagctgaaaaaggatcctgactgaaagctagaggcattgaggagcctgaagattctcaggttttaaagacgctagagtgccaaagaagactttgaagtgtgaaaacatttcctgtaattgaaaccaaaatgtcatttatagatccttaccagcacattatagtggagcaccagtattcccacaagtttacggtagtggtgttacgtgccaccaaagtgacaaagggggcctttggtgacatgcttgatactccagatccctatgtggaactttttatctctacaacccctgacagcaggaagagaacaagacatttcaataatgacataaaccctgtgtggaatgagacctttgaatttattttggatcctaatcaggaaaatgttttggagattacgttaatggatgccaattatgtcatggatgaaactctagggacagcaacatttactgtatcttctatgaaggtgggagaaaagaaagaagttccttttattttcaaccaagtcactgaaatggttctagaaatgtctcttgaagtttgctcatgcccagacctacgatttagtatggctctgtgtgatcaggagaagactttcagacaacagagaaaagaacacataagggagagcatgaagaaactcttgggtccaaagaatagtgaaggattgcattctgcacgtgatgtgcctgtggtagccatattgggttcaggtgggggtttccgagccatggtgggattctctggtgtgatgaaggcattatacgaatcaggaattctggattgtgctacctacgttgctggtctttctggctccacctggtatatgtcaaccttgtattctcaccctgattttccagagaaagggccagaggagattaatgaagaactaatgaaaaatgttagccacaatccccttttacttctcacaccacagaaagttaaaagatatgttgagtctttatggaagaagaaaagctctggacaacctgtcacctttactgacatctttgggatgttaataggagaaacactaattcataatagaatgaatactactctgagcagtttgaaggaaaaagttaatactgcacaatgccctttacctcttttcacctgtcttcatgtcaaacctgacgtttcagagctgatgtttgcagattgggttgaatttagtccatacgaaattggcatggctaaatatggtacttttatggctcccgacttatttggaagcaaattttttatgggaacagtcgttaagaagtatgaagaaaaccccttgcatttcttaatgggtgtctggggcagtgccttttccatattgttcaacagagttttgggcgtttctggttcacaaagcagaggctccacaatggaggaagaattagaaaatattaccacaaagcatattgtgagtaatgatagctcggacagtgatgatgaatcacacgaacccaaaggcactgaaaatgaagatgctggaagtgactatcaaagtgataatcaagcaagttggattcatcgtatgataatggccttggtgagtgattcagctttattcaataccagagaaggacgtgctgggaaggtacacaacttcatgctgggcttgaatctcaatacatcttatccactgtctcctttgagtgactttgccacacaggactcctttgatgatgatgaactggatgcagctgtagcagatcctgatgaatttgagcgaatatatgagcctctggatgtcaaaagtaaaaagattcatgtagtggacagtgggctcacatttaacctgccgtatcccttgatactgagacctcagagaggggttgatctcataatctcctttgacttttctgcaaggccaagtgactctagtcctccgttcaaggaacttctacttgcagaaaagtgggctaaaatgaacaagctcccctttccaaagattgatccttatgtgtttgatcgggaagggctgaaggagtgctatgtctttaaacccaagaatcctgatatggagaaagattgcccaaccatcatccactttgttctggccaacatcaacttcagaaagtacaaggctccaggtgttccaagggaaactgaggaagagaaagaaatcgctgactttgatatttttgatgacccagaatcaccattttcaaccttcaattttcaatatccaaatcaagcattcaaaagactacatgatcttatgcacttcaatactctgaacaacattgatgtgataaaagaagccatggttgaaagcattgaatatagaagacagaatccatctcgttgctctgtttcccttagtaatgttgaggcaagaagatttttcaacaaggagtttctaagtaaacccaaagcatagttcatgtactggaaatggcagcagtttctgatgctgaggcagtttgcaatcccatgacaactggatttaaaagtacagtacagatagtcgtactgatcatgagagactggctgatactcaaagttgcagttacttagctgcatgagaataatactattataagttaggtgacaaatgatgttgattatgtaaggatatacttagctacattttcagtcagtatgaacttcctgatacaaatgtagggatatatactgtatttttaaacatttctcaccaactttcttatgtgtgttctttttaaaaattttttttcttttaaaatatttaacagttcaatctcaataagacctcgcattatgtatgaatgttattcactgactagatttattcataccatgagacaacactatttttatttatatatgcatatatatacatacatgaaataaatacatcaatataaaaataaaaaaaaacggaattc

SEQ ID NO: 12787 - DNA, 5166 bp, Homo sapiens
ccggacccaagtctgcagcggcgccattggcgtgtggaaaatgccaccagatggcgggttaggattgcagctccgttgaaggcgcggcccccgctcccgaacccccggcgaccaccccgtaacaacccccccacatcgggaataacacaccggagacttttggggggaaactaggtcgatggtcggcggcgcccggatgggcagctgaggattgcctttgaggttattttaaaagttttgagttgtacagcacttgattattttgctgcattgtgaaaggacctctccagcaatgattacttcagaattaccagtgttacaggattcaactaatgaaactactgcccattccgatgctggcagcgagcttgaagaaacagaggtcaaaggaaaaagaaaaaggggtcgtcctggccggcctccatctacaaataagaaacctcgaaaatctccaggtgagaagagcagaattgaagctggaattagaggagcaggccgtggaagagctaatggacaccctcaacagaatggggaaggggagcctgtcacattatttgaggtggtgaaactggggaaaagtgcaatgcagtccgtggtggatgactggattgaatcatataaacaagacagggacatcgcacttctggatttaatcaacttttttatccagtgttcaggatgtcgaggtactgtgagaatagagatgtttcgaaatatgcagaatgcagaaatcatcagaaaaatgactgaagaatttgatgaggacagtggtgattatcctcttaccatgcctggacctcagtggaaaaaatttcgttcaaacttttgtgaatttattggagtcctgattcgacagtgtcagtatagcataatttatgatgagtatatgatggacacagtaatctcccttttgacgggtttgtcagactcccaggtcagagcttttaggcatacaagtaccctggctgccatgaagctcatgactgctctggtgaatgttgccttaaacctcagtattcatcaggataatacccagagacaatatgaagccgagagaaataaaatgattgggaagagagccaatgaaaggttggagttactacttcagaaacgcaaagagctgcaagaaaatcaggatgaaatcgaaaatatgatgaactctatttttaagggtatatttgttcatagataccgtgatgctattgctgagattagagccatttgtattgaagaaattggagtatggatgaaaatgtatagtgatgccttcctaaatgacagttacctaaaatatgttggctggactcttcatgacaggcaaggggaagtcaggctgaagtgtttgaaagctctgcagagtctatataccaatagagaattattccccaaattggaactattcactaaccgattcaaggatcgcattgtatcaatgacacttgataaagaatatgatgttgctgtggaagctattcgattggttactctgatacttcatggaagtgaagaagctctttccaatgaagactgtgaaaatgtttaccacttggtgtactcggcacatcgccctgttgctgtggcagctggagagttccttcacaaaaagctatttagcagacatgacccacaagcagaagaagcattagcaaagaggaggggaagaaacagcccgaatggaaacctcattaggatgctggttcttttctttcttgaaagtgagttacatgaacatgcagcctacttggtggacagtttatgggagagctctcaagaactgttgaaagactgggaatgtatgacagagttgctattagaagaacctgttcaaggagaggaagcaatgtctgatcgtcaagagagtgctcttatagagctaatggtttgtacaattcgtcaagctgctgaggcacatcctccagtgggaaggggtaccggcaagagagtgctaactgccaaagaaaggaaaactcaaattgatgatagaaacaaattgactgaacattttattattacacttcctatgttactgtcaaagtattctgcagatgcagagaaggtagcaaacttgctacaaatcccacagtattttgatttagaaatctacagcacaggtagaatggaaaagcatctggatgctttattaaaacagattaagtttgttgtggagaaacacgtagaatcagatgttctagaagcctgcagtaaaacctatagtatcttatgcagtgaagaatataccatccagaacagagttgacatagctcgaagccagctgattgatgagtttgtagatcgattcaatcattctgtggaagacctattgcaagagggagaagaagctgatgatgatgacatttacaatgttctttctacattaaagcggttaacttcttttcacaatgcacatgatctcacaaaatgggatctctttggtaattgctacagattattgaagactggaattgaacatggagccatgccagaacagatagtcgtgcaagcactgcagtgttcccattattcgattctttggcagttggtgaaaattactgatggctctccttccaaagaggatttgttggtattgaggaaaacggtgaaatcctttttggctgtttgccagcagtgcctgtctaatgttaatactccagtgaaagaacaggctttcatgttactctgtgatcttctgatgattttcagccaccaattaatgacaggtggcagagagggccttcagcctttggtgttcaatccagatactggactccaatctgaactcctcagttttgtgatggatcacgtttttattgaccaagacgaggagaaccagagcatggagggtgatgaagaagatgaagctaataaaattgaggccttacataaaagaaggaatctacttgctgctttcagcaaacttatcatttatgacattgttgacatgcatgcagctgcagacatcttcaaacactacatgaagtattacaatgactatggtgatattattaaggaaacactgagtaaaaccaggcagattgataaaattcagtgtgccaagactctcattctcagtttgcaacagttatttaatgaacttgttcaagagcaaggtcccaacctagataggacatctgcccatgtcagtggcattaaagaactggcacgtcgctttgcccttacatttggattggaccagattaagacacgagaagcagttgccacacttcacaaggatggcatagagtttgcatttaaataccaaaatcagaaaggacaagagtatccacctcctaatctggcttttcttgaagtactaagtgaattttcttctaaacttcttcgacaggacaaaaagacagttcattcatacctagagaaattccttaccgagcagatgatggaaaggagggaggatgtatggcttccactcatctcctatagaaattcattagtcactgggggtgaagatgatagaatgtctgtgaacagtggaagtagcagcagcaaaacctcatcagtaaggaataagaaaggacgacctccacttcataaaaaacgagtagaagatgagagtctggataacacatggctaaacaggactgacaccatgattcagactcctggccccctgccagcaccacaactcacatccactgtactgcgggagaacagtcggcccatgggagaccagattcaagaacctgagtctgaacatggttctgaaccagactttttacacaatcctcagatgcagatctcttggttaggccagccgaagttagaagacttaaatcggaaggacagaacaggaatgaactacatgaaagtgagaactggagtgaggcatgctgttcggggtctaatggaggaagatgctgagcccatctttgaagatgtgatgatgtcatcccgaagccagttagaagatatgaatgaagaatttgaggacaccatggttattgatctgcctccatcaagaaatcggcgagagagagctgagctaaggccagacttctttgactctgcagctatcatagaagatgattcaggatttggaatgcctatgttctgaagtctgaagaaaatttacaaatctggaactctattatttagagctagaggcctatatactgtgatagcttgtatggggaaaaacacttttgatgtgatctgatttgttttttaatcaaatgattaaggtcaatccctttttgcagtgacagaagaggagcatgtaaattacccaagggaatgttggtgaatgtcaactcagaaagactgacctgaaaatcatttgtgtcctactattggacttatcccaatacagatgtgtgtgtttttctggagggaggaagaaattttaaatttttaaaacagctgtcaagataaacactgttatacacctgttttatgaaaactcaacattgagtaaaaaaaaacatatttttaactttattttcctgttgtacaatttaaaaaccgttttaacattttgcctttttatgttttaaaagctaaccatttttattaaacctatgagtaagcagctcatcctaattgcgaagagtgttttggagttcactggatttggttgacctttgtggaacacaaataatgaaggagcagaacattgacaagctaagatgaaattctgacatagtacatctctgccaaaaaccacacaccctctgtggatatggatatgaattcccagattttatatactcttgaataaaaggtttatttttatttataagtgggcataaaataagaaatgtccatgcagccatttttccaacagatgctgtacaccgttcattttatatagactagggagattcaaatacagtgcattttctattggtatttgttctgtgcatttttagcaacttctaccagcaaataaagtattctcagtaaaacgaaaatgattctcaagttatcagtttgctgtttttaccacttatttcatgccctgccaaattcaagttacacagacttccattttcttaagataatcaatcatgaagaaatcctttatcaatcattcaaaagtaattttaagtgtaacataactgtgtttacttcccatgcacttaatacccttatgcgctaattttgtgaattaagtttactgattatagaagtatgtgctgcatagaagtctgt

SEQ ID NO: 12788 - DNA, 5810 bp, Homo sapiens
ttcatgtgacgggcccctctgcttctcccccgccccatcatctccagcgcgtggtgggggaactgctggggaaggcgattggcatcgatctctccatcccttccgaggcccgacttcggaattgtcttagaagaaagaaggcaagccaccattttacccacgtaaatatatgaatatatttctgacattgaggtgttccagaagatgataaagaaatgatagcagctccagaaataccaactgattttaatctactacaggagtcagaaacacatttttcttctgacacagattttgaagatatcgaaggaaaaaaccaaaagcaaggcaaaggcaaaacttgtaaaaaaggcaaaaagggcccagcagaaaagggcaaaggtggaaatggaggaggaaaacctccttctggtccaaaccgaatgaatggtcatcaccaacagaatggagtggaaaacatgatgttgtttgaagttgttaaaatgggcaagagtgctatgcagtcggtggtagatgattggatagaatcatacaagcatgaccgagatatagcacttcttgaccttatcaacttttttattcagtgttcaggctgtaaaggagttgtcacagcagaaatgtttagacatatgcagaactctgagataattcgaaaaatgactgaagaattcgatgaggatagtggagattatccacttaccatggctggtcctcagtggaagaagttcaaatccagtttttgtgaattcattggcgtgttagtacggcaatgtcaatatagtatcatatatgatgagtatatgatggatacagtcatttcacttcttacaggattgtctgactcacaagtcagagcatttcgacatacaagcaccctggcagctatgaagttgatgacagctttggtgaatgtggcactaaatcttagcattaatatggataatacacaaagacaatatgaagcagaacggaataaaatgattggaaaacgagccaatgagaggctagaactcctgctacaaaagcggaaagagcttcaggaaaatcaagatgaaatagaaaatatgatgaatgcaatatttaaaggagtgtttgtacatagataccgtgatgcgatagctgaaattcgagctatttgcattgaagagattggcatttggatgaagatgtatagtgatgcctttcttaatgacagttatttaaaatatgttggttggactatgcatgataagcaaggtgaagtaagactcaaatgtcttactgctctacaagggctttattataacaaagagcttaattccaaactggaactttttaccagtcggttcaaggatagaattgtgtctatgacccttgacaaagaatatgatgttgcagtacaagcaataaaattactcactcttgttttacagagtagtgaagaagttctcactgcagaagattgtgaaaatgtctatcatctggtttattcagctcaccggccagtagcagtagcagctggagaatttctctacaaaaagctcttcagtcgtagagatccagaggaggatggaatgatgaaaagaagaggaagacaaggtccaaatgccaaccttgttaagacattggtttttttctttctagaaagtgagttacatgagcatgcagcataccttgtggatagcatgtgggactgtgctactgagctgctgaaagactgggaatgtatgaatagcttgttactggaagagccacttagtggagaggaagcactaacagataggcaagagagtgctctgattgaaataatgctttgtaccattagacaagcggctgaatgtcatcctcccgtgggaagagggacaggaaaaagggtgcttacagcaaaggagaagaagacacagttggatgataggacaaaaatcactgagctttttgccgtggcccttcctcagttattagcaaaatactctgtagatgcagaaaaggtgactaacttgttgcagttgcctcagtactttgatttggaaatatataccactggacgattagaaaagcatttggatgccttattgcgacagatccggaatattgtagagaagcacacagatacagatgttttggaagcatgttctaaaacttaccatgcactctgtaatgaagagttcacaatcttcaacagagtagatatttcaagaagtcaactgatagatgaattggcagataaatttaaccggcttcttgaagattttctgcaagagggtgaagaacctgatgaagatgatgcatatcaggtattgtcaacattgaagaggatcactgcttttcataatgcccatgacctttcaaagtgggatttatttgcttgtaattacaaactcttgaaaactggaatcgaaaatggagacatgcctgagcagattgttattcacgcactgcagtgtactcactatgtaatcctttggcaacttgctaagataactgaaagcagctctacaaaggaggacttgctgcgtttaaagaaacaaatgagagtattttgtcagatatgtcaacattacctgaccaacgtgaatactactgttaaggaacaggccttcactattctgtgtgatattttgatgatcttcagccatcagattatgtcaggagggcgtgacatgttagagccattagtgtatacccctgattcttcattgcagtctgagttgctcagctttattttggatcatgtcttcattgaacaggatgatgataataatagtgcagatggtcagcaagaggatgaagccagtaaaattgaagctctgcacaagagaagaaatttacttgcagcattttgtaagctaattgtatatactgtggtggagatgaatacagctgcagatatcttcaaacagtatatgaagtattataatgactatggagatatcatcaaagaaacaatgagtaaaacaaggcagatagacaaaattcagtgtgctaagacccttattctcagtctgcaacagctttttaatgaaatgatacaagaaaatggctataattttgatagatcatcctctacatttagtggcataaaagaacttgctcgacgttttgctttaacttttggacttgatcagttgaaaacaagagaagccattgccatgctacacaaagatggcatagaatttgcttttaaagagcctaatccgcaaggggagagccatccacctttaaatttggcatttcttgatattctgagtgaattttcttctaaactacttcgacaagacaaaagaacagtgtatgtttacttggaaaagttcatgacctttcagatgtcactccgaagagaggatgtgtggcttccactgatgtcttaccgaaattctttgctagctggtggtgatgatgacaccatgtcagtcattagtggaatcagcagccgggggtcaacagtacggagtaaaaaatcaaaaccatctacaggaaaacggaaagtggttgagggcatgcagctttcactcactgaagaaagtagtagtagtgacagtatgtggttaagcagagaacaaacactgcacacccctgttatgatgcagacaccacaactcacctccactattatgagagagcccaaaagattacggcctgaggatagcttcatgagtgtttatccaatgcagactgaacatcatcaaacacctcttgattataatcggcgtggcacaagcctaatggaagatgatgaagagccaattgtggaagatgttatgatgtcctcagaagggaggattgaggatcttaatgagggaatggattttgacaccatggatatagatttgccaccatcaaagaacagacgagagagaacagaactgaagcctgatttctttgatccagcttcaattatggatgaatcagttcttggagtgtcaatgttttaataccagtacacaattaaatctgtggtgaagtcattttctaagtggaagaggaaattttaaagtgtggtagatacagtgaaattctgtacagatttttctctaaggagaatatgacatgcttatgcttaccaagatcaagtgcattgaggggcagttttgtttgcctgaataaacgtaaaggacaagtaaacaatttgatgataagctacagtttttcttagaaagtaaatattttatttatgcgctgttagttggcttttgaatcgattatttcatgcttttttttaaaaaaaaaaaaaaacaaaataacaatctgaagaggcatttggtacagatatgaattctcttacatttatttactggttgtactaaataatgatgacctctgctggatttctgtttacatccagaaaacaatgttaaggatgtatttattcccctaccctgaagaaagtgtaggatagaattgtttttagcattctaaatttaaatgcttaaaacgtcaatcaacaaaactttgttttaaatattgtaattgtggagaaaagtaaacttataagcagaacttttacaattttttcatctaaaagtattttaagatatttttaaaatccaagagcttctctatacttttcagaaatatccagatgcagtgaactgccagaaggtaaccagtctcaaacatgcttatcccattatcaaccctgaaagtttgcttgtcctttaagataaaaatgtaatgttgtgatattccttccagtaatgccactgtattttgtctccaaataaaagaagcttattgtagtatgtttgcagaaaaattctaaacaaaaattatacagcttattagagtgtgggaatagggatctaaattttaaataaaattatatatatatataaattggtgctgattttataattgcgcagtttgtttagttttttcttacttttaaattccaacttaaaattatgaggtttcagaaatatattgaaagtttaacaatgtttaaaaatagaaaagcatgagtgttcatgctttaaaatgatttttaaatttgtattttatattgttttatctatctgtctttgcaagcagtcttcaggttaaagatacttctaacaggttacagtacatttcctctgtatgtaaattagatgggataatagaattcataacccataatattctttgaaagctaagctttaaacttcattttatgtcctttcacaaataaattagtttaaaacagaaagtggctacttgccattttgacatcaactcattttgcgaggcttaggcagctagacatcgtttaaaacaaaatattaacttatattacatgtgtatctatctattgtcagtcgtctctcagttcttgaggtatattattttaatcattccatgccttaatatgcttgcaatacaagaatatcttcagatgggtgaataccaaaaggctttcagtttttagtcagaaatcaagcattgggctgtggtagccaaaaaccataggttagctaaaaagatcatgatacaattattttattaagtcatggttaataacaaatgaatccagacttgtctaacagattttccatcaacaaatattgttatgtgcaaaagtattgcctatgttgttttacacaccactgcattaactagaactgctgagaggactgtatatatgattttaaacctaagttgattttttttctcactcttgaaaggagtacttctttgtgaaagcagttcttacagctttgttttcaaccagctaaaaatgttttatatattactctaacctgttgtcctccacattctattgtcctaattgtactgttttctgatttgtatttatgtcttgagacagtaactttttgaataaaaataaacctaca

SEQ ID NO: 12789 - DNA, 1323 bp, Homo sapiens
cgcacgggcgcgcgcagtgttgacgcgcttcttagctggtgcgcgccggagcccaaattccaagtggaaactgcaggcgcacgagggaggaacgcgtggagcatgaaaaggcagggggcctcctctgagcgaaaacgagcgcggataccgtccgggaaggccggagcagcaaatggatttctcatggaagtttgtgttgattcagtggaatcagctgtgaatgcagaaagaggaggtgctgatcggattgaattatgttctggtttatcagaggggggaactacacccagcatgggtgtccttcaagtagtgaagcagagtgttcagatcccagtttttgtgatgattcggccacggggaggtgattttttgtattcagatcgtgaaattgaggtgatgaaggctgacattcgtcttgccaagccttatggtgctgatggtttggtttttggggcattgactgaagatggacacattgacaaagagctgtgtatgtcccttatggctatttgccgccctctgccagtcactttccaccgagcctttgacatggttcatgatccaatggcagctctggagaccctcttaaccttgggatttgaacgcgtgttgaccagtggatgtgacagttcagcattagaagggctacccctaataaatcgactcattgagcaggcaaaaggcaggattgtggtaatgccaggaggtggtataacagacagaaatctacaaaggatccttgagggttcaggtgctacagaattccactgttctgctcggtctactagagactcgggaatgaagtttcgaaattcatctgttgccatgggagcctcactttcttgctcagaatattccctaaaggtaacagatgtgaccaaagtaaggactttgaatgctatcgcaaagaacatcctggtgtagccagacctctctgagagacatggatatcacaggatgaaggtagaactataatctgcaattctctatgacacagctttaaccttcttctctggccaggacagtcgcaatctttgttttaagtttcacatggccatggagaatgtgcccaagaagaaaaagaatttgaaacagagatacagtcacttcctttgcttagtcttaccagtgattgtcatcatggttaaagctggtctgtgcttcttccatagacagaagcttagtctgttttcagtggaattaattgatgaactgggaaaattttaactgcatggtatgaattcagagtgtgacttaagggtcaattcaaagcagtattttgacttttcatttgtaaaataaaaatttccactattaaaaaaa

SEQ ID NO: 12790 - DNA, 4852 bp, Homo sapiens
ggcggagggagctggagctgtcacagtccccgggtgcgcctgaccgagccaagtggggtgtcatggccgcggggggcagcggctgcacttcctcagcgggcggcggcggccggggagttaatcctcgacgcacgggtcggtgtgtcccgtttccctctgtgcggcggccggcgggaccataagggcttaactcatatatttaacccccctccaaaaaggtttgaaagtattcttgaagggctgtttggacctgcattattaaaagatctcagtttatttaaagactgtgaacctgaaagcatttctgattggacttttgatgaaaactgtttattctgttgcttgagaagagataaagtaaagggacacttagtcggtctggatgaaccagcttcgggagctgggcaagaagctctgcttaaacaagagcaagcaaaaatcattcgattcgagagacaagcagaagaattcctcaatgcagtcttttatagaaaagacagtccctgggtctccgaccccaatattcccctagtggcccgtgagatcatgcagcgaatgatccaacaatttgctgctgaatatacctcaaaaaatagctctactcaggaccccagccagcccaatagcacaaagaaccaaagcctgccgaaagcatctccagtcaccacctctcccacggctgcaactactcagaaccctgtgctcagcaaacttctcatggctgaccaagactcacctctggaccttactgtcagaaagtctcagtcagaacctagcgaacaagacggtgtacttgatctgtccactaagaaaagtccatgtgctggcagcacttccctgagccactctccaggctgctccagtactcaagggaacgggcgacctgggagacccagccagtaccgcccagacggacttcggagtggtgatggggtacctccaagaagcttacaggatggaaccagggaaggttttggacactccacatcactcaaagttccactggctcgatccctgcagattagtgaagaactactgagcagaaaccaattgtccacagctgccagccttgggccatctggattacagaatcatggacaacacttaatattatccagggaagcctcttgggcaaaaccacattacgagttcaacctcagccgtatgaagttcaggggaaatggtgcactcagcaacatcagtgaccttccttttcttgcagaaaactctgcctttccaaaaatggcacttcaagcaaaacaagatggaaaaaaggacgtgagccattcatctcctgtagatttaaagataccacaagttcgaggaatggatctttcttgggagtctcgcactggtgatcagtacagctatagctctttggtaatgggttcacaaacggagagcgcgcttagtaaaaaattaagggctattcttccaaaacaaagtagaaaaagcatgttagatgctgggcccgattcttggggctcagatgctgagcagtctacccctggacagccatatcccacatcggatcaagaaggagaccctggctccaagcagcctcggaagaaaagagggcgttacagacagtacaacagtgagatactggaggaagcaatctcagtggttatgagtggaaaaatgagtgtttccaaagctcagagtatttatgggattccccacagtacactggagtacaaagtaaaggagaggctgggcactttgaaaaaccctccaaagaaaaagatgaaattaatgaggtcggaggggccagatgtttctgtaaagattgaattagatccccagggagaggcagcacaaagtgcaaatgaatcaaaaaacgagtaggaatactgtagagtgccaattactgtacaaactgggtgagcactactgcatcattgttcagctatcattgcttgcacgtaatttcatttactgtgacacttgcttctttgcagattttgcattgacttgtgtgtacagagatgaaatgtgcattctgaatgttgcatattttaaatttttcatgtgcagtatggctcggaatatgtttggccttttgcatgtttctctacaaaagagaattgagttacctcacagagaacagatacatggaagtggactccttgcctgtagagcctgcatgcttttttgtttttttttgttgttgttgttttttcttaagttatatttgtttttactttttaaaaaagaagaggaaacaaagcccccttttagaaactacgtctgtcatactgggagctttatcactgcaaattggaaagccatcttatacaaaattattcacatttttcatctacgattcaactaatcgaaggattaaactaaagaaaaaactaagaagaacaatgaacctttgactttgagaaatttggttattcactgacataattattgggtcatttatagttacattttataattttcttctcactattaaatttatttaaattagcaagctattagtgctcacccagaggggaaggtggtggaaaatgtgcacacactaccttcagaaatgcttcagttaattactttgaacactacctttgctgtaatttcatttgagattttctaagggtagaatttggtctcaccaacaagtgaggatatagccttatctcatggaggacgagctccgtatttactcaggagcagtcagggtacattacataaaacaatggaggatgcctcattttagcaaactaggtttctttgtattcttcagtccttttacagaattgatgtgctaactgaatatcattgcagcaactagactaagatattcaagatctctttattggggatgggagaaatagggaaagaaatgtgtataagtaattatgatattgcaaaagtgatacttagattttacagcctcagtagtctgcccagtgtccacattaatgaaggatccatgtttgtagtgagagaaaaaaaccccaaggtaacccgatatgatttaggatgcatatcagttctaacaattcaatcagaagtcaagctcattggaattccttttttaactgatccaaatactagtagaagggggagggagaggtgttgggttttttttttaagtttttatttaattttgttggttagaatttttttctgtttttggcatcctacataataccccccttcttgactttttctgataattagctgatattcatggttgtttagcacacagttcaggacctttgagatcatgtttgtataagcactccttgaagaatatctaagctttttctgagatgggcttttgaaattataataagggaagtttattttctgcggtttttgcaagaataagcaaagcccatggaatttaatttttcattgtgatcagattaaaattactatttgtgcaaaacaaattccacaccacatgtactgtatattctaatctgctgagaaaggtggtcaggcccttctaaatgcttaaccaaaaacaaacattattggagtttcagtgtaaaataaaattaaaattggagggttggttagattgatttcagatggatactaacagtttgaggggaggtccagatatttccaaggcataaattcttgcctggaaactttggagcaattaattaaattaggttaagttttccctcagcaacctgtgtgttcaaaggttaggcacaccattgctgttactaaaatacatgcactgctcattcttgacatagcttgggtgtgggttcctcttgttttggttattttgtgtagcagtttaatcagtggataactgagcctgtttcctcttagctttctagacttcttaacagaaaaaacagtttgggttcaatagcattttatgattctacaatattttgtcacctagctggaagttgcaataaaaattccttatgaaatatatggttttcatctgtgattgaaggaaatcatagaaagtttgctgaaagcaaagggctaagcttatgaaggaatgcctcctttgttacacactcaagaatttgtcagcacacaattaattgcagccatagtacctttttgcgtaacgtttgggatattcagtagcccaggattgctacaaaaaggtcctttgagaaaattaatttgtgcttgcttttatcccctctcagaaagacatcactaaaggcccattaaaaatctggccctaaaagttcaacttttgtagagtttattgttcagagaggtttaatcctatgtggtagtctatataagtgatgtatgagttgagttatgtaaattttgtcattgtagtgtacatggagtgatcattttactaacataaatattttctatgtgtgtttcagtggatgacaatcgagcagcagaagaatggtgtgcctaccctttaatgctgcagtttaagagaacttgtattgtgtcatttcagattgtaggctgagagttgtaaatagtgaaaatttgagtacttctattatttgttttggttagaaagtgaatttaaaaaacaaaccaaactctaaactttctcagattaaaagtcctgagacctgaagattgtaatattcatgtctgtgaagcttttaaacattacacttgagatcagtcatgacttgatattcaggtaaattttcttttccaagaagcttttgaataagcatatttcctccaaaggtctctctctttctctctctttttttgagtgtagattattttaaagcactaattgcattacattggtaactgcaatataaaatagccattattgttttgtgaagcatggttgaaattagctagtggtcccttttgaatttcatgagcctctcaaaaaagaaaaacttaagaaaaaaaaaaaaaaaaa

SEQ ID NO: 12791 - DNA, 1183 bp, Homo sapiens
atggaaatcaccactctgagagcccaactcacagacttggaagaagtgaatctgaatctcaagaagcagattagaaaagaagtccaagaagaatatgaagcattagtccgagctttgtttgagacctgtttacacataaaagagaagctggatgataatcagcttaatttgatccagaaagtgtgtgagctcatcggtgaagtgagaacagaagggattgacaatatgaaggacctaaagaaaaaatggtgctctgccagccccgatgaaggaatgaaagaaaacccagccaaacaggaacagctgtgggccttggagcaggacaactgcagcctggccaacctggtgtgcaaagtgaggagcctgggccgctggaggctggctgtgcagcaggcgtgcttccaggcccagctgagcaggacagagaaggaatctattcaaagtaaaaaagagtatttgcgcatcaagctgatggcagagcgagaagtgggtttatttcgtcagcaggtcctggctctcaggcaggccctggccagggcacaggctgacagcgcgaggatgtggaagcagcaggacagccaggctcaactgctgaaggagttagaacatagagtgacccaggaagctctcacccagcagcagctgcattttatgaaaacatccaggatggagaagctcttggaagatgtggggcaaaaagaacagcaactgcagctccttagcaaagaggctgagagggcttctaagctgggccaactgcagcagaaaaaaatgaagagggacctccaccagatgagaagccggcttgcccaggagcgcagtgtgaagctggatgctctccagcgtgcagaggagctgcagggtcagcttcacgatgcccagcggtcagctgtccccatgggctcgtcaggcgatactcccagcaacgctttttaaagactaatctcaaaggcagtaaaataacaagatggattcaaaggccacagactgtacctattaaacacaaaaaaagaactgacgatgttttcctacccaatatggcagaaaatgttcaactgacagcttttcaggttcaaacagctccatccagattcccatttagagctgactggtgatgatatcttctttttccaacctttatttctatgagtatttgaatgaataaaaatgactccaaatgcca

SEQ ID NO: 12792 - DNA, 13860 bp, Homo sapiens
tcttcccggaggtcctccagataccgccggagtatgagtggccttcccaatctacaggaaacattaaaagagagacaggcaagatttagagaggcaagggaaagccgaagactgaaaattgacccttcatacaaatatatatttgaaattctagcagaaaatcttggcctggacatagtaactgttgaagaattaattttggattgcccatctaatgtggtcgaactattgctggagcaactaaaggggcaaaaatgatgaaattgtatatagacaatgcagccccggataaactaaaaggactgtgcatattttttgttcgttgccgtaatgatgttgctataaatgttaaaactattcaagaggaagcgctctttactgttctggatgcgtcgaaaggactcttaaatggaattagggatatgttggcaaatatatttctaccagctgttcttgcaacaaacaactggggtgctttaaaccagtccaagcagggagaatctgaaaaacatattttcactgaaaccatcaacagatatctttcatttttagatggtgctagaataagtattgagggaacagtgaagttaaagacaatagacaatgttaatttttccaaactgcacacctttgaagaagtaactgctgcagccagcaactcagaaactgttcatcagctggaggaagtgctgatggtatggtacaaacagatcgaacaggtacttattgagagtgagcagatgagaaaagaagctggtgattcaggtccactcactgaattggaacactggaaacgcatgtcagccaagttcaactatatcattgagcagattaaagggccaagttgtaaggctgtcataaatgtgctaaatgttgcacactccaaactgctaaagaattggcgtgatttggatgcaagaatcactgatacagcaaatgaatccaaagataatgtcagatatttgtatactttggaaaaagtgtgtcaacctctctataaccatgacctagtttccatggcacatggaatacaaaatttgattaatgccatcagaatgattcacggtgtgtcaaggtattataatacctcagagagaatgacctcattgtttatcaaggtaacaaatcaaatggtaacagcatgtaaagcatatattactgatggaggattaaaccatgtatgggatcaggaaacgccagttgtactaaagaaaattcaggactgcatttttctattcaaggaatatcaggcatcttttcataaaacaaggaaactgatttcagaatcctcaggggaaaaatcttttgaggtttcagaaatgtatatatttggaaaatttgaagctttttgcaaaagactggagaagattacagaaatgataactgttgtgcaaacatattcaaccttgagtaattctaccatagaaggaatagatattatggcaataaaattcagaaatatataccaaggggttaagaaaaagcaatatgacattctggatccaagaaggacagaatttgacacagatttcttagatttcatgacaaaaatcaatggtttagaggtacaaatacaggcatttatgaacagtagttttgggaaaatcttatcttctcagcaggctcttcagctacttcaaaggtttcagaagctgaacattccctgtctgggattagaaataaaccacacaatagagcgtattcttcagtactatgtggctgaacttgatgctactaagaagctttatcattctcagaaagatgacccccctcttgctcgcaacatgccccctatagcaggaaaaatactctgggtgaggcagctctatcgccggataagtgagcccatcaattatttctttaaaaactcagacattttatcaagtccggacggtaaagctgtcatccgtcagtataacaagatctcctatgtgctggtggaattcgaggtggtctatcacacagcctgggtcagagagatttcacagttgcattacgctttacaagccacgctttttgtgcgacatccagaaacagggaagttgctggttaatttcgatcccaaaattttggaagttgttcgggaaactaagtgtatgataaaaatgaagttggatgtaccagaacaggcaaagagattgctaaaattggaaagtaaattgaaagcagacaaactgtatttgcagggtcttctgcaatattatgatgagttatgtcaggaagtgccttctgtgtttgtcaatctgatgaccccaaaaatgaaaaaggtggaatctgtgttgaggcaaggactcacagtgttaacatggtcgtctttaacactggaaagcttctttcaagaagtcgaattagttttggatatgttcaatcaacttttaaagaagatcagtgacttgtgtgaaatgcatattgatacagttctgaaggagatagccaaaactgtgttgatttctctgcctgaaagtggtgctaccaaagtagaagatatgttgaccctcaatgagacatacacaaaagaatgggctgacattctaaaccacaaaagtaagcatgtggaagaagctgtcagagaacttatatcaatatttgagcagatttatgaagtgaaatacactgggaaagtaggaaaacagtcagaacagcggaaacacgttgtttttggaagtgaaacagaagagggtgaaaacaatgactatgaagctaatattgtgaatgagtttgatactcatgataaagaagatgaatttaaaaaggagtgtaaagaggtctttgcttttttctctcatcaattactagacagtcttcaaaaagctacacggttatctctggacacaatgaaaagaagaatatttgttgcaagcctttatgggcgaaagcagtcagaagatattatttcgtttataaaaagtgaagtacatcttgcaattcctaatgtggtgatgattcctagtttggatgacattcaacaagccattaaccgtatgatccagttaaccctggaggtcagcagaggagtggctcactgggggcaacagcaaatccgtcccatcaagtctgtcattcccagccccaccactactgacgtgacccatcaaaacacaggaaaactgctgaagaaggaagaaagatcttttgaagaagctattcctgcgaggaagctgaagaatttttacccgggggtagcggagcacaaggatatttctaagttggtcctgctcctttcttcctctgtaaattccctaagaaaggcagctcatgaggccctgcaggactttcagaagtacaagactctctggacagaggaccgcgatgtgaaagtgaaggaatttttggctaacaacccctctctgactgaaatcagatcagaaattctacactatgctacttttgaacaggagattgatgagttgaagcctattattgttgtaggagcacttgaattacatacagagccgatgaaattggccttatccatcgaggccaaggcatggaagatgttactctgtcgatatctgaatgaagaatacaaaaagaaaatgtcatacatgatagcatttattaatgaatacttgaaaaagttatctagacctattcgtgatttagatgatgtcagatttgcaatggaagccttgtcttgcatacgtgataatgaaattcaaatggacatgactttgggaccaattgaagaagcctatgctattttaaacagatttgaagttgaagtaaccaaagaagaatcagaagcagttgataccttaagatattctttcaacaaattgcagagcaaagctgtttcagtacaagaggacctagttcaagtgcagccaaagtttaaaagcaatctacttgagtctgtgaaagtttttcgtgaggacgtgataaactttgcagaagcatatgaattggaaggacctatggttccaaatataccaccccaagaagctagcaacaggctacagatatttcaggccagtttcgatgatctgtggaggaaatttgttacgtattcatctggtgaacaactttttggattgcctgtgactgattatgaggttttacacaaaaccagaaaagaactcaacttgctgcagaagctgtatggattgtatgacaccgtaatgagcagtattagtggttattatgaaatactttggggagatgtagatattgaaaaaattaatgcagaactgctggaatttcaaaacagatgtcgtaaacttccaaaaggacttaaagattggcaagcttttttggatctcaaaaagagaattgatgatttcagtgagtcatgtcctctactggaaatgatgaccaataaggccatgaaacagagacactgggatagaatctccgagttaactggaaccccatttgatgtggaatctgattctttttgccttagaaatatcatggaagcaccactccttaaacataaggatgatattgaggatatttgcatatctgccattaaggagaaggatatcgaagccaagctgactcaggtgattgagaattggaccaaccaaaatctgagttttgcagcatttaagggaaaaggagagctcctgctcaaaggaaccgaatcgggagaaattatcactttgatggaggatagtttaatggtcttagggtctttactcagcaacagatacaatgctccatttaaaaaaaatatccagaattgggtgtataaattgtccacttcctcagatataattgaagagtggctcgtagtacagaacctttgggtttatcttgaagccgtctttgtaggtggagatattgccaaacagctgcctcaggaagcaaaacgttttcagaatattgacaagtcttggataaaaataatgcagcgagctcatgagaatcccaatgtgattaattgctgtgttggagatgaaaccatgggacaacttttacctcatttacatgagcagttggaagtatgtcagaagtcactcacagggtatttggagaagaaacgattactgtttccaagattcttctttgtatctgatccagttctcctggaaattcttggacaagccagtgattcccacaccatacagccacatctccctgcagtatctgacaacatcaatgaggtgacatttcatacaaaagactatgatcgcatcatggccgtcatatcaagagaaggagaaaaaattgttttggataattctgttatggccaaaggtcctgtggagatttggctactggatttgttaaaaatgcagatgtcatcattacataatataattagatccgctttctatcaaatcagtgattcaggatttcaactcttaccattcctcagccactttccagcacaggttggacttctgggaattcagatgttgtggacacacgattcagaagaggctttacgtaatgcaaaagatgacaggaaaatcatgcaagtgaccaatcagaaatttttggatattctaaatactctcattagtcagacaacacatgatctaagcaagtttgatagagtgaagttcgagactctaattaccatccatgtgcatcagagagatatttttgatgacttggtaaaaatgcatatcaaatcacctactgactttgaatggctaaaacagagtagattttattttaaggaagatttggatcaaactgtggtgtctattacagatgttgattttatttaccaaaatgaatttctgggatgtactgatcgtcttgttatcactccattaacagatagatgctatatcacgttagctcaggccttgggcatgaacatgggaggtgctcccgcaggacctgctggcactggcaaaacagaaaccacaaaagacatgggaaggtgtttgggaaaatatgtggtcgtgttcaattgctcagatcaaatggatttcagaggcctaggaaggattttcaaaggtcttgcacagtcgggttcctggggctgttttgatgagtttaacagaattgaattgcctgtattatcagtggcagcacaacaaatttatattgttttgacagcaagaaaagaaagaaagaaacagttcattttttctgatggtgattgtgttgatttaaatccagaatttggaatcttcttaacgatgaaccctggatatgctgggcgccaggaactaccagaaaacctaaaaatccagtttagaactgttgctatgatggttcctgatagacagatcattatgagagttaaacttgcaagctgtggttttcttgaaaatgttatcttggctcaaaaattttacgttctttacaaactctgtgaagagcaacttactaaacaggttcattatgactttggattgagaaatattctgtctgtattgaggactcttggatctcaaaaaagagccagaccagaagatagtgaattaagcattgtcatgagaggactaagagatatgaacctttccaaactggttgatgaagatgaacccctgttcctcagcttaatcaatgacctgttcccaggactgcaactggatagtaatacttatgcagaactgcaaaacgcagtagcccatcaggttcagatagagggtttgattaaccatccaccctggaacctgaaactcgtgcagttatatgagacgtctttggtacggcatggcttgatgactcttgggcccagtggttctggaaagacaaccgttatcacgattctaatgaaggcgcaaacagaatgcggaaggcctcatagagaaatgcgaatgaatccaaaagccattactgcacctcagatgtttggcagactggacactgctaccaatgactggacagatgggattttttctactctgtggagaaaaacattaaaagctaaaaaaggtgaaaacattttcctcattttagatggtcctgtggatgccatctggattgagaacttaaattccgttttggatgacaataaaactctgacgttagctaatggagatcgcattcccatggcccctagttgtaagcttctgtttgaagtccacaatatcgagaacgcctctcctgccacggtttctaggatgggcatggtctatatcagcagctctgctctcagctggaggccaatcttacaggcatggttgaagaaacgcactgcacaggaagctgctgtattcctgacactgtatgagaaagtctttgaagatacatacacatatatgaaactaaatctcaatcccaaaatgcagctcttggagtgcaactatattgtgcaatctctcaatcttctggaagggttaattccctccaaagaagaaggcggtgtttcctgtgtcgaacatcttcataaattatttgtgtttggcctaatgtggagtttaggagcccttctggaattagaaagcagagaaaagcttgaagccttcttacggcagcatgaaagcaagttggacttaccagaaatacctaaaggctcaaatcaaaccatgtatgagttttatgttactgattatggtgattgggagcactggaataagaaacttcagccttattattatccaactgacagtattccggaatattcatcaattttggttccaaatgttgacaatattagaacaaattttttgatagacaccattgcaaaacaacataaagctgttttgctcacaggagagcagggaactgcaaaaactgtcatggttaaggcctatttgaaaaaatatgatcctgaagtacagctatccaaaagtctaaacttttcatctgccacagaaccaatgatgtttcagagaacaattgaaagctatgtggataagcgaattggaagcacatatgggccaccaggagggagaaaaatgactgtatttattgatgatattaatatgcctgtgattaatgagtggggagatcagataactaatgagattgtgcgacagatgatggaaatggaaggaatgtacagcttggacaagcctggagacttcactactattgttgatgtgcagctcatagcagcaatgatccaccctggaggtggtcgaaatgatattccacaacgtttaaaaagacaatttactgtgtttaattgtacattgccttcaaatgcttcaatagacaaaatttttggaattattggatgtggatactttgatccttgtagaagtttcaagcctcaaatatgtgagatgattgtgaatttagtctcagtgggtagagtgctgtggcaatggactaaggtgaagatgctgccaactccttctaaatttcattacatcttcaatcttcgagatctttccagaatttggcaaggaatgttgaccataaaagctgaggagtgcgcttcaatccctactctcctgtcccttttcaaacacgagtgcagcagagtaattgcagacagatttataactcctgaagatgagcagtggtttaatgcacatcttactcgtgcagttgaagaaaatattggctctgatgcagcgtcgtgtattcttcctgaaccatactttgtggattttcttcgtgagatgccagaaccaactggtgatgaacctgaagactctgtgtttgaagtacccaaaatatatgaattgatgccatcctttgactttctggctgaaaaactccagttttaccagagacagttcaatgaaatcattagaggaacatctcttgatctggtgttttttaaagatgcaatgactcatcttattaagatttcacgaataattcgaacgtcgtgtggaaatgcattgctggtgggtgttggtggttccggaaaacaaagtctttcaagattggcctcttttattgctggctatcaaatattccagataacattaaccaggtcttacaatgtgactaatctaacagatgatttaaaagctttgtacaaagttgctggtgctgatggaaaaggcatcactttcatctttactgacagtgaaataaaagatgaggcatttctagaataccttaacaacttgctatcttcaggggagatctccaacttgtttgcacgagatgagatggatgaaatcacccaaggtctgatttcagtgatgaagagggagctacctcgccatcctcctacctttgataatttgtatgaatacttcatttcaagatcaaggaagaacttacatgttgttctctgcttttctccagttggtgagaagttccgtgcccgttctttgaaatttcctggcttgatatcaggttgcactatggactggttcagccgctggccaagggaggctctgattgctgtggcctcctacttcctttcagactataatattgtctgctctagtgaaattaaaagacaagttgtagaaacaatgggcctgtttcatgacatggtttcagagagctgtgaaagttatttccaaagataccgccgaagagcacatgtgactcccaaatcttacctctcatttataaatggttataaaaacatttatgctgaaaaggtgaagttcattaatgaacaggctgaacgtatgaatattggtcttgataaactaatggaggcaagtgaatctgttgctaaactctctcaggatcttgcagtcaaggagaaggagttggcagtggcttccataaaagcagacgaagtattagcagaagtcacagtaagcgctcaggcttcagccaaaattaaaaatgaagtacaggaggtaaaggacaaagcccaaaaaattgtggatgaaattgatagtgaaaaagtgaaagctgaaagcaagcttgaggcagctaaacctgcactggaagaagcagaagcagccctgaatactatcaagccaaatgatattgccacagtcaggaaacttgcaaaaccaccacatcttattatgagaatcatggactgtgttctgttactatttcaaaagaaaattgaccctgttactatggatccagaaaaatcttgctgtaagccatcatggggagagtcattaaagttgatgagtgcaacaggattcctgtggagccttcagcagttccctaaggacactataaatgaagagactgttgagttactacagccatattttaatatggatgattatacttttgaaagtgccaaaaaagtctgtgggaatgtggctggtctcctgtcttggacacttgctatggcaatattttatggcatcaatagagaagtgttgcctctgaaggccaacctggccaagcaggaaggccggttagcagttgctaatgctgagttagggaaggcacaagccctgctggatgagaagcaagctgagctggataaagtacaggcaaaatttgatgcagcaatgaatgagaaaatggatttgcttaatgacgctgatacgtgccggaaaaagatgcaggccgcctccactctcatcgatgggctgagtggagaaaaaatccggtggacccagcaaagtaaagaattcaaagctcagattaatagacttgtaggtgatattctgctgtgcacgggattcctttcctaccttggtcctttcaatcagatatttaggaactatttgcttaaagatcaatgggaaatggagttgagagcacggaaaattcctttcacagaaaacctgaatcttatttcaatgttggtggatcctccaactattggtgagtgggggctacagggattaccaggagatgatctctcaattcagaatggcattattgtgacaaaggccaccagatacccactcctcatagacccacaaactcaaggcaaaacttggattaaatcaaaggaaaaagaaaatgatttacaggtgacatctctgaaccgtaaatattttcgcacacacttggaggacagcctttccttgggccgaccccttctcattgaggacattcatgaagagctggatccagccttggataatgtattagaaaagaattttattaaatctggcaccactttcaaggtgaaagtcggtgataaggaatgtgatatcatggatacatttaaactttacattactacgaagttaccaaatcctgcctttaccccagagattaatgctaaaacgtcagtcattgatttcactgttacaatgaaaggacttgagaatcagttactaaggagagtcattctaacagagaaacaggagttagaggctgagagggttaaacttttggaggatgttacttttaataagcggaagatgaaagaacttgaagataacctcctctataaattaagtgctacaaaaggctcattggtagatgacgaatctctcattggtgtacttcgaactaccaagcagacagcagctgaggtaagtgaaaagttgcatgtggctgcagaaactgagatcaagatcaacgcggctcaggaggagttccggcccgcagccacccgcggaagcatcctctacttcctcatcacagagatgagcatggtcaacatcatgtatcagacgtcattggcccagttcttgaagttatttgaccagtccatggccagatctgaaaagtcaccactacctcaaaagagaattacaaatattatcgagtacctgacatatgaagtttttacatactctgtcagaggcctatacgaaaaccacaaattcctgtttgtactcctcatgaccttaaagattgaccttcagagagggacagttaagcacagagagtttcaagctctcattaaagggggagcagctctggacctgaaagcctgtcctcccaaaccctatcgctggatccttgacatgacttggctgaatcttgtggagctgagtaaacttccacaatttgcagaaattatgaaccagatatctcgtaatgagaaggggtggaaaagctggtttgataaagatgctccagaggaggaaattatccctgatggatataatgattcactagatacctgccataaacttttacttatcaggtcttggtgcccagaccgtactgtttttcaagcaagaaagtatattgcagattctttggaggagaagtacacagaaccagttatcttaaatctggagaaaacttgggaagaaagtgatacccggacacctctgatatgcttcctgtccatgggatctgaccccaccaatcaaattgatgcattggccaagaaactgaaactggaatgtagaactatctcaatggggcaaggacaagaagtacatgctcgaaagctgattcagatgtcaatgcagcagggtggttgggtattactacaaaattgccaccttggcctggaattcatggaagaattactagagacgctaattaccactgaagccagtgatgattctttccgagtatggataactacggagccccatgatcgatttccaattacattgcttcagacctctctcaaattcactaatgagccaccccaaggtgtacgcgcaggtttgaaaagaacatttgctggaattaatcaagaccttctggacatcagtaatttacccatgtggaagccgatgctttacacagtagcatttttacactccactgtgcaggagcgacgaaaatttggccccttaggatggaatattccctacgaattcaattctgctgacttttcagccagtgttcagtttattcagaatcaccttgatgaatgcgatattaagaaaggtgtatcatggaatacggttcggtacatgatcggagaagtacaatatggagacagagtgacagatgactttgacaaacgtctacttaattgctttgccagagtctggttcagtgagaagatgtttgaaccgtcattctgcttttatactggatataaaatccccttatgcaaaaccttagaccagtattttgaatacatccagtcactgccatccctagataaccctgaagtctttgggcttcaccctaatgctgatatcacgtatcagagtaacactgcttctgctgttcttgaaacaattaccaacattcaacccaaagagagtggaggtggtgtgggagagacccgggaggctattgtttatagattatctgaagatatgctgagtaaactccctcctgattacattcctcatgaggtgaaatctcgtttgataaagatgggccatcttaattcaatgaacatatttcttagacaagaaattgacagaatgcaaagagtcatttcagtactccgcagtagcctgagtgatctaaaattggccattgaaggaacaatcattatgagtgagaatctgagagatgctctggacaacatgtatgatgctcgtatacctcagctctggaaaagagtgtcttgggattcgtccacactgggcttctggttcactgaacttttggaaagaaatgctcagttttctacgtggatatttgaagggaggcctaatgtgttttggatgactggtttctttaatccccaaggcttcctcacagcaatgaggcaagaagtgacccgtgcccacaaaggctgggcactggacactgtgaccatccacaatgaagttctgagacagaccaaggaggagatcacgtcaccccctggggaaggtgtgtatatttatgggctctacatggatggagcagcctgggacagacggaatgggaagctcatggaatccacccccaaggtactcttcacgcagttacccgtgctccacatctttgccattaactccacggcacccaaggaccccaagctgtatgtgtgtcctatttacaagaaacccaggcgaactgatttgaccttcatcactgtggtatatttacgaacagtgttgtccccggatcactggatcctgagaggagtggcccttttgtgtgacatcaagtaagttcatttccatctgctcagggcaccagaacccacatagacagcctgtgctattgagggactcagtgatgtgtgtgtcttttctccccagtaattccttaattactctttctacattaaaaagttgatgttct

SEQ ID NO: 12793 - DNA, 3621 bp, Homo sapiens
gagaaccggatgaggcggcgaccgtgaggccgagccgggagcgggcgtcttgccgaggcccgggcgggcggggagcaacggctacagacgccgcggggccaggtcgttgagggtcggcggcgggcgaggagcgcagggcgctcgggccgggggccgccggcgccatgggcaaccgcgggatggaagagctgatcccgctggtcaacaaactgcaggacgccttcagctccatcggccagagctgccacctggacctgccgcagatcgctgtagtgggcggccagagcgccggcaagagctcggtgctggagaacttcgtgggccgggacttccttccccgcggttcaggaatcgtcacccggcggcctctcattctgcagctcatcttctcaaaaacagaacatgccgagtttttgcactgcaagtccaaaaagtttacagactttgatgaagtccggcaggagattgaagcagagaccgacagggtcacggggaccaacaaaggcatctccccagtgcccatcaaccttcgagtctactcgccacacgtgttgaacttgaccctcatcgacctcccgggtatcaccaaggtgcctgtgggcgaccagcctccagacatcgagtaccagatcaaggacatgatcctgcagttcatcagccgggagagcagcctcattctggctgtcacgcccgccaacatggacctggccaactccgacgccctcaagctggccaaggaagtcgatccccaaggcctacggaccatcggtgtcatcaccaagcttgacctgatggacgagggcaccgacgccagggacgtcttggagaacaagttgctcccgttgagaagaggctacattggcgtggtgaaccgcagccagaaggatattgagggcaagaaggacatccgtgcagcactggcagctgagaggaagttcttcctctcccacccggcctaccggcacatggccgaccgcatgggcacgccacatctgcagaagacgctgaatcagcaactgaccaaccacatccgggagtcgctgccggccctacgtagcaaactacagagccagctgctgtccctggagaaggaggtggaggagtacaagaactttcggcccgacgaccccacccgcaaaaccaaagccctgctgcagatggtccagcagtttggggtggattttgagaagaggatcgagggctcaggagatcaggtggacactctggagctctccgggggcgcccgaatcaatcgcatcttccacgagcggttcccatttgagctggtgaagatggagtttgacgagaaggacttacgacgggagatcagctatgccattaagaacatccatggagtcaggaccgggcttttcaccccggacttggcattcgaggccattgtgaaaaagcaggtcgtcaagctgaaagagccctgtctgaaatgtgtcgacctggttatccaggagctaatcaatacagttaggcagtgtaccagtaagctcagttcctacccccggttgcgagaggagacagagcgaatcgtcaccacttacatccgggaacgggaggggagaacgaaggaccagattcttctgctgatcgacattgagcagtcctacatcaacacgaaccatgaggacttcatcgggtttgccaatgcccagcagaggagcacgcagctgaacaagaagagagccatccccaatcaggtgatccgcaggggctggctgaccatcaacaacatcagcctgatgaaaggcggctccaaggagtactggtttgtgctgactgccgagtcactgtcctggtacaaggatgaggaggagaaagagaagaagtacatgctgcctctggacaacctcaagatccgtgatgtggagaagggcttcatgtccaacaagcacgtcttcgccatcttcaacacggagcagagaaacgtctacaaggacctgcggcagatcgagctggcctgtgactcccaggaagacgtggacagctggaaggcctcgttcctccgagctggcgtctaccccgagaaggaccaggcagaaaacgaggatggggcccaggagaacaccttctccatggacccccaactggagcggcaggtggagaccattcgcaacctggtggactcatacgtggccatcatcaacaagtccatccgcgacctcatgccaaagaccatcatgcacctcatgatcaacaatacgaaggccttcatccaccacgagctgctggcctacctatactcctcggcagaccagagcagcctcatggaggagtcggctgaccaggcacagcggcgggacgacatgctgcgcatgtaccatgccctcaaggaggcgctcaacatcatcggtgacatcagcaccagcactgtgtccacgcctgtacccccgcctgtcgatgacacctggctccagagcgccagcagccacagccccactccacagcgccgaccggtgtccagcatacacccccctggccggcccccagcagtgaggggccccactccagggccccccctgattcctgttcccgtgggggcagcagcctccttctcggcgcccccaatcccatcccggcctggaccccagagcgtgtttgccaacagtgacctcttcccagccccgcctcagatcccatctcggccagttcggatccccccagggattcccccaggagtgcccagcagaagaccccctgctgcgcccagccggcccaccattatccgcccagccgagccatccctgctcgactaggcctcgaggggggcgtgctctcgggggggcctcacgcacccgcggcgcaggagcttcagtggtctggggccctccgccgcccctatgctgggaccaggctcccagtgggcagccctggcctcttccttaacgctggccccggtccagggccggcccctgtgcctggctggacaccgcactgcgcaaaggggccctggagctccaggcagggggcgctggggtgttgcactttgggggatggagtctcagggtggcagaggggggaccagaacccttgacaccatcctgaatgaggggtccagcctgggggggactctaccaaggtcttcttgggctgggaaagcccatgtagggcaggccttctataagtgcgggcaccaagggcgcctacatccccaggccttgctggggtgcaggggtatatcaacttcccattagcaggagctccccagcggcaagcctggcccagtgggctcggtagtgcccagctggcaggcctgaggtgtacatagtccttcccggccatattaaccacacagcctgagcctggcccagcctcggctgccagaggtgcctttgctaggcccggagccgttggcccgggccggccttgccctattcctctcctcctcctcctcctgggtcccccagggtggctgggcttgggctatgtgggtggtggtggcggggggtcttgggggcctctcagctcccgcccatgcctccctgatgggtgggcccagggcggcctctctctgaggagacctcacccactcctcgctcagtttgaccactgtaagtgcctgcactctgtattctattaataaactaaaataaagggaagacgctgctggtg

SEQ ID NO: 12794 - DNA, 8665 bp, Homo sapiens
ccttcccctccccactcttctccttccctcccctcccctcccttcccctccggagcggctggggctgcggcgccgctgctgacacggatcggccgcggccgccaccgggcggaggctgcgcggcgcagacccagacgggcggccccggagggcgcgcggcgatggcggcggcgggcaggcggcgggcgcggcgggcgaggggtccgggctgagctgcgggccggcccggatggcgggcggcgcgggctggtcgggcgcccccgcggctctgctgcgctccgtgcgccgcctgcgcgaggtgttcgaggtgtgcggccgcgaccccgacggcttcctgcgcgtggagcgcgtcgcggcgctcggactgcgcttcggccagggcgaggaggtggaaaaacttgtgaaatatttggatcccaacgacctggggagaatcaacttcaaggacttttgccggggggtgttcgccatgaaagggtgcgaggagctgctgaaggatgtgctgtcggtggagagcgcggggacgctgccgtgcgcgccagagatcccagactgcgtggagcagggcagcgaggtcacaggccccacctttgctgatggcgagctcatccccagggaacccggcttttttcccgaggacgaggaggaggctatgacgctggcgccacctgagggcccccaggagttgtacacagacagccccatggagagcactcagagcctggaggggtctgtcgggagtcctgccgagaaggacgggggacttgggggcctgtttctgccagaagacaagtccctggtccacactccatccatgacgacctcagacctttctacacactccaccacctcgctcatcagcaatgaggagcagtttgaagactatggggagggtgacgatgtggactgtgcccccagcagcccttgccccgatgatgagaccaggaccaacgtctactcggacctggggtcttcggtgtcttccagtgcggggcagacgcctaggaaaatgcggcacgtgtacaacagcgaattgctagatgtttactgctctcaatgctgcaagaaaatcaacctgctcaatgacttggaagcccgactgaaaaacctgaaggccaacagccccaaccgaaagatctccagcacggcctttggacggcagctcatgcacagcagcaacttcagcagcagcaatggcagcaccgaagacctgttccgggacagcattgactcttgcgacaatgacatcacagagaaggtaagcttcctggaaaagaaggtgacagagctggagaatgacagcctgaccaatggggacctgaagagcaagctgaagcaagagaacacacagctggtgcacagggtgcatgagctggaggagatggtgaaggatcaggagaccacggccgagcaggctctggaggaggaggcgcggcgccaccgcgaggcctacggcaagctggagagggagaaggctaccgaggtggagctgctcaatgccagggtgcagcagttggaggaagaaaatacagagcttagaacaacagtgactcggctcaagtctcaaacagagaaactggatgaggagcggcagcgcatgtctgaccgtctggaggacaccagcctgcggctcaaagatgagatggacctgtacaagcgcatgatggacaagctgcgacagaaccgccttgagttccagaaggagcgggaggcgacgcaggagctcatcgaggacttgcggaaggagctggagcacctgcagatgtacaagctggactgcgagcggccaggcaggggccgcagtgcctcctctggcctaggcgagttcaatgccagggcccgcgaggtggagctcgagcacgaggtcaagcggctcaagcaggagaattataagctgcgggatcagaacgacgacttgaatgggcagattttgagcctcagcctctacgaagcaaaaaacctctttgctgcccagactaaagcccagtctctggctgcggagatagacaccgcctcgcgcgatgagctaatggaagccctgaaggagcaggaggagatcaacttccggctgaggcagtacatggacaagattatcctcgccatcctggaccacaatccctccatcctcgagatcaaacactaaggcacggggctggctgcagagcagccttaggaccctgggaccaagggcagaccctgcccaaggatgcaggcctaagccgggcctcacactcacactgtaaatgtctctctggccaccatgcgttacgtgtacccgtgtatatgtggggaggctgtgcacacgagcgaggggtgagtggccgtggctgtgggcagcatccacacggttagccgtgcatgcactttgtggcccctttgcaaggggcagagggtactggaagtgggaggaggcaaggtctgctatcaggagttactgtaaaaacaagaactggaagctcgtgtttccggtactgggtaaaatgattctacctctggggataaggattcacattcgctctagtacgatgggctctttcaccccactcctagtccccttgggagtgggagcaaaattgtgatctttcctaggagtttgaatgccccatatttgtgtcctcgccagctctttggccacctttcaagccccagtgttcaagctcagagaggatgaaggggcatctggagggtccatgagatggggccctcaccaaatgccttggccaccggccagcagccctctgtgatgtgtgtgcagagtgaacagaggactcaggtttcatagcagctagtgcggggcatcctcatcctgtacctatagagttcgtgcactcccccatccatgctacctacctccccgtttctgtttcagttttaagacaatgaagcagcattcactgcgtcattgtaacatgaagggataaaaatgaaggagaaggagggtttgggatgggtgtctaaggcaggagttgacatcgggcaaccaaagaaatgagttttggggaggaacacaactcccatcccagtcagtttccttcccatggctgcatcttaagatggatgcacggagaaaccgtctgcctggctccctgtcttcattctccacgcagcctggtgatggcaggcctgggtttggatttcagaatcctagctccgggctccactcgtgtggcagcaagactgcttcgttccagcgtttagaaacacacctgtatttgattctcagccaggggagcactcgctgcactggtgggaggcggttgggaaagttgcaggaaaaccttagtcttccatccttctgacccatggtggaaattcacaccatggatttttaatggatctttgttctaggcagctgggaatagacatggtacttaccttagagttttccaatttatctcaattttatatggcttgtgattcattttcttaatccaaatatatataaacgtgtgtggtcttattcttccccctgcagtttcttgctttcttcagcacatcttatagtatgagaaggaaggtttgggcatgttgggaagggcggtggagggggagttgcagaaagagagggcagtgagggtgaggagaggggatctggggacttgggtgtgacacctgcttgacagaggcagggctgtggccaggaccaaccttcaattccattccaatcagcctttgcatttgttggatctcgtggcttctttttaatcttttgttggggattagtttcatgctgcacataatggggttgcactggtctgacccaggactttggagccacccacactgggaagactaggctaggcagtcggtcttctaggagtttctcagccccttaggacgcgggtctccttgggctcccccaagggttctgcgaagaggcagtggaagaaggcatgaggagagggtctcttgagaatttgccaataggaaggagtggccacggctgaaaggaacaagacagatcctgacatagctttggcctgggtgttaggtcagaaggagtactggtgcgtgggggccttaccccagggttgagtattttatctgtaaaatgttatctgccctttggctgcattggaatttcagagaaggctgcagaggcctgggttacacagcctgagtcacaacgtgggaaggaatctctgccacgggaaaggtgggcggaagcagctggcagcctggggcgtgcttcaggctcctccctctaaggggcgccatgggaacaggctccggagggagccggcgtctgaaaggcccccgggacctgctgcagtgccagaggggcctctggagcaggcctggcttttaaatggggggctgaattccagctcacacacacctcaagtccaaccttactttcttcagccagaatacatttcttgtaaaacctggcttgttgcttggcttttaaagatggtgtatgtttgtaaaaatattcttctgggctcaaaagctagcttgagggggcagatgccccaggtgtcccagctccacagcccctggcagatcccagaccccttggtggcaggtcccagagcctaggtggtaggagcttgatctttgtttctgcccttacccctcagtagtggggctgcgaggtagtagacaggatgcccagttaagtttgaatttcagatagaaaataattttagaataaatatgttctatctaatacatgggacagatgttatttttagagataggatcttgctctgttgcccaggctggagtgtagtggtatgatcatagctcaccacaaccttgaactcccaggctcaagcgatcctcccgccttaactgcctgagtagctgggactacaggcatgcaccaccacgcccagctaatttttcttattttttgtagagacagggtctcactgtgttgcctcactcgagctgctgacctcaagtgatcctcccacctcagcctgccaaagcactgggattacaggcatgagccaccatgcctggccaggacatatttgaaatggggagattttaaaaattctgatgattagactgaatcctcagacgttctggtttgattgttgtgggtgtagcccaggcatgggattttttaaagagctgctcaggtaattccaatttaattgcgtgtcctacttgggttttttgtttgtttttattgtttttgctaaacctggcaaccctaccgagtagggattagcagtaacttatctgaaatttagaggtgttttgggggtggggcgagggtttctgtagtagactcagattttacatggccctgagctgcccttgcgttcagttggaagccacgcaaaatgaactgaaccaggagtgagcttcgtgtacattatctattagaaaatgaagtaccttctggttcagctagtccctgtgcgttgagaggctttaagaaacttctagtaaaaatgtttttttcttttagctttgaattggccagagtttatcctagattattttattttaaattggtagaattctttgcgaactgtcacagagaaattccttttcatgactttatttctgacctattaaaacatgaacaggccaggcatggtggctcacgcctgtaatcctagcacttgggaggcagtggcaggcggatcacttgagctcaggagtcctaaaccagcctgggcaacatagtgataccttgtctctaccaaaagttaaaaaaaaaaaaaaaaaagctcaagaacctgcacgagggcctaaaacagtgggctcagctttggctgtgcattggaatcacctggggagatttgtaagcttctgctgtctgggctgaacccccagaggttcggattgaattggtgtggggtgtggtccaggcatcgagatgtgtaaagacctccccaggtgatgatatgcagtccgaggttgagactgccctgtcctgcaaggtcgttggccagaggtagaggaaactggtcaaagtggctgttgggcttgtcaagcccgtggctgaatgacagtgagctctcttgctgggagggttccttttcctgttgttgaatggtcctggcctgcaggatgggaggccagatgccttcaggagctggtggatccagctgttctcaccagcctggaggttagcagaccagagtgggtgggcaggaccttggcctggtgcccctggaatcagtgggtggcatgtgttgggatatactggctacaggctcatctcaaagagcaggtagaacagagtcagcagggaactgacaggtggggctgtccccctgaaagcagccgcagaaacagctgccacctatttgcatagctgagcaggaggacatactgtctttgtgggttttgcttctggtctgtttcctgactgggttgataaagggagtcccagctcgttccctgttagccaaaccagcatcctactcacacaccggacactccaggtgctagtccactggtgctggtgttcaggggagttggggggggggggcgcggggacagaagcgcgggttcttggttccaatgagggacttagcagaagcctccaggggccagcagggccaggtgaaactgggagaaatgaagccctctgtgtcctgtgtgtgtggtggggtttaatgcattagcaaatttaaacttaaaaactaactctaggccgggcacggtggctcacacctgtaatcccagcactttgggaggccaaggcaggtggattgcctgagctcaggagttcgagaccagcctggacaacatggtgaaactcttgtctttatttttttaaaaaaacaaaaagtaactttcgatgtgatcataccaggaaagttttgcgtggtcaccatgccaagaaaatgactttggttgcccagcagatccacagcgactctttctcaagggctactgtggattctagattgaggaaaggggccacttaggactcagtgctggtatcctccacagtcctttctcccagactctggccctccctttgggacccaggaaatcccctctagggtgacgctgctggctaggaagactgaggtctgctgcgccaaggggcctcaagttagaagggccatgccgttcagtggatgactttgagcgctgatcctagggacctgccaggtcctcacttcctgccctgggtgcacacatgaatggggcagccagcaggaagcgggagaggctggaaccaggagcctgccctacctgcatggcaggacaactctgaggcccttctgccatattctctgctacccaccagagaaaataggctgccttctagaaagatttgtttctaaaagcgtagaccctggggaagtataatgtcaccatgctcaccaggcgaggtttcccatatgacctccctgccccgacctcgtaggttgctcctttccccatctgtaaggtagagatgtctgccccggagctaccagctggggatggcatccaggccatgtctcctgcaggatccaagtgctgttgtccccagggtgaccctgcctcctgctggggcccatccgctttgctgtgctgcacaggctgttttcatctgcatggtttggggtctttgtccttgtgccttttcttccccatcgccactgtacaggattttccacattgcccactgcctccttttctacatcgtctcatctccctggcctttcccgagccctgtaaatgtgtactttttcaacgtgcctcccccaggtgaggccagctctcccgggcacattcgtccacaaggatcaggccccacttacccttggctcgctcagcctgtagacttggtaactttgtacagaatctttcattattgtcttaagcatggggggctaggacccacttagtccctcctccagcctgcagctaatttaggagccttgcattccagaaaagggcaactttgtgtaaagcagcttctcccacagagctttccctgcattgttagtgatgtcgggcaaagcatcactctttaacctggggcattggccccagcagggatatcatgggaccgcagccgctccgtgcactgtctctgcccccagaggaagccctgtccatggttcctggtgcacggccacaggcctgccttgaggccaccacatctggtgtctagaacagctgcgggccccacttgggcagaaggaagaggtgctagctgctgcccctgcctgctgtgaacacctgcccagcccttccttgtctgctgaggtgctcagaccagagtgccattaaataccaactgatgtcacggagcggacggtgcattgccaaggactcacagctgtgggctcccttccagctcctcccactttcttggctgggtcttctgaggcctacgtggaatgaactacacatgtggcctcatgcccaagggtttgttagatggcctctgactctgtgggattcaacttgacttttttgccccaggaggctctgtctggaaacaggcttagctttagtgctggggtgggacctgccctgtgggccccagggaggggacagtgggggtgaggccctgaggctgtccagggtctgagctctttgcctccaacctgcttctgccccaaaaggaacaggctgttggtggcaggctcctcccggggagctgtactgtacagaccaaggtgtaaataaacagtttgctcttctcgcaaaaaaaaaaaaaaaaaaaaaaaaaaaaaaaaaaaaaaaa

SEQ ID NO: 12795 - DNA, 1552 bp, Homo sapiens
gcggaagatggcggcgtccaagggaggttgagggctctgaggaggcgttgagaggtttccgtacagcccgaccgtgcggctttggggatcccatcgctctgtgtttcctgctccaggtttcgcgtctcgcatcttcccagaccctcgggcgcgatgtggaggagctgcctccggctgcgggacgggggacgccgtctcctgaatcggccggcgggtggccccagcgcttctatgagtccggggccaaccatcccgtctccagcccgggcttacgccccgccgacagaaaggaagaggttttatcagaatgtcagcatcacacagggtgaaggtggctttgagataaacctggaccacaggaagctgaaaactccccaagccaagctctttaccgtccccagcgaggccctggccattgcagtggctactgagtgggattcccagcaggataccatcaagtactacaccatgcacctgaccacattgtgcaacacatcattggacaacccaacccagagaaacaaggatcagctgatccgggcagccgtgaagtttctggacaccgacaccatctgctacagggtggaggagcccgagacattagtggaacttcaaaggaatgagtgggatccaatcatcgaatgggctgagaaaagatacggcgtggagatcagctcctccaccagcataatgggacccagcatccctgccaaaactcgggaggtgctcgtcagccacctggcatcttacaacacatgggctttacaagggattgagtttgtagctgcccagctcaagtccatggtgctaaccttgggcctgattgacctgcgcctgacagtggagcaggccgtgctgctgtcacgcctggaggaggagtaccagatccagaagtggggcaacattgagtgggcccatgactatgagctgcaggagctgcgggcccgcaccgccgccggcaccctcttcatccatctctgctccgagagcaccacagtcaagcacaagctcctgaaggagtgaggcctgggcagagcacactcagcaggatagaggcagtgcagccacagctcccccggccttcagggctccccagcctgtggggctggcttccttggcttttggggactcggcctcagcgtcaccctgagattccccccgagacacagtgcgctagtacggctgtccggaggtcagcctgatttcaacccaggtgcccctggcctggccagcagtgaatgtaggagatgaattgtgcaagtgactttctctcgactctgattttattaaatatttctccaccctggaaatgtgctgagccctgttttcacgtatgcctctgcacttctccattcttcctgttttgtctaggttccagagggttaaacagcttatctcccatggcgtgtttggatatctgctgcctgtggtcaggaaccttgcactggggaaacaatcatgtaatccacagacaactctatttgtgttcttcagcctcagcctgaaggcttttttttggctggcttttaatcaaacaatcttttgaaacaat

SEQ ID NO: 12796 - DNA, 2390 bp, Homo sapiens
agagggagacggacgttgagagaacgaggaggaaggagagaaaatggcgtccacggattacagtacctatagccaagctgcagcgcagcagggctacagtgcttacaccgcccagcccactcaaggatatgcacagaccacccaggcatatgggcaacaaagctatggaacctatggacagcccactgatgtcagctatacccaggctcagaccactgcaacctatgggcagaccgcctatgcaacttcttatggacagcctcccactggttatactactccaactgccccccaggcatacagccagcctgtccaggggtatggcactggtgcttatgataccaccactgctacagtcaccaccacccaggcctcctatgcagctcagtctgcatatggcactcagcctgcttatccagcctatgggcagcagccagcagccactgcacctacaagaccgcaggatggaaacaagcccactgagactagtcaacctcaatctagcacagggggttacaaccagcccagcctaggatatggacagagtaactacagttatccccaggtacctgggagctaccccatgcagccagtcactgcacctccatcctaccctcctaccagctattcctctacacagccgactagttatgatcagagcagttactctcagcagaacacctatgggcaaccgagcagctatggacagcagagtagctatggtcaacaaagcagctatgggcagcagcctcccactagttacccaccccaaactggatcctacagccaagctccaagtcaatatagccaacagagcagcagctacgggcagcagagttcattccgacaggaccaccccagtagcatgggtgtttatgggcaggagtctggaggattttccggaccaggagagaaccggagcatgagtggccctgataaccggggcaggggaagagggggatttgatcgtggaggcatgagcagaggtgggcggggaggaggacgcggtggaatgggcagcgctggagagcgaggtggcttcaataagcctggtggacccatggatgaaggaccagatcttgatctaggccctcctgtagatccagatgaagactctgacaacagtgcaatttatgtacaaggattaaatgacagtgtgactctagatgatctggcagacttctttaagcagtgtggggttgttaagatgaacaagagaactgggcaacccatgatccacatctacctggacaaggaaacaggaaagcccaaaggcgatgccacagtgtcctatgaagacccacccactgccaaggctgccgtggaatggtttgatgggaaagattttcaagggagcaaacttaaagtctcccttgctcggaagaagcctccaatgaacagtatgcggggtggtctgccaccccgtgagggcagaggcatgccaccaccactccgtggaggtccaggaggcccaggaggtcctgggggacccatgggtcgcatgggaggccgtggaggagatagaggaggcttccctccaagaggaccccggggttcccgagggaacccctctggaggaggaaacgtccagcaccgagctggagactggcagtgtcccaatccgggttgtggaaaccagaacttcgcctggagaacagagtgcaaccagtgtaaggccccaaagcctgaaggcttcctcccgccaccctttccgcccccgggtggtgatcgtggcagaggtggccctggtggcatgcggggaggaagaggtggcctcatggatcgtggtggtcccggtggaatgttcagaggtggccgtggtggagacagaggtggcttccgtggtggccggggcatggaccgaggtggctttggtggaggaagacgaggtggccctggggggccccctggacctttgatggaacagatgggaggaagaagaggaggacgtggaggacctggaaaaatggataaaggcgagcaccgtcaggagcgcagagatcggccctactagatgcagagaccccgcagagctgcattgactaccagatttattttttaaaccagaaaatgttttaaatttataattccatatttataatgttggccacaacattatgattattccttgtctgtactttagtatttttcaccatttgtgaagaaacattaaaacaagttaaatggtagtgtgcggagtttttttttcttccttcttttaaaaatggttgtttaagactttaacaatgggaaccccttgtgagcatgctcagtatcattgtggagaaccaagagggcctcttaactgtaacaatgttcatggttgtgatgttttttttttttttttaaaataaaattccaaatgtttaataaaaaaaaaaaaaaaaaaa

SEQ ID NO: 12797 - DNA, 2230 bp, Homo sapiens
ccttgtaattcataaatctctgaaaacttaaaagtttgagcaaaagtttgtcatgtttctatgagtaatttataataaaacttgatcagaatttgtgagactagcgtttgtctttatattttcctttttttttttttttttttgagacacagtctcgctctgtcgtccaggctggagtgccgtggcgtaatctcggctcactgcaacctctgcctcctggattcaaacaattcttctgcctcagcctcctgagtagctgggattacaggaccagtgatggtatagaacactgtattagagacatggagctggggctggatgaagattccatcagtaattcaatcaacagacaagtgttatccaatcacgtctttaaatcaatcactgacatggagctggggctggatgaagattccatcagtaattcaatcaacagacaagtgttatccaatcacgtctttaaatcaatcactgatcccagcccctataaaagggagcagccttaggaggcacatcagataaacccagtgtggaaagctagtcacacatcagctcagtgttcggcccgggattacccagtcaaccaaggagcttgcagttttaaagaatccaccaactgttgaaacaaatccctagagacacaaggcaagagactgaatcatcaaagtaaagtctctctgagaattattgctaagaatggctttagatctaagaaccatatttcagtgtgaaccatccgagaataatcttggatcagaaaattcagcgtttcaacaaagccaaggacctgctgttcagagagaagaagggatttctgagttctcaagaatggtgctcaattcatttcaagacagcaataattcatatgcaaggcaggaattgcaaagactttataggatctttcactcatggctgcaaccagaaaagcacagcaaggatgaaattatttctctattagtcctggagcagtttatgattggtggccactgcaatgacaaagccagtgtgaaagagaaatggaaatcaagtggcaaaaacttggagagattcatagaagacctgactgatgacagcataaatccacctgccttagtccacgtccacatgcagggacaggaagctctcttttctgaggatatgcccttaagagatgtcattgttcatctcacaaaacaagtgaatgcccaaaccacaagagaagcaaacatggggacaccctcccagacttcccaagatacttccttagaaacaggacaaggatatgaagatgaacaagatggctggaacagttcttcgaaaactactcgagtaaatgaaaatattactaatcaaggcaatcaaatagtttccctaatcatcatccaggaagagaacggtcctaggcctgaagagggaggtgtttcttctgacaacccatacaactcaaaaagagcagagctagtcactgctagatctcaggaagggtccataaatggaatcactttccaaggtgtccctatggtgatgggagcagggtgtatctctcaaccagagcagtcctcccctgagtctgcccttacccaccagagcaatgagggaaattccacatgtgaggtacatcagaaaggatcccatggagtccaaaaatcatacaaatgtgaagaatgccccaaggtctttaagtatctctgtcacttattagctcaccagagaagacacaggaatgagaggccatttgtttgtcccgagtgtcaaaaaggcttcttccagatatcagacctacgggtgcatcagataattcacacaggaaagaagcctttcacatgcagcatgtgtaaaaagtccttcagccacaaaaccaacctgcggtctcatgagagaatccacacaggagaaaagccttatacatgtcccttttgtaagacaagctaccgccagtcatccacataccaccgccatatgaggactcatgagaaaattaccctgccaagtgttccctccacaccagaagcttcctaagctgctggtctgataatgtgtataaatatgtatgcaagtatgtatattcctatagtatttatctacttaggatataagatataatctcctgattatgctttcaatttattgtcttgcttcattaaaatgtaaggctaaggagagcatggaatttgtcagttttgttcactaaagtattccaagtggttgggaaagtggaacatttccaagaaccaataaatttctgttgaat

SEQ ID NO: 12798 - DNA, 1130 bp, Homo sapiens
agtgaggcgtcgtccgtactggaggctagctcttgtcgcggccgcggcgagttaacatcgtttttccaatctgtccgcggctgccaccacccaagacagagccagaatgttcaggatgctgaacagcagttttgaggatgaccccttcttctctgagtccattcttgcacaccgagaaaatatgcgacagatgataagaagtttttctgaaccctttggaagagacttgctcagtatctctgatggtagagggagagctcataatcgtagaggacataatgatggtgaagattctttgactcatacagatgtcagctctttccagacaatggaccaaatggtgtcaaatatgagaaactatatgcagaaattagaaagaaacttcggtcaactttcagtggatccaaatggacattcattttgttcttcctcagttatgacttattccaaaataggagatgaaccgccaaaggtttttcaggcctcaactcaaactcgtcgagctccaggaggaataaaggaaaccaggaaagcaatgagagattctgacagtggactagaaaaaatggctattggtcatcatatccatgaccgagctcatgtcattaaaaagtcaaagaacaagaagactggagatgaagaggtcaaccaggagttcatcaatatgaatgaaagtgatgctcatgcttttgatgaggagtggcaaagtgaggttttgaagtacaaaccaggacgacacaatctaggaaacactagaatgagaagtgttggccatgagaatcctggctcccgagaacttaaaagaagggagaaacctcaacaaagtccagccattgaacatggaaggagatcaaatgttttgggggacaaactccacatcaaaggctcatctgtgaaaagcaacaaaaaataaatagccatgcatttgatttgtttagttttgattgttttaacagttagtaatggtgctgggtaataagcataagaccaatctcttgctgttaaatcagttctgtccttggcaactttcttctgatatctgaatgttcatgaaggtcctagctttatattgtccctcttttaggaataaaattttgattttcaaaaaaaaaaaaaaaaaaaaaaaaaaa

SEQ ID NO: 12799 - DNA, 4074 bp, Homo sapiens
gggtttcggcccttccagaccgtctctcctcagggttggagacttcggggccaagatggcgacgggaacgggcaaacacaagctgctaagcactggccccacagagccatggtccatccgagagaagctatgtttagcatcttctgtcatgagaagtggcgatcaaaattgggtatcagttagcagagcaatcaagccctttgcagaacctggccgccctccagactggttctctcaaaaacattgtgcttcccagtactcggagcttttagagaccactgagacaccaaaacggaaacgaggtgaaaagggagaagtggtggaaactgttgaagatgttattgttcggaaattgactgctgagcgagttgaagaactaaagaaagtgataaaggaaacccaggagagatatagacggctaaagagagatgcagaactaattcaagctggacacatggacagcagactggatgagctttgcaatgacattgcaacgaaaaagaaattggaagaagaggaggctgaagtaaagaggaaggctacagatgctgcataccaggctcgtcaagcagtaaaaacacccccccggaggttacccactgtgatggttcgctctcctatagattctgcctccccaggaggtgattatccacttggggacttgactccaaccactatggaagaggctacctctggggtcaatgagagtgaaatggctgtggcttctggccacctgaacagtacaggtgtcctcctggaggtaggcggggtccttcccatgatacatggtggggagatacagcaaacacccaatactgttgcagcctcccctgctgcatcaggtgctcccactctttcccggcttttagaagctggtcctacacagttcaccacacctcttgcttccttcactactgttgccagtgagcctccagttaaacttgtgccaccccctgtagagtctgtgtcccaagctaccattgtcatgatgcctgcgctgccagcaccatcctctgctccggctgtctccactactgaaagtgtagctccagtgagtcaacccgacaactgtgttcccatggaggctgtgggggatccacatactgtgactgtttccatggacagcagtgaaatatccatgatcatcaattctatcaaagaagagtgttttcgatcaggggtagcagaggctcctgttggatcaaaggctcccagcatagatgggaaggaagaattagatctggctgagaagatggatattgctgtgtcttacacaggtgaagagctggattttgagactgttggagacatcattgccatcattgaggacaaggtagatgatcatcctgaagtgctggatgtggcagcagtggaagcagcactgtcattttgtgaagaaaatgatgatcctcagtccctgcctggcccctgggagcatcctatccagcaggagcgggacaagccagtacctctccctgcaccagaaatgacggtcaagcaagagagactggactttgaggaaacggaaaacaagggaatacatgaactggtggacatcagggagcccagtgcagagatcaaggtggaacctgcagaaccagagccagtcatttcaggagccgaaatagtagctggagttgttccagccacaagtatggagccaccagaactcaggagtcaggacttagatgaggaactgggaagtactgcagctggagagattgttgaagcagatgttgccattgggaaaggcgatgagactccacttacaaatgtgaagacagaggcatcccctgaaagcatgttgtctccatcacatggctcaaatcccattgaagatcctttagaggcagagactcagcacaagtttgaaatgtcagactcattgaaagaagaatcagggactatttttggaagccagataaaggatgccccaggtgaggatgaggaggaagatggtgtcagtgaagcggccagcctagaggagcctaaggaagaggatcaaggagaaggctacttgtcagaaatggataatgaacctcctgtgagcgagagtgatgatggcttcagcatacacaatgctacactgcagtcacacacactggcagactccatccccagcagccctgcttcttcacagttctctgtctgtagtgaggatcaggaagctattcaggcacagaaaatttggaagaaagccatcatgcttgtatggagagctgcagctaatcataggtatgccaatgtcttcctgcagcctgttacagatgacatagcacctggctaccacagcattgtgcagaggcctatggatttgtcaactattaagaaaaacatagaaaatggactgatccgaagcacagctgaatttcagcgtgacattatgctgatgtttcagaatgctgtaatgtacaatagctcagaccatgatgtctatcacatggcagtggagatgcagcgagatgtcttggaacagatccagcaattcttggccacgcagttgattatgcaaacatccgagtctgggatcagtgctaaaagtcttcgagggagagattctacccgcaaacaggatgcttcagagaaggacagtgtcccaatgggctctcctgccttccttctctctctctttatgggacacgagtgggtttggctggattctgaacaagatcatcccaatgactctgagttgagcaatgactgcaggtccctcttcagctcatgggactccagtctggatcttgatgtgggcaactggagggaaactgaggatccagaggctgaggaactagaggaaagcagcccggagagagaacctagtgaactgcttgttggggatggaggcagtgaggaatctcaggaagcggcaaggaaagccagccaccagaacctcctccactttctctctgaggtagcttatttaatggagcccttgtgcatcagcagcaacgaatcaagtgaaggctgctgccctccatctggtaccagacaagaaggaagggaaattaaagctagcgaaggagaaagggagctctgcagagagactgaagagctttcagctaaaggagaccccttagtagctgaaaagccactgggagaaaatggaaagccagaggtggcttcagctccctcagttatttgtacagttcagggactactcacagagagtgaagagggggaggctcagcaagaatccaaaggggaggaccagggtgaagtatatgtgtcagagatggaagaccagcccccttcaggcgagtgtgatgatgcctttaacattaaggagactcccttggtggatacacttttcagccatgctacctcctcaaagctgactgatctaagccaggatgaccctgttcaggatcatttgctatttaagaagactctcctgccagtctggaagatgattgccagtcacaggttcagcagtccatttctgaagcctgtgtcagaaaggcaggccccagggtacaaggatgtggtgaaaagacccatggacttaactagcctgaagagaaatctctctaagggtcggattcgcaccatggcccaattcctgcgagacctgatgctgatgttccaaaatgctgtaatgtacaatgactctgatcatcatgtataccatatggctgtggagatgcggcgagaagtcctggagcagattcaggtactgaatatctggttagacaaaagaaaaggctcaagtagtctggaaggagaaccagctaacccagtggatgatggaaaacctgttttctaacctggagctgctatcctgactttttctagagtttgaatctctcccggaactctgacctagagaggatcctggtacttctttgccatgtcctcattttcttttccaacaagaataataccttaactcacaaccaacgagtcaaagatgcatgtggacataatataaagaaaaaaaggggaagctgaggtttggatttatgccataaatgttgcccacatctttgttccatcggcttgatttaaagacaattccattagatcttttctaagccttttactctataaataaatgtatttacacaataaaaaaaa

SEQ ID NO: 12800 - DNA, 3253 bp, Homo sapiens
gggtttcggcccttccagaccgtctctcctcagggttggagacttcggggccaagatggcgacgggaacgggcaaacacaagctgctaagcactggccccacagagccatggtccatccgagagaagctatgtttagcatcttctgtcatgagaagtggcgatcaaaattgggtatcagttagcagagcaatcaagccctttgcagaacctggccgccctccagactggttctctcaaaaacattgtgcttcccagtactcggagcttttagagaccactgagacaccaaaacggaaacgaggtgaaaagggagaagtggtggaaactgttgaagatgttattgttcggaaattgactgctgagcgagttgaagaactaaagaaagtgataaaggaaacccaggagagatatagacggctaaagagagatgcagaactaattcaagctggacacatggacagcagactggatgagctttgcaatgacattgcaacgaaaaagaaattggaagaagaggaggctgaagtaaagaggaaggctacagatgctgcataccaggctcgtcaagcagtaaaaacacccccccggaggttacccactgtgatggttcgctctcctatagattctgcctccccaggaggtgattatccacttggggacttgactccaaccactatggaagaggctacctctggggtaacccccgggactttgccgagtaccccagtcacctcgtttcctgggattcctgacacccttcctccaggctctgcacccttagaagcccccatgaccccagtaacagatgattcaccccagaaaaagatgcttggacagaaagcaactccacccccctcccctctgctgtcagagctcttgaagaagggcagcctcctgcctactagccccagactggtcaatgagagtgaaatggctgtggcttctggccacctgaacagtacaggtgtcctcctggaggtaggcggggtccttcccatgatacatggtggggagatacagcaaacacccaatactgttgcagcctcccctgctgcatcaggtgctcccactctttcccggcttttagaagctggtcctacacagttcaccacacctcttgcttccttcactactgttgccagtgagcctccagttaaacttgtgccaccccctgtagagtctgtgtcccaagctaccattgtcatgatgcctgcgctgccagcaccatcctctgctccggctgtctccactactgaaagtgtagctccagtgagtcaacccgacaactgtgttcccatggaggctgtgggggatccacatactgtgactgtttccatggacagcagtgaaatatccatgatcatcaattctatcaaagaagagtgttttcgatcaggggtagcagaggctcctgttggatcaaaggctcccagcatagatgggaaggaagaattagatctggctgagaagatggatattgctgtgtcttacacaggtgaagagctggattttgagactgttggagacatcattgccatcattgaggacaaggtagatgatcatcctgaagtgctggatgtggcagcagtggaagcagcactgtcattttgtgaagaaaatgatgatcctcagtccctgcctggcccctgggagcatcctatccagcaggagcgggacaagccagtacctctccctgcaccagaaatgacggtcaagcaagagagactggactttgaggaaacggaaaacaagggaatacatgaactggtggacatcagggagcccagtgcagagatcaaggtggaacctgcagaaccagagccagtcatttcaggagccgaaatagtagctggagttgttccagccacaagtatggagccaccagaactcaggagtcaggacttagatgaggaactgggaagtactgcagctggagagattgttgaagcagatgttgccattgggaaaggcgatgagactccacttacaaatgtgaagacagaggcatcccctgaaagcatgttgtctccatcacatggctcaaatcccattgaagatcctttagaggcagagactcagcacaagtttgaaatgtcagactcattgaaagaagaatcagggactatttttggaagccagataaaggatgccccaggtgaggatgaggaggaagatggtgtcagtgaagcggccagcctagaggagcctaaggaagaggatcaaggagaaggctacttgtcagaaatggataatgaacctcctgtgagcgagagtgatgatggcttcagcatacacaatgctacactgcagtcacacacactggcagactccatccccagcagccctgcttcttcacagttctctgtctgtagtgaggatcaggaagctattcaggcacagaaaatttggaagaaagccatcatgcttgtatggagagctgcagctaatcataggtatgccaatgtcttcctgcagcctgttacagatgacatagcacctggctaccacagcattgtgcagaggcctatggatttgtcaactattaagaaaaacatagaaaatggactgatccgaagcacagctgaatttcagcgtgacattatgctgatgtttcagaatgctgtaatgtacaatagctcagaccatgatgtctatcacatggcagtggagatgcagcgagatgtcttggaacagatccagcaattcttggccacgcagttgattatgcaaacatccgagtctgggatcagtgctaaaagtcttcgagggagagattctacccgcaaacaggatgcttcagagaaggacagtgtcccaatgggctctcctgccttccttctctctctctttgatggaggaaccaggggacgccgctgtgccattgaagcagatatgaagatgaaaaagtgaagcctcagagttaccctctttgagccgaacctaaaataaaagtaaacaagatagagcttgggcttgcgggcccagttccagaggtggaagttacagaagaggaggtacctgggccacacgacatgagctggaaaatctctcttagagagttggagtagcacaattgcctgttttagggcagaaaccatgggctatgttaatgtcctaatgtgtagctagcagatcgtagctagtttgtattgtcttgtcaattgtacagactttttaaaaaaaacaaccaccagtgaaatgtgtgtgtatacaataaactgaaaaaaaaaactaaaaaaaaaaaaaaaaaaa

SEQ ID NO: 12801 - DNA, 3086 bp, Homo sapiens
gggtttcggcccttccagaccgtctctcctcagggttggagacttcggggccaagatggcgacgggaacgggcaaacacaagctgctaagcactggccccacagagccatggtccatccgagagaagctatgtttagcatcttctgtcatgagaagtggcgatcaaaattgggtatcagttagcagagcaatcaagccctttgcagaacctggccgccctccagactggttctctcaaaaacattgtgcttcccagtactcggagcttttagagaccactgagacaccaaaacggaaacgaggtgaaaagggagaagtggtggaaactgttgaagatgttattgttcggaaattgactgctgagcgagttgaagaactaaagaaagtgataaaggaaacccaggagagatatagacggctaaagagagatgcagaactaattcaagctggacacatggacagcagactggatgagctttgcaatgacattgaaaaagaaattggaagaagaggaggctgaagtaaagaggaaggctacagatgctgcataccaggctcgtcaagcagtaaaaacacccccccggaggttacccactgtgatggttcgctctcctatagattctgcctccccaggaggtgattatccacttggggacttgactccaaccactatggaagaggctacctctggggtaacccccgggactttgccgagtaccccagtcacctcgtttcctgggattcctgacacccttcctccaggctctgcacccttagaagcccccatgaccccagtaacagatgattcaccccagaaaaagatgcttggacagaaagcaactccacccccctcccctctgctgtcagagctcttgaagaagggcagcctcctgcctactagccccagactggtcaatgagagtgaaatggctgtggcttctggccacctgaacagtacaggtgtcctcctggaggtaggcggggtccttcccatgatacatggtggggagatacagcaaacacccaatactgttgcagcctcccctgctgcatcagagtctgtgtcccaagctaccattgtcatgatgcctgcgctgccagcaccatcctctgctccggctgtctccactactgaaagtgtagctccagtgagtcaacccgacaactgtgttcccatggaggctgtgggggatccacatactgtgactgtttccatggacagcagtgaaatatccatgatcatcaattctatcaaagaagagtgttttcgatcaggggtagcagaggctcctgttggatcaaaggctcccagcatagatgggaaggaagaattagatctggctgagaagatggatattgctgtgtcttacacaggtgaagagctggattttgagactgttggagacatcattgccatcattgaggacaaggtagatgatcatcctgaagtgctggatgtggcagcagtggaagcagcactgtcattttgtgaagaaaatgatgatcctcagtccctgcctggcccctgggagcatcctatccagcaggagcgggacaagccagtacctctccctgcaccagaaatgacggtcaagcaagagagactggactttgaggaaacggaaaacaagggaatacatgaactggtggacatcagggagcccagtgcagagatcaaggtggaacctgcagaaccagagccagtcatttcaggagccgaaatagtagctggagttgttccagccacaagtatggagccaccagaactcaggagtcaggacttagatgaggaactgggaagtactgcagctggagagattgttgaagcagatgttgccattgggaaaggcgatgagactccacttacaaatgtgaagacagaggcatcccctgaaagcatgttgtctccatcacatggctcaaatcccattgaagatcctttagaggcagagactcagcacaagtttgaaatgtcagactcattgaaagaagaatcagggactatttttggaagccagataaaggatgccccaggtgaggatgaggaggaagatggtgtcagtgaagcggccagcctagaggagcctaaggaagaggatcaaggagaaggctacttgtcagaaatggataatgaacctcctgtgagcgagagtgatgatggcttcagcatacacaatgctacactgcagtcacacacactggcagactccatccccagcagccctgcttcttcacagttctctgtctgtagtgaggatcaggaagctattcaggcacagaaaatttggaagaaagccatcatgcttgtatggagagctgcagctaatcataggtatgccaatgtcttcctgcagcctgttacagatgacatagcacctggctaccacagcattgtgcagaggcctatggatttgtcaactattaagaaaaacatagaaaatggactgatccgaagcacagctgaatttcagcgtgacattatgctgatgtttcagaatgctgtaatgtacaatagctcagaccatgatgtctatcacatggcagtggagatgcagcgagatgtcttggaacagatccagcaattcttggccacgcagttgattatgcaaacatccgagtctgggatcagtgctaaaagtcttcgagggagagattctacccgcaaacaggatgcttcagagaaggatggaggaaccaggggacgccgctgtgccattgaagcagatatgaagatgaaaaagtgaagcctcagagttaccctctttgagccgaacctaaaataaaagtaaacaagatagagcttgggcttgcgggcccagttccagaggtggaagttacagaagaggaggtacctgggccacacgacatgagctggaaaatctctcttagagagttggagtagcacaattgcctgttttagggcagaaaccatgggctatgttaatgtcctaatgtgtagctagcagatcgtagctagtttgtattgtcttgtcaattgtacagactttttaaaaaaaacaaccaccagtgaaatgtgtgtgtatacaataaactgaaaaaaaaaactaaaaaaaaaaaaaaaaaaa

SEQ ID NO: 12802 - DNA, 3572 bp, Homo sapiens
ctgaggcggcgctgtgtgtgtgaagcgtacctagggcgggaggcgacatggagacaggggcggccgagctgtatgaccaggcccttttgggcatcctgcagcacgtgggcaacgtccaggatttcctgcgcgttctctttggcttcctctaccgcaagacagacttctatcgcttgctgcgccacccatcggaccgcatgggcttcccgcccggggccgcgcaggccttggtgctgcaggtattcaaaacctttgaccacatggcccgtcaggatgatgagaagagaaggcaggaacttgaagagaaaatcagaagaaaggaagaggaagaggccaagactgtgtcagctgctgcagctgagaaggagccagtcccagttccagtccaggaaatagagattgactccaccacagaattggatgggcatcaggaagtagagaaagtgcagcctccaggccctgtgaaggaaatggcccatggttcacaggaggcagaagctccaggagcagttgctggtgctgctgaagtccctagggaaccaccaattcttcccaggattcaggagcagttccagaaaaatcccgacagttacaatggtgctgtccgagagaactacacctggtcacaggactatactgacctggaggtcagggtgccagtacccaagcacgtggtgaagggaaagcaggtctcagtggcccttagcagcagctccattcgtgtggccatgctggaggaaaatggggagcgcgtcctcatggaagggaagctcacccacaagatcaacactgagagttctctctggagtctcgagcccgggaagtgcgttttggtgaacctgagcaaggtgggcgagtattggtggaacgccatcctggagggagaagagcccatcgacattgacaagatcaacaaggagcgctccatggccaccgtggatgaggaggaacaggcggtgttggacaggcttacctttgactaccaccagaagctgcagggcaagccacagagccatgagctgaaagtccatgagatgctgaagaaggggtgggatgctgaaggttctcccttccgaggccagcgattcgaccctgccatgttcaacatctccccgggggctgtgcagttttaatgaccagaaggaaaggaaaccctcgccggtggggaggcagagccttatcctcggctgcccttcttggctccctgcattccagggacttgctcgtcttgtttacccctagccatcctttctttcaagggtgaaccaggccttccaccctgaccttgcatctccagactgttccagagaaggtgcggggccagctgctatgtggtggccgctgtggctgacactgagtgaaggtgtttgaaatgcaggagaggatatcccagcaaattgggatcacatgcttttgtctccacagcaaccagccactgcaggcagcatgtctttcctcccctgctctctgcttgctgttgttttgacgctattctgcttgcatgtcttctggttgggatgtggagttgttgctggactctcaggcgaagctgaagtcattgaagtgtgtgaagctctgtgcttgcatgagggcaagcaaggaatggctgtgcctgaggctgctctgggaaactccttgccccttgacctcttttgagagcattcacgtggtcttcttgctcatccccttataaatgtgctttgcctgcctcagcctcatggtcagagcagtggagactggagccctgtttgcacgttctagttgttcggagaaagcctaggttctgggctcaggtccagatgcagcggggattctgttctctgactgtggcgaccttgctttggttcttgttgaagtgaaccaagcccggccaccacgcatggcatgctgtgcttggctccccataagacgtcctctttgggtgcacggtgtcaaagtgtgggcaggagtggagagctggtgccctcaggaggagaccacagcatgtccatcagctcagcagagctcgacagccacaagtcctgagaagctttgaccttgaagggcttctgggagaggaggaatttctgcatggggcgtgaaggcacactgtcccaccacaactgaaccagaagagagtgaagactcccctcttcccatcctctgtgccaggtgccagactgtgctccttggaacttatggcccaatcttacctgttctccagggactggtcactgcctcaggacccccaagcctatgccctgagccatggctgctgactgactccagccaaggtgcaaagacgagattatgagacaggtcctcaggcctgtgttccaagtactcacaggggctctgggtgcccatcgccgggagtatggttcagctgccaccggcactgtccatttgcctgtctgtcaagctcagagcatggataagccacacagcagggcagtgcaccctggcaccatgcacggccagcaagaatcaaggcccgcagatgctaagagggcctattgtcaggggaaggtccccgctcctgcacactctctatggatacttgggttgtgggggctctcttggagagtaagtttgtggtttgtttctggtttacagtggtggctgacaccccttgtaagaaagcattcctgggaagtcttctgtgggtccaaacatgttgctccgatcatcacaggagagcaaaaggccctagataccccctttggaatgtgagagtcttgttgtctgatatttgccactgagctggtgaagcccctctaaagagatctcgaccctggggagcagaattcttgtcatctatgaggggtcctgagaaagacttgtcattttttttcctggagttcttcccattgaggtcctaggatttgcacaccactgtcccacaagagctttcctgcctaatgaaaggaggtcttgtggtgtgtgtctcctctcttctctatagttcccgagttggcccccattgcagcccccaccctgtgggtagtcttccagaagtgatgcagtggtgtgagatgccctgcaccttgttatttgggagactttgagagtcattcacttccatggtgactagtgtttgttttgcctgattttatattctgtgttgcatttctccccactccctgccctgctttaataaacagcaaaccaatatctaggaagaatgactgagggatagtattgggtattggccccatggcaggaacagccacttgcatctggtcccggtgccacactgcggtgcttggtgtggttgtggagcctgtccctgcgcgccttgctcccgttgagccacgctgtctggtgggtgattctctgccctgagccaccaccctggactggcccagtctccagagctggcacaccctgcctgttttctctttttagacacaacagccgcagtttggccagccactaagtcccaccagctgaggtccgaggaaagcggggtgactcatttcccttgtccagggcccgaggagagtgaggtgtccagcctgcaaagctattccagctccttggtgttggtttgcaataaattggtatttaagcaaaaaaaaaaaaaaaaaaaa

SEQ ID NO: 12803 - DNA, 7011 bp, Homo sapiens
agtgtgggcgggggccggggggccgagaggtaccgccgccaccgcgcggggagccgcagcggttccgagcggggcccaacatggcggagagagaggtggagtccggcccccgaaagaggtttgaacaaaaaagtggtgcagtttttgatgaaattgtagagaactgtggtggtatcatggatacagaaatgtctgaagatatagaccacaacttaactcctacccttgacagcatgtcttatggaatgccgaatcaaacaggatctgaaaattcattgctggatgaagatgattattttttgaactctggggatcttgcaggaattccagtcgttggtagtgacaatgaggatgaacaggattttagttcaaaggacaatcttgtttcttcaattcatactgatgatagcttggaagtagagagaagagtcacacagcatgaatcagacaatgaaaatgaaatacaaattcaaaataagttaaaaaaagactttcctaaacaatttgatcaggtttctgtctttaaatcaatacggaaagattttagtctagtaagagaaaacagcaaagagacattttctggaaaggagaaaaatagagacctaacttatgaacgtgaaaaacggttggataaaccccataaagatttggattcaaggttgaaaagcagtttttttgataaagcagctaatcaagttgaagaaacattacatacccatttaccacaaaccccagaaacaaactttagggattccagctacccatttgccaataaagaatccattggttcggaactggggaattcctttgcatcaaatattagaattaaagaagaacctttggatgatgagtatgacaaagcaatggcaccacagcagggactactagacaaaataaaagatgaacctgacaatgctcaagagtatagtcatggccaacagcaaaaaactcaagagggggaactgaaaattagtgctgtgttttcagtcagtggcagccctcttgctccacagttgactactggctttcagccctcactggcgtcatctggcatgaataaaatgcttccttcagttccagccacagctgttcgagtttcctgttctggttgtaaaaaaatcctccagaaggggcaaactgcttatcagaggaaagggtctactcagctattctgctccacactgtgcctcactggatatacagttccacctgcccgcccaccgcctcctctcaccaagaaaacttgttcaagttgctcaaaagacattttaaatccaaaggatgtgatcagtgcccagtttgaaaacaccaccactagtaaagatttttgcagtcagtcatgtttgtcaacatatgaactgaaaaaaaaacctattgttaccataaatacaaatagtatttcaaccaaatgcagcatgtgtcagaagaatgctgttattcgacatgaagttaattaccagaatgtggtccataaactttgcagtgatgcctgcttctctaagtttcgttctgctaacaacctcaccatgaactgttgtgagaactgtgggggttactgttacagtgggtcgggacaatgccacatgcttcagatagagggacagtctaagaagttttgtagttcatcgtgtatcacggcatacaagcagaaatcagccaaaattacaccgtgtgcgctttgcaaatcattgagatcctcagcagaaatgattgaaaataccaatagcttggggaagacagagcttttctgttctgttaattgcttatctgcttacagagttaaaatggttacttctgcaggtgtacaagttcagtgtaacagttgtaaaacctcagcaattcctcagtatcacctagccatgtcagatggaagtatacgcaacttctgcagctacagctgtgtggtagctttccagaatttattcaacaaaccaactggaatgaattcttcagtagtgcccttgtctcagggccaagtaattgtaagcatccccacaggttccacagtgtcagccggaggaggtagcacatctgctgtttctcccacctccatcagtagctctgctgcagctggtctccagcgtctcgctgcccagtcccagcatgttgggtttgcacgaagtgttgtgaaactcaaatgtcaacactgtaaccgtctttttgccacaaaaccagaacttcttgactataagggcaaaatgtttcagttctgtggcaagaattgttctgatgaatataagaaaataaataatgtaatggcaatgtgtgaatattgtaaaattgagaaaattgtaaaggagactgttcggttctcaggtgctgacaagtcattctgtagtgaaggttgcaaattgctttataaacatgacttggcaaaacgctggggaaatcactgtaaaatgtgcagttattgtttacagacatctcccaaattggtacagaataatttaggagggaaagtggaagagttctgttgtgaagaatgcatgtccaaatatacagttttgttctatcagatggccaaatgtgatgcttgtaagcgacagggtaaactcagtgagtccttgaaatggcgaggggaaatgaaacatttctgtaacctgctttgtatcttgatgttctgtaatcagcaaagtgtatgtgacccgccttcacaaaataatgcagcaaatatttccatggttcaagctgcttcagcaggacccccatctctgagaaaagattcgactccagttatagccaatgtagtatcattggcaagtgcccctgctgctcagcctacagtgaattctaacagtgtcttacaaggtgcagttccaacagtaacagcgaaaatcatcggtgatgcaagtactcaaacagatgccctgaaactgccaccttcccaacctccaaggcttttgaagaacaaagctttattatgcaaacccatcacacagactaaagccacctcttgcaaaccacatacccaaaacaaagaatgccagacagaagacactccaagtcagccccagattattgtggtgccagttcccgtaccagtgtttgttcccatacctcttcacctttatactcaatatgctccagtcccatttggaattccagttccaatgcctgtccctatgcttattccatcttcaatggatagtgaagataaagtcacagagagtattgaagacattaaagaaaagcttcccacacatccatttgaagctgatctccttgagatggcagaaatgattgcagaagatgaagagaagaagactctatctcagggagagtcccaaacttctgaacacgaactctttctagacaccaagatatttgaaaaagaccaaggaagtacatacagtggtgatcttgaatcagaggcagtatctactccacatagctgggaggaagagctgaatcactatgccttaaagtcaaatgctgtgcaagaggctgattcagaattgaagcagttctcaaaaggggaaactgaacaggacctggaagcagattttccatcagactcctttgacccacttaataaaggacagggaatccaggcacgttcccgaacaagacgacgacacagagatggcttcccccaacccagacgaagaggacggaagaagtctatagtggctgtggagcccaggagtcttattcaaggagcctttcaaggctgctcagtgtccgggatgacactgaaatacatgtatggggtaaatgcttggaagaactgggttcagtggaaaaatgccaaggaagagcagggggatctaaaatgtggaggggttgaacaggcctcatctagcccacgttctgaccccttaggaagtactcaagaccatgcactctctcaagaatcctcagagccaggctgtagagtccgctctatcaagctgaaggaagacattctgtcctgcacttttgctgagttgagtttgggcttatgccagtttatccaagaggtgcggagaccaaatggtgaaaaatatgatccagacagtatcttatacttgtgccttggaattcaacagtacctgtttgaaaatggtagaatagataacatttttactgagccctattccagatttatgattgaacttaccaaactcttgaaaatatgggaacctacaatacttcctaatggttacatgttctctcgcattgaggaagagcatttgtgggagtgcaaacagctgggcgcttactcaccaatcgtccttttaaacaccctccttttcttcaataccaaatacttccaactaaagaatgttactgagcacttgaagctttcctttgcccatgtgatgagacggaccaggactctgaagtacagtaccaagatgacatatctgaggttcttcccacctttacagaagcaggagtcagaaccagataaactgactgttggcaagaggaaacgaaatgaagatgatgaggttccagtgggggtggagatggcagagaatactgacaatccactaagatgcccagtccgactttatgagttttacctgtcaaaatgttctgaaagtgtgaagcaaaggaatgatgtgttttaccttcaacctgagcgctcctgtgtcccgaatagccccatgtggtactccacattcccgatagaccctggaaccctggacaccatgttaacacgtattctcatggtgagggaggtacatgaagaacttgccaaagccaaatctgaagactctgatgttgaattatcagattaaaacggaagtgaggttcttattttcatacatattggtatgcaccaaactgtgaatgcatccagctgttggaaaatgatgtataagtctaagtcctcttgacttgaccataagatcatggaaaacagatgacttgtgaaccccacagtgtggatgtgcaaatgaaaattgaaggaaagaatatgaactgagaaatgttctttggcagtgatatagttcttagacatcttcagaatgactaatttctccgagtggtgcataatcttattttgtttgggagtaacaaatcgtggaatatttttaaggaaaactgttgtataaaactttaccatagtaaccttagaccttagagaggtagctttggagtgaaactttggctgcaataggctactttggcaagccctccgtaaaagtcagaggagagatcagtacagagctaagagtgacatcaaatgaggactgtgggacccagatttgaagacccaataaaaatactcaactttttaaaaaagatagtgaagtggtcttgattgattttgattttcactgccaagccaatcatgtgaaggacagaagcttttgccatgggcccctcacatcagggaaaatgaccttcactgctgttaacagtaatgtgtccctttcattttctggatcaagccttctcagcggtgggtctggatgtgggtaaactaaggtaaaggggatgatattccacaaactaattatgcacacagaaaatctgtggagcctatcagaccccaagtgtcttgaaatgtttgtagaaacccactaaaatgccccttctctgggtgtgggcccttattgcagctgtctcacagcctgagctgtggtacagagaaatgggggttctccttttattttcattttttttccccaatggcagcttttctcccgttgttttaccttcctatttcccaaacagttcctcttattttgtcttttgcaccagtttctggaggcccttgtcatttcaaaaaggatagtctcttttcttactctggcaaacctgtgagtgattccacaaagatacagtattacttagctatctgaattatgatagaaaaggtcctagttaggttcctatataaagcatttggaagatgaccttgttgcccttgaaacttgaaaatagggattctggggtgaggatacaaagacattgtcttgcatatccataagcaggtcttagagcattattccaaactctagctgtttcagtagttctatgaggattgcaagtcataggtgtgtgtggcatatcagtccatctccctcatctccattctcagtttcttccccacaaaatttggaatcaaagcttttatgacgtttgccaattgcagaacttcttcagctaaggttaatttgacgctatgataaaactgagagatgtcaaaaagcctcttagaaattttaatcttgaaagacttttcagggtatctcattttttaggtgggggtggcaggtgtatttcttttttaacaaataaaaggcatttaagtaaaactaaaatgaaaaaagtaggccttctgacattgtgtacttggtggttctgtccctctgcctgtaacaaatctcatttttgttaccaagaactgtatgaaagaagtaaatccaccccgattctgtatgattaattccatctgtgtttgtcatttctgactggaaaacttcttactccataccttgttcgatatggaggacaaataattggattgtctgataagtctgccaataaactatccagaaatagcaagtgtaatagtccccactatacgaattttatggtttgtataaacactaacattttccccttctgtagttgtatgaaaaaacaaatattgttagcatagtagataaattgttatgaaataccagaaaaaaaaatctgtatcttttactgagaacacccaatacccagataaatgactgtatcaggatttcatttgcatgttagtccacagagttgcccagaaccctaaatttattcataagagaaaatattgattaattattggtcattcctcataagtgtagctgttgatgtgtgcgtctgattattgcttttttaattttatgaaaattgtgtaaaattacattttttttccaggggagaaaaaaacatcaaacaaaaacatctaaatcatcctttttgttctttttcagtttttaaccacttttaggttttccccttacagaaaccacagaaatattcccttagaataaaatagtatatttgtatttgaaaaaaaaaaaaaaaaaa

SEQ ID NO: 12804 - DNA, 6390 bp, Homo sapiens
cccgcgcagacttgtctccggccagtcgcgcgtgggtagaggccttaggcgggcgttgcgaagggttgtttgctagagttcggaccttgttacggcgcgaagttccctccttggggcgggggaaaggtaccgcacccgctacctagtgtgaatgaactgtggcgtgggctgctaagggcaggctgcggagtacccgggccgtggccatgaactcacccgtggaccctggcgctaggcaggcgttgaggaagaagccacccgagcggactcccgaggacttaaatactatttattcttatcttcatggaatggaaatattatcaaatctcagggaacatcagcttagattaatgtctgcaagagcacgctatgagagatacagtggcaatcaggttctcttttgttcagaaacgattgccagatgttggtatatcctactttctggatctgtgcttgtgaaaggctccatggtcttgcctccttgcagttttggtaagcagtttggaggaaaaagaggatgtgattgtcttgtattagagccttcagaaatgattgtggtagagaatgccaaagataatgaagatagtattctacaaagagaaattcctgccagacaatcccgaagaagatttcggaaaattaactataaaggagagcgccaaaccattactgatgatgtggaggttaacagctatctttctcttccagctgatcttaccaagatgcatctcacagaaaaccctcatccacaggtgactcatgtgtcttctagtcagtctggttgtagcattgccagtgactctggaagcagcagtttatctgatatctatcaggctacggagagtgaggtaggagatgtagatttgacacgtcttccagaaggacctgttgattctgaggatgacgaagaggaagatgaagagattgatcgaacagatccattgcaggggcgagatcttgttcgagaatgtcttgaaaaagaacctgcagacaaaactgatgatgacattgaacaattgctggagtttatgcaccagctccctgcatttgcaaacatgaccatgtctgtaaggagagaactctgctcagtgatgatttttgaagtggtagagcaggctggagctattattcttgaagatgggcaagagcttgactcatggtatgttattttaaacggcactgtggaaatcagtcatccagatggaaaagttgaaaatttgtttatgggaaatagttttggaattactcccactctggataagcagtacatgcatggaattgtcaggactaaagtagatgattgtcagtttgtctgcatagcccagcaagattattggagaattttaaaccatgtggaaaaaaatacccataaagttgaggaagagggagaaattgttatggtacatgagcatcgggaactagaccggagtggaaccaggaaaggacacattgtgatcaaggcaacacctgagcgtctcataatgcatttaatagaagaacattccatcgtggatccaacttatatagaagattttctattaacttacaggacatttcttgaaagtcctttggatgttgggatcaaactattggaatggtttaagatcgacagcttaagagataaggtgacacggattgtattattatgggtaaataatcattttaatgattttgaaggtgaccctgctatgactcgatttctagaggaatttgaaaaaaatctggaagatacaaagatgaatggtcatctccggttattgaatattgcctgtgctgcaaaggctaagtggagacaggttgtgctgcaaaaggcttcccgcgagtcccctctacaattcagccttaatggagggagtgagaagggatttggtatttttgttgaaggagtagaacctggtagcaaagctgctgattcaggactgaaacgtggtgatcagattatggaagtaaatggacaaaactttgagaatattacatttatgaaagccgttgaaattttgaggaataatactcatcttgcacttactgtgaagaccaacatttttgtgttcaaagagttactttttaggactgaacaagagaaatctggtgttcctcatattcccaaaattgctgaaaaaaaaagtaatcgccattctatccagcatgtgccaggagatattgaacagacatcacaggagaaaggaagtaagaaagttaaagcaaatactgtttcaggtggaagaaacaaaatcaggaagattttggataaaacacgatttagtatcttgcctccaaagctatttagtgatggaggcctaagccaatcacaagatgacagcattgtgggaacaaggcactgtaggcatagtctggctataatgcccatccctggaacactctcatccagcagccctgatctcctgcagcctaccaccagtatgttggatttttccaatccttcagatatccctgatcaagttataagagttttcaaagtggatcagcaaagttgctacattatcatcagtaaagacaccacagctaaagaagtagtttttcatgctgttcatgaatttggtttgaccggtgcatccgacacatattctctctgtgaagtttctgttactcctgagggtgtcataaaacagagaagacttccagatcagttctccaaattagctgatagaattcaactcaatggaaggtattacttaaaaaataacatggaaacagaaaccttatgttcagatgaagatgctcaagaactagttaaggaaagccagctatccatgctgcagctcagtaccattgaggtggccacccagctgtcaatgagggactttgatttgtttcgtaatattgaaccgactgagtacatcgatgacctttttaagttaaattccaaaacaggaaatactcatttgaagaggtttgaggacattgtaaaccaagagacattctgggttgcctcagaaattttaactgaagcaaatcagctcaaacgaatgaagattattaagcattttattaaaattgcacttcattgtcgagaatgtaagaacttcaattccatgtttgcaataataagtggcttgaacctggcatctgtagcaagactcagaggaacttgggaaaagttaccaagcaaatacgagaaacatcttcaagatctacaagacatttttgatccatctagaaacatggcaaagtatagaaatattcttagtagtcaaagtatgcagcctccaattattccactcttccctgttgtcaagaaagatatgacatttctacatgaaggaaatgactccaaagtagatggtttagtaaactttgagaagttaagaatgatttccaaggaaatccgccaagttgttcgaatgacttctgctaacatggacccagctatgatgtttcgacagaggtcactgagtcaaggaagcacaaattcaaacatgctggatgttcagggaggtgctcacaaaaaaagggcacgccgcagctctctgcttaatgccaagaagctatatgaggatgcccaaatggcaaggaaggtgaagcagtatctttccagtctcgatgtagagacagatgaggagaagttccagatgatgtcattacagtgggagcctgcatatggtaccttgaccaagaatttaagtgagaaaagatcagccaaatcatctgaaatgtctccagtgcctatgaggtcagctggccaaacaactaaagcccacttgcatcaaccccacagagtaagccaggtgcttcaggtgccagctgttaatttgcaccccatcaggaagaagggacaaacaaaagaccctgcactgaatacaagtttacctcagaaagttttaggaacaactgaagaaataagtggtaagaagcatacagaagacactatttctgtggcgtcatctttacattctagtcctcctgcatctcctcaaggctcccctcacaaaggttacacacttattccatcagctaaatctgacaacttgtctgactccagccatagtgagatttcttcacggtccagcatcgtgagcaattgttctgttgactccatgtctgcagctctacaggatgaacggtgttcctctcaggccctggcagtccctgaatccactggggcattggaaaagacagagcacgcttcagggataggagatcatagtcaacatggccctgggtggacactcttgaagccatctctaatcaagtgtttagctgtctcatcgtctgtgagcaatgaagagatttctcaagagcatatcattatagaagcagctgacagtggtcgtggaagttggacttcgtgttcaagcagctcccatgacaacttccaaagccttccaaacccaaaaagctgggattttttgaactcttacagacatacccatttggatgaccccattgctgaagttgaacccactgactctgagccctattcctgttctaaaagctgctctagaacttgtgggcagtgtaaaggaagcctagagagaaagagttggacctcctccagttctctgtctgacacgtatgaaccaaactatgggacagttaaacggagagtattggagagcaccccagctgagtcatctgaaggcttggaccccaaggatgccactgacccagtttataaaactgtcacttcaagtacagaaaagggcttgattgtgtactgtgtcacctcacccaagaaggacgataggtatagggagccacctcccactcctccaggatatttggggatttctttagcggacctaaaggaaggaccccacacacacctaaaacctccagattatagtgtggcagtgcagaggtcaaagatgatgcataacagcctctctagactgccaccagcttctctcagtagcaacctcgtggcctgtgttccatcgaagattgtaactcagcctcagaggcataatttgcagccattccatcctaaactaggagatgtgactgatgcagatagcgaagcagatgaaaatgaacaagtttcagcagtctagcctttggatgacctatttgaaaaccactgaaagtcgtggaggaatgggcaagaaccacctcatgattctgcaggccattgctaacgaacagctcattgctacaaccagtccagaggttttattccctctactccgagcaatgaaatagacctgagttatgcttcctttcatttaatttctgcagataaatagtttcctgagcaatggatgctatgcctggataccagtctccactttgcacgccggaactgccttgggaccacagttacagaaaaaatgtaaactcagagtgatccttgtgtatattgctatagatttttctttaacaagctattttaaagataatggcattattatttccaagccatagcttgggctgaaggacaaattgaaattgtctgccaataccaaggatattcttgtatatttgaaaaataacttattatttgaattgttgtggttttgtttgtatttgagagctcttgttagctgatattcatgtttgaggtcataaaattgtctctggtctgaccaaacagaagtcatctttacagaggtgatatgcttgatctacacagagatgtgacttgatctgtagcaccaatacaatgtaggtctcagtttgagagaaataggaagccctttgcagttgaggtgttaggaacctgctggtcatggtgtggaaggccaaatgaagctgccacagggtttcttgtcagtcctttgggaaatgggagggagtagtttggggaggagggtgggaaccctaatttccacagaatgaaattttgatgttaaatgacatgtatacaaattcttccttaagtgaaagttatgctgcatcgaattgtaactgaaagtatagatccaacaaatagagactgggttctagagagttctggtctatagaaacccaaaactaaaatctctcataactcaagtatggaatactttttttaaagaaattcttatcatgggtgttgtaataatgaagacgaatttgactttatgcagtgttctgcagcatgcctcccccacatctcatagcaccaggttgtgtctgacctgacataccctgcagctctcagctggctgcagtaacattttgtgggagaaagaggagctggagttacagaaatgattgtctcttggttctcagtttttagcccttgagaggacatacttttccagcctcatgggtatggcactcttaattaaaatttcagtggctgtttactggatgaggcagatttttcacatttttgccaattaaatatattttatatatagtaaggttaattttttcagtttttttaatgtaaaagcaagtgaaattttaataaacttctgtaatttcccaaaaaaaaaaaaaaaaaaa

SEQ ID NO: 12805 - DNA, 3260 bp, Homo sapiens
gggtttgagagtttgggaccctgggttggtggggtcagagggagagggggtaccttcctcccggaccgctgggggtgcagggcgccttgggtgtagcacccagaacaggtttctgatctctaacttggctgtgatcattgtgatggagcaagaaaaaaaactgttggtctcagattctaacagctttatggagagggagagtttgaaaagccctttcacaggagatacaagtatgaataatttggaaactgttcaccacaataattctaaggcagataaacttaaagagaaaccttcagaatggtctaaaagacatagaccacaacattataagcatgaggatgcaaaagaaatgccactgacatgggttcaagatgagatttggtgtcatgattcctatgagagtgatggcaagtcagagaattggggaaattttatagctaaagaggaggaaaaacccaatcaccaggaatgggactcaggagaacataccaatgcctgtgtccagcagaattcatcctttgtagacagaccctataaatgttccgaatgttggaaaagcttcagtaatagttctcatttgcgtactcaccagaggacccactcaggagaaaagccttataaatgctctgagtgtgcaaaatgtttttgtaacagttctcacctgattcagcatctaagaatgcacacaggagagaagccctaccagtgtggtgaatgtgggaaaagcttcagcaatacctcccatcttattatccatgagagaactcacacgggagagaaaccctacaaatgtcccgagtgtgggaagagattcagcagcagctctcaccttattcagcatcacagatcacatacaggtgaaaaaccatatgaatgttctgtctgcggaaaaggcttcagtcacagctatgtcctaatagaacatcagaggactcacactggagaaaaaccttataagtgccctgattgtgggaagagttttagtcagagttccagcctcattcgccaccagcggacacacacaggtgagaagccctacaaatgtcttgagtgtgaaaaaagctttggttgtaattctactctaataaaacatcagagaatacatacaggagaaaagccttatcaatgtccagaatgtgggaagaattttagtcgtagttcaaaccttattacacaccagaaaatgcacacaggagagaaatcctatgaaagttctgaatatgaggaaagtttgggtcagaactgcaatgtgatagaagaatgcagaatccagttaggagagaaaccatatagatgttgtgaatgtgggaagagttttggccttagctcccatctcattagacatcagagaacacatacaggagaaaaaccttacagatgttctgagtgctggaaaactttcagtcagagttccaccctggtgattcaccaaaggacacatacaggagagaaaccttataaatgtcctgattgtggtgaaagcttcagtcagagctttaaccttatcaggcaccggaggacccacataggggaaaaaccttacaaatgtaccagctgtgagaaatgcttcagcagaattgcctacctcagtcagcatcggaaaattcacgtagaaaagccttttgagtctcccgacgttggggattttcctcatgaatggacttggaaaaactgttcaggggaaatgcccttcatctcttcattttccgtctcaaattcatcttcctgagtcccaaagcctggttggtgatggttttttcttccttgttggaccatgacaatttaggtattctgtgattgttgtgctataaagtttctttgatgtgtttgtcaaaacatttggaaaaagtcaacctcccagtttaaaggatgggaagaccccaatcaccaggttattggatctgtccagtgagagattcatccaccaaggatgaagaaaggaggacttttaaaaatttaaggtaagatagtaatagcttcaaaagaacacatacagagtaatcctgagagtaagcaaaggaaccatgagaaccgaagctagaattgctattgaattactttattttctcttcccttattgggtagagatacatcattactggcctcaggggtttacccaaagaaagggtatttttgagcaaataatgtgatttcctggctattttgttgggggcttaagatttttttttttcaaatgcatttttagtcactaaaaattaactgtcgtaccatctagaactatactgtccagtaccatagcctctagccgtatgtagctatttgtattaagattaattgaaattttaaatccagttcctcagtcacactagccactttctaagtgctcagtagctctgtgtgaccagcggctactgtattggatattatagaaggttctttcattcaagatcatcattcttgacagacccataaatatttcctataaagactgtagaagtgtgttctggagggtttgctctccaaaaagaattgtaatatagagtagaattgggatagagtattgaagacactgggtttagacattggatattttaatgattgtgtgttctaattcatgtgctgccaactgagttatctagtgatatgacctcactgtcttgaccaaagccagaatagaaggcaggattcctgaattctatcttaaaatttgcaatgaagagccttttccctaaattatcccattatgtaattcttggtcagctcaagaactgggttctttttctaataattaactcactaaatctgagccagtgtccaaggacagtttgtcattaaggagtactgagacttcttagctttggtactgacagttttcttttgcctcttgacataataggtatatggatctgataactgaggtcccatcttccctactcattcctatgggaatgatgctttggaaattattagatatatcctattcccttcctcccatttttttcctgctagtgcaaaaggtagatgagtaggaagattaggactcctgagttgcccatgatttcatctaatttttggattcagaatgtattttatgaataatatgcagagatgcatattaggaatgtgaagccagaatgggtcagttgtagctgctgcaaagttctgtagctgatggtcatttaattgcatgggggttattttatctttcatgattgtggtgcacctgatgctggcggggtatttgtgtgtttttgtattgttatttgattacaaaaataaagcaaaaactaacaaat

SEQ ID NO: 12806 - DNA, 6846 bp, Homo sapiens
ctcgcgccaggcgagtctccgcgtctccctcgcgaactcggtgaaaggaattggcgccgttcgacaccaggcggatccgctctgcagcacgaacccatctccagccgcagccgcagccgccgcccgggccgaggagcagccgcagcagccgccaccagtggccgagtgagcggagccgagtttgaggcagcgcctagcggtgaatcggggccctcaccatgagttcctcgcctgttaatgtaaaaaagctgaaggtgtcggagctgaaagaggagctcaagaagcgacgcctttctgacaagggtctcaaggccgagctcatggagcgactccaggctgcgctggacgacgaggaggccgggggccgccccgccatggagcccgggaacggcagcctagacctgggcggggattccgctgggcgctcgggagcaggcctcgagcaggaggccgcggccggcggcgatgaagaggaggaggaagaggaagaggaggaggaaggaatctccgctctggacggcgaccagatggagctaggagaggagaacggggccgcgggggcggccgactcgggcccgatggaggaggaggaggccgcctcggaagacgagaacggcgacgatcagggtttccaggaaggggaagatgagctcggggacgaagaggaaggcgcgggcgacgagaacgggcacggggagcagcagcctcaaccgccggcgacgcagcagcaacagccccaacagcagcgcggggccgccaaggaggccgcggggaagagcagcggccccacctcgctgttcgcggtgacggtggcgccgcccggggcgaggcagggccagcagcaggcgggaggtaagaagaaggcggaaggcggcggaggcggcggtcgccccggggctccggcggcgggggacggcaaaacagaacagaaaggcggagataaaaagaggggtgttaaaagaccacgagaagatcatggccgtggatattttgagtacattgaagagaacaagtatagcagagccaaatctcctcagccacctgttgaagaagaagatgaacacttcgatgacacagtggtttgtcttgatacttataattgtgatctacattttaaaatatcaagagatcgtctcagtgcttcttcccttacaatggagagttttgcttttctttgggctggaggaagagcatcctatggtgtgtcaaaaggcaaagtgtgttttgagatgaaggttacagagaagatcccagtaaggcatttatatacaaaagatattgacatacatgaagttcgtattggctggtcactaactacaagtggaatgttacttggtgaagaagaattttcttatgggtattctctaaaaggaataaaaacatgcaactgtgagactgaagattatggagaaaagtttgatgaaaatgatgtgattacatgttttgctaactttgaaagtgatgaagtagaactctcgtatgctaagaatggacaagatcttggcgttgccttcaaaatcagtaaggaagttcttgctggacggccactgttcccgcatgttctctgccacaactgtgcagttgaatttaattttggtcagaaggaaaagccatattttccaatacctgaagagtatactttcatccagaacgtccccttagaggatcgagttagaggaccaaaggggcctgaagagaagaaagattgtgaagttgtgatgatgattggcttgccaggagctggaaaaactacctgggttactaaacatgcagcagaaaatccagggaaatataacattcttggcacaaatactattatggataagatgatggtggcaggttttaagaagcaaatggcagatactggaaaactgaacacactgttgcagagagccccccagtgtcttgggaaatttattgagattgctgcccgaaagaagcgaaattttattctggatcagacaaatgtgtctgctgctgcccagaggagaaaaatgtgcctgtttgcaggcttccagcgaaaagctgttgtagtttgcccaaaagatgaagactataagcaaagaacacagaagaaagcagaagtagaggggaaagacctaccagaacatgcggtcctcaaaatgaaaggaaactttaccctcccagaggtagctgagtgctttgatgaaataacctatgttgaacttcagaaggaagaagcccaaaaactcttggagcaatataaggaagaaagcaaaaaggctcttccaccagaaaagaaacagaacactggctcaaagaaaagcaataaaaataagagtggcaagaaccagtttaacagaggtggtggccatagaggacgtggaggattcaatatgcgtggtggaaatttcagaggaggagcccctgggaatcgtggcggatataataggaggggcaacatgccacagagaggtggtggcggtggaggaagtggtggaatcggctatccataccctcgtgcccctgtttttcctggccgtggtagttactcaaacagagggaactacaacagaggtggaatgcccaacagagggaactacaaccagaacttcagaggacgaggaaacaatcgtggctacaaaaatcaatctcagggctacaaccagtggcagcagggtcaattctggggtcagaagccatggagtcagcattatcaccaaggatattattgaatacccaaataaaacgaactgatacatatttctccaaaaccttcacaagaagtcgactgttttctttagtaggctaactttttaaacattccacaagaggaagtgcctgcgggttccttttttagaagctttgtgggttgattttttttcttttcttttttgtacatttttaattgcagtttaaaagtgaatcgtaagagaacctcagcattgtgcacgataagagaatgtgtcagtatttcagggttctacattttatctgtaaaatgtgacttttttttttttttatcacaacagaagtaaaatgttgctttgtacctggtgtcttttattaagaatttactccccccatttctcacagagaataacagtcgggagtcattgtcacaatataatagaaatgttagcaaccagattcatgtaaggactaagtggtcctcatgaattgcattaagactctgtactgctcatattacactccatcctctctgtagtttgctgggtagtggagggggtaagctaaatcatagtttctgacaataactgggaaggttttttcttaaaataacaatggaattggtataattgggattgaaaactaaaacttggaactaagatagagaagatggagtgtatgtagaagggctgttaaaaatgtaaaacttggttgcattatttgtggaggctcaaacttgtgaaggttaataccataatttttccatttgttctgcattttgattctgaaaagaaagctggctttgcccatttcttattaaaaaaacttgttgtaaatccagttgtctaatgggatctatatgaagttagccatgtctgtatgcccttctcccacaaaatactgtataactagtgtgcttgtagtagttaactccaccatctttgtaagctaatgaaattgtgagtcacccatttatatcttaatttttaatcatgtcagttcttgaatgggtatctccttagcctgctgatttctttttctttctaaagaaagtgggtggagaaattaatttagacgtttgtttgcaataaaaagaattcattttactcttgttttgggattctcgccatcaaggttcaaaatccctttatataactcccaagaggagaaatttattaagtgtgtgctttctggacagcttattctttactctgcatagaacatttaggttttaaaaacttaaatgtatactgacaattgatacataattatgaagtaaagttgaattcttcccttcccctcccccccagacaacttttaacatatttaatgaggggaaaaggtactggctgggagaagttaacactgagtttatcatctttacagaatgctaatgctgtcctcaactgattattttatatacatatatatgatacatgaaactctgggatcagatgcttttagaagccatcatgcaagccagtcattgatgtcactgctacacaacactgctaacttgactgtagctatgtaataacattagatcccctaattgtaattatattgggtttgcacagaacactttaatcttcccctcaccaatgtgaagtgaggaatcaggagtcaaactgtagaactaaaatttgacttcagtctagcgtttccttggtgtttttaggttgctttggtaagtttaggtttgctatatttctgattgcttagaattttgttttagccctttaaaatcagatcataaatatgaattcatacttctaaggaattttcttgctataagctggagtttaggtgatgtataggttcagttgagacatttttggaacaggcaaatccttagttaacataagatatttaacagttgaagatagtgtcatggatttttatcttttttagcaagtaatgctaagaaccactggcctgagctactactcttcagtatacattattaggattgcatagacttactagaggaacagtttcaggttttgatgctaatcagtgttgtgtcctaaagttgtcctttgtgcctttaaaaagttttggatatatcttctagtttaaaattgcttattaaggaattcattttataattgcagtgggaaagtaatggtcaagtaacactaggtagactatcatgcctgtttagcccagagaatttggggggagagagaatagataaaaatggcacccagaaaaatgttaaaatctttagtcaagactagaattaatacaattgtctacacttgtatggcagaaataaccttataaagtgtttaaggaattcagagaagggaatgtaccaaataagcaacagggagaaaattaggtaagaagtaagatacgaacgagaaacctgatttattgctcatccttcccttgcctccctaatggcaagcaaaactctgaacatctgaaaaggatgtagttctggacaaatcctgactacccagaggaaactcactgtgagattgctgttgatttgaagggtgctttcactaaggttatattttaaagtagaataacacatgctgagtgtaaactggctttggattggtcagctgcagtagtacaaaaacagcatagaatttgagaaaactaaaactgctatgagatagctatgagaaaactaaaactgctatgagatagaaatgatgtaaaattatgtggaaagttttccctcatatactcacatacagcctttgaagggctctggctctgaccggttgatggccttgagcgagatgaaatcatgaaattgagtcaaatcaatttgacattgaaatgacaagaggaaactcttaaatacataaaaacaagctctcatttgcctaggatagatactgtcttaaaaataaagactgaacctagatgttctgagcactagcaacaaggtattttaacaagtttaaaggaattctctgaaaaagttataaaattattctaggaaacataaccataatagtgttttaagggactttcacctggggattttatattcatgaacagagtgtattctgtatttaaaatgtctcatttgtgggaattggatgacatgttttttgataaatttattcacaatataaattgactttttattctaggaccatgtgaataatgggttccattgcacaaatacaaatattttaatagcttcttaggcagtggtgtagacatcttggatataaataattgtagatcttgtatatttgatttttaaaaaactagaataaacagagaggcataaacatatcttagagtccaagtggtagtgtttagcattggatataataaatggatgttttacaaagtgtttccataattctcttcctatacataaatgtcttgttttcaaaagtggatggaacttggctgggtgtggtggctcacgcctgtaatcctagcactttgggaggccaaggcgggaggatcacttgagctcaggagtttgagaccatcctgggcaacatagtgagacctggtctcttgaaaaaaaaaaagtggatggaacttgtagcagagaattttatctacttctcaacctgcttcagaatacccatttgagatgttcccctggaaagatgaacacaatactgcatctgaagccatttcttcccacctaacattcttaaaatgattagagtctaaactttgtcattcattcctaattctggagctctgaggttgaggtgttcagagtttggtgaataattgggtttaagttttaacattttagtaataataaaagcaaacacatacatgttaaggcctgacaataggttgcaatacccatgcattgggactcatacccagcataaatggtgagggactgaacattagtgctttgagcaagaattggttaactacctgagatctctaaaacagtaatttgaattactaatacataaaccacaagtctcttcgaattgttaattgcctaaatttaccctaaaacttagttaacgctgcagtgcctttattaaagcttttttttgggggggggtgtgggcacagctactccataactttaaattttaaagcatgaaggtgatctagctagtgttagtgcttgagttggtagttacataggctgctcttgaatcgtcctgttttctttgcctagtattagcaccacaggtacatatttgtaaaataagcattaaaagtactttgtccagc

SEQ ID NO: 12807 - DNA, 6789 bp, Homo sapiens
ctcgcgccaggcgagtctccgcgtctccctcgcgaactcggtgaaaggaattggcgccgttcgacaccaggcggatccgctctgcagcacgaacccatctccagccgcagccgcagccgccgcccgggccgaggagcagccgcagcagccgccaccagtggccgagtgagcggagccgagtttgaggcagcgcctagcggtgaatcggggccctcaccatgagttcctcgcctgttaatgtaaaaaagctgaaggtgtcggagctgaaagaggagctcaagaagcgacgcctttctgacaagggtctcaaggccgagctcatggagcgactccaggctgcgctggacgacgaggaggccgggggccgccccgccatggagcccgggaacggcagcctagacctgggcggggattccgctgggcgctcgggagcaggcctcgagcaggaggccgcggccggcggcgatgaagaggaggaggaagaggaagaggaggaggaaggaatctccgctctggacggcgaccagatggagctaggagaggagaacggggccgcgggggcggccgactcgggcccgatggaggaggaggaggccgcctcggaagacgagaacggcgacgatcagggtttccaggaaggggaagatgagctcggggacgaagaggaaggcgcgggcgacgagaacgggcacggggagcagcagcctcaaccgccggcgacgcagcagcaacagccccaacagcagcgcggggccgccaaggaggccgcggggaagagcagcggccccacctcgctgttcgcggtgacggtggcgccgcccggggcgaggcagggccagcagcaggcgggaggggacggcaaaacagaacagaaaggcggagataaaaagaggggtgttaaaagaccacgagaagatcatggccgtggatattttgagtacattgaagagaacaagtatagcagagccaaatctcctcagccacctgttgaagaagaagatgaacacttcgatgacacagtggtttgtcttgatacttataattgtgatctacattttaaaatatcaagagatcgtctcagtgcttcttcccttacaatggagagttttgcttttctttgggctggaggaagagcatcctatggtgtgtcaaaaggcaaagtgtgttttgagatgaaggttacagagaagatcccagtaaggcatttatatacaaaagatattgacatacatgaagttcgtattggctggtcactaactacaagtggaatgttacttggtgaagaagaattttcttatgggtattctctaaaaggaataaaaacatgcaactgtgagactgaagattatggagaaaagtttgatgaaaatgatgtgattacatgttttgctaactttgaaagtgatgaagtagaactctcgtatgctaagaatggacaagatcttggcgttgccttcaaaatcagtaaggaagttcttgctggacggccactgttcccgcatgttctctgccacaactgtgcagttgaatttaattttggtcagaaggaaaagccatattttccaatacctgaagagtatactttcatccagaacgtccccttagaggatcgagttagaggaccaaaggggcctgaagagaagaaagattgtgaagttgtgatgatgattggcttgccaggagctggaaaaactacctgggttactaaacatgcagcagaaaatccagggaaatataacattcttggcacaaatactattatggataagatgatggtggcaggttttaagaagcaaatggcagatactggaaaactgaacacactgttgcagagagccccccagtgtcttgggaaatttattgagattgctgcccgaaagaagcgaaattttattctggatcagacaaatgtgtctgctgctgcccagaggagaaaaatgtgcctgtttgcaggcttccagcgaaaagctgttgtagtttgcccaaaagatgaagactataagcaaagaacacagaagaaagcagaagtagaggggaaagacctaccagaacatgcggtcctcaaaatgaaaggaaactttaccctcccagaggtagctgagtgctttgatgaaataacctatgttgaacttcagaaggaagaagcccaaaaactcttggagcaatataaggaagaaagcaaaaaggctcttccaccagaaaagaaacagaacactggctcaaagaaaagcaataaaaataagagtggcaagaaccagtttaacagaggtggtggccatagaggacgtggaggattcaatatgcgtggtggaaatttcagaggaggagcccctgggaatcgtggcggatataataggaggggcaacatgccacagagaggtggtggcggtggaggaagtggtggaatcggctatccataccctcgtgcccctgtttttcctggccgtggtagttactcaaacagagggaactacaacagaggtggaatgcccaacagagggaactacaaccagaacttcagaggacgaggaaacaatcgtggctacaaaaatcaatctcagggctacaaccagtggcagcagggtcaattctggggtcagaagccatggagtcagcattatcaccaaggatattattgaatacccaaataaaacgaactgatacatatttctccaaaaccttcacaagaagtcgactgttttctttagtaggctaactttttaaacattccacaagaggaagtgcctgcgggttccttttttagaagctttgtgggttgattttttttcttttcttttttgtacatttttaattgcagtttaaaagtgaatcgtaagagaacctcagcattgtgcacgataagagaatgtgtcagtatttcagggttctacattttatctgtaaaatgtgacttttttttttttttatcacaacagaagtaaaatgttgctttgtacctggtgtcttttattaagaatttactccccccatttctcacagagaataacagtcgggagtcattgtcacaatataatagaaatgttagcaaccagattcatgtaaggactaagtggtcctcatgaattgcattaagactctgtactgctcatattacactccatcctctctgtagtttgctgggtagtggagggggtaagctaaatcatagtttctgacaataactgggaaggttttttcttaaaataacaatggaattggtataattgggattgaaaactaaaacttggaactaagatagagaagatggagtgtatgtagaagggctgttaaaaatgtaaaacttggttgcattatttgtggaggctcaaacttgtgaaggttaataccataatttttccatttgttctgcattttgattctgaaaagaaagctggctttgcccatttcttattaaaaaaacttgttgtaaatccagttgtctaatgggatctatatgaagttagccatgtctgtatgcccttctcccacaaaatactgtataactagtgtgcttgtagtagttaactccaccatctttgtaagctaatgaaattgtgagtcacccatttatatcttaatttttaatcatgtcagttcttgaatgggtatctccttagcctgctgatttctttttctttctaaagaaagtgggtggagaaattaatttagacgtttgtttgcaataaaaagaattcattttactcttgttttgggattctcgccatcaaggttcaaaatccctttatataactcccaagaggagaaatttattaagtgtgtgctttctggacagcttattctttactctgcatagaacatttaggttttaaaaacttaaatgtatactgacaattgatacataattatgaagtaaagttgaattcttcccttcccctcccccccagacaacttttaacatatttaatgaggggaaaaggtactggctgggagaagttaacactgagtttatcatctttacagaatgctaatgctgtcctcaactgattattttatatacatatatatgatacatgaaactctgggatcagatgcttttagaagccatcatgcaagccagtcattgatgtcactgctacacaacactgctaacttgactgtagctatgtaataacattagatcccctaattgtaattatattgggtttgcacagaacactttaatcttcccctcaccaatgtgaagtgaggaatcaggagtcaaactgtagaactaaaatttgacttcagtctagcgtttccttggtgtttttaggttgctttggtaagtttaggtttgctatatttctgattgcttagaattttgttttagccctttaaaatcagatcataaatatgaattcatacttctaaggaattttcttgctataagctggagtttaggtgatgtataggttcagttgagacatttttggaacaggcaaatccttagttaacataagatatttaacagttgaagatagtgtcatggatttttatcttttttagcaagtaatgctaagaaccactggcctgagctactactcttcagtatacattattaggattgcatagacttactagaggaacagtttcaggttttgatgctaatcagtgttgtgtcctaaagttgtcctttgtgcctttaaaaagttttggatatatcttctagtttaaaattgcttattaaggaattcattttataattgcagtgggaaagtaatggtcaagtaacactaggtagactatcatgcctgtttagcccagagaatttggggggagagagaatagataaaaatggcacccagaaaaatgttaaaatctttagtcaagactagaattaatacaattgtctacacttgtatggcagaaataaccttataaagtgtttaaggaattcagagaagggaatgtaccaaataagcaacagggagaaaattaggtaagaagtaagatacgaacgagaaacctgatttattgctcatccttcccttgcctccctaatggcaagcaaaactctgaacatctgaaaaggatgtagttctggacaaatcctgactacccagaggaaactcactgtgagattgctgttgatttgaagggtgctttcactaaggttatattttaaagtagaataacacatgctgagtgtaaactggctttggattggtcagctgcagtagtacaaaaacagcatagaatttgagaaaactaaaactgctatgagatagctatgagaaaactaaaactgctatgagatagaaatgatgtaaaattatgtggaaagttttccctcatatactcacatacagcctttgaagggctctggctctgaccggttgatggccttgagcgagatgaaatcatgaaattgagtcaaatcaatttgacattgaaatgacaagaggaaactcttaaatacataaaaacaagctctcatttgcctaggatagatactgtcttaaaaataaagactgaacctagatgttctgagcactagcaacaaggtattttaacaagtttaaaggaattctctgaaaaagttataaaattattctaggaaacataaccataatagtgttttaagggactttcacctggggattttatattcatgaacagagtgtattctgtatttaaaatgtctcatttgtgggaattggatgacatgttttttgataaatttattcacaatataaattgactttttattctaggaccatgtgaataatgggttccattgcacaaatacaaatattttaatagcttcttaggcagtggtgtagacatcttggatataaataattgtagatcttgtatatttgatttttaaaaaactagaataaacagagaggcataaacatatcttagagtccaagtggtagtgtttagcattggatataataaatggatgttttacaaagtgtttccataattctcttcctatacataaatgtcttgttttcaaaagtggatggaacttggctgggtgtggtggctcacgcctgtaatcctagcactttgggaggccaaggcgggaggatcacttgagctcaggagtttgagaccatcctgggcaacatagtgagacctggtctcttgaaaaaaaaaaagtggatggaacttgtagcagagaattttatctacttctcaacctgcttcagaatacccatttgagatgttcccctggaaagatgaacacaatactgcatctgaagccatttcttcccacctaacattcttaaaatgattagagtctaaactttgtcattcattcctaattctggagctctgaggttgaggtgttcagagtttggtgaataattgggtttaagttttaacattttagtaataataaaagcaaacacatacatgttaaggcctgacaataggttgcaatacccatgcattgggactcatacccagcataaatggtgagggactgaacattagtgctttgagcaagaattggttaactacctgagatctctaaaacagtaatttgaattactaatacataaaccacaagtctcttcgaattgttaattgcctaaatttaccctaaaacttagttaacgctgcagtgcctttattaaagcttttttttgggggggggtgtgggcacagctactccataactttaaattttaaagcatgaaggtgatctagctagtgttagtgcttgagttggtagttacataggctgctcttgaatcgtcctgttttctttgcctagtattagcaccacaggtacatatttgtaaaataagcattaaaagtactttgtccagc

SEQ ID NO: 12808 - DNA, 1046 bp, Homo sapiens
gtggtaatggcgtctgtatgatcttcggagcctgctgcatcggacctcggccagtcataaaagatgacaacagcagccaggccaacctttgaacctgccagaggtggaaggggaaaaggagaaggtgatttgagccaactttcaaagcagtattcaagcagagacctaccctctcatacaaagataaaatacagacagactactcaggatgcccctgaagaggttcgtaaccgtgacttcaggagagagttggaagaaagagagagagctgctgcaagagagaaaaatagggatcgtccaacccgagaacatacaacctcctcttcagtgtcaaaaaagccacggttagaccagattcctgccgccaaccttgatgcagatgaccctctaacagatgaggaagatgaagattttgaagaagaaagtgatgatgatgatactgcagctcttcttgcagaactggaaaaaattaaaaaagaaagagctgaagagcaggccaggaaggaccaagaacaaaaagctgaagaagagaggattcgtatggaaaacattctgagcggaaaccctctccttaatctcactggcccatcccagcctcaggccaacttcaaagttaaaagaaggtgggatgatgacgttgtcttcaagaactgtgcaaaaggtgtagatgaccagaagaaagacaaaagatttgtaaatgacacactgcgatctgaatttcacaaaaagttcatggagaaatatattaaatagtacagttttatgtgcttaattaaagactgtaaaacgtaaaggatcattctgactttttttatgagtttttttttcttttcccctgtctaaattgtgtgtgggcttccccagttttaaactcctatctttttctttagtgataccttacttgataatggacttgggaataggtttaacccagtttgcattctccaaatgtttccagtgatatgttttcctgggaaaagcaaatctgcctgtaataaatatttttaatctaaataaaaaaaaaaaaaaaaaaaaaaaaaaaaaaa

SEQ ID NO: 12809 - DNA, 3609 bp, Homo sapiens
cagcccgtcgtggatgactagagccaaccacctgccttccgtcttccaggcagaaccacagagaggctacagccgtcctggcctccctccggccctgagagctcctctggcctgtctcaagtcttaacgtctcaagcgcagactgccggctccgaacggggagaccaggcttctgcaccggaaacaaggcaccggttgtgacgtcacagccgcagagcgcccgacttcccagaaggcaccgagtccctgccgttctcctcaactggcggcggcgcgaacgaatagtcgccggcgacctgtgagggcactcggaagggcgaggggagggctcgaccgctcgcgcctagtttttctatctctcccggagcctgagtctctgagccgtccccagcaaacgctcaggggctgcagaggccccgagaggtgaggggctccgtgagggcgggaaccaggctgaggccgcctctggggagcggagcgtgtccgttgctgagggagcaaggccgggtagggagcctggtgagcgcctcaggcaggggcgcacgctgagctttacggtaaaggtgttccttgaccagcggaagaggccccagagtgagcctggcccggcggtccttagtgggatgtcgcctgccgctctcagcagagctttgacggcggagaggagtcggcaggcggtgtgtggacacctcctcggccttgcatctgctccccgggagagtcaccaaccgcctccccgcccaaagggcaccggagggagcttcggttcgagggcttggctctctggcagatttcctctagtaagaggtggctctggaggccccgcgaaacgagtgtggtgtgtggttgcaaggcatgatggctgcaaaagtggttcctatgcccccaaagccaaagcagtcctttatactgagagttccgccagactccaagctgggccaagacctacttcgagatgccactaacgggcccaagaccatccaccagctagtgctggagcacttcctcaccttcttgcccaagccaagcctggtccagcccagtcagaaagtcaaggagaccttggttattatgaaagatgtgagctcaagccttcagaacagagtgcatcctcgtcccttggtgaagcttctgcccaaaggagtccaaaaggaacaagagacagtgtctctgtatttgaaagctaaccctgaggagctggtggtctttgaggatttgaatgtatttcactgccaggaagaatgtgtgagcttggatcctactcaacaactcacgtcagagaaggaagatgacagcagtgtcggggaaatgatgttactggcagtcaatggcagtaatcctgaaggtgaagatcctgagagggaacctgtagaaaatgaagattatagagaaaagtcttcagatgatgatgaaatggattcttccttggtctctcagcagcctcccgataaccaggaaaaggaacgactaaatacatccattccacaaaaaaggaaaatgagaaatctgttagttaccattgagaatgatactcctctagaggaactctcaaaatatgtagacatcagtattattgcccttactcgaaatcggaggacaaggagatggtacacttgtccactgtgtgggaaacagtttaatgaaagttcttacctcatttcccaccagaggacccacactggagaaaaaccctatgactgtaatcactgtgggaaaagcttcaatcataaaacaaacctcaataaacatgagcgaattcatacaggagagaaaccttattcctgttctcagtgtggaaaaaacttccgtcagaattctcatcggagtcgtcatgaaggaatccatataagggagaagatatttaagtgtccagaatgtgggaaaaccttcccaaagaatgaggagtttgtgcttcatctgcagagtcatgaggctgagagaccatatggttgcaaaaaatgtgggagaagatttggtcggctgtcaaactgtacccggcatgagaaaacccactcagcctgtaagacccgaaagcagaagtaatactgggaaccctttctgggtctgatggtgctgcctcaacctgagagctttcataagtagttctgaattcccaagctgcctaaaaaggtataaatgtgtaaaaatctcattattgccaaaattggataaatgcccatcttagctaaaacctcaaattgctagaaaattcacagggaagaaaacatttcaagggctatacctcagcatctaggctttttggactaaggagctttcctttttgaagttatatgataatgtacaggtcacagatcccctttcccaacactttgaagatgaatctggagtctgcttacttggaaggcaaagagtgacttgtgtctattgaaagtatatccgttttccccccacatggggattcatacttgagaaatagtgcaaagatgcttatctggaactgtgttctggtgaaagaaccaaattactggcttgttagccaacagcttctgatagcaattcatataaccctctaagaatacctgtttaagtcttgagtgttgaaaggaattgtttactttggaatataggaaaacagttgaatgtcagactctcatttgtatgtgatctaaatttgcaatcaatttcaataatatttacaatttgtgataaaactgacttttacagattccttttcacaacataatttaggtgtctactgttcttattgtattttgttctgctgttgatctctccagcagccgtctcatgcttctcccttgctaaaagaagtttggattactcaggcagggccatccagccccaccactagaaaagctcttcagaatcttgtccctctgttgagcccagatctcatgtgctacgaaggaaaccccaagacccagagaggaagggtcaacctggaggcaggaaaaagttggcttggatccatgtctcatcaataaccttaccatatgcttaggtcccctctatgctgtcatcagacctttggcaatggggtggtcactacctcacaaggcaaagtgttgtatgattagaaattacgtctccagtggttagctcacattgcctctcaagagacaggtttccaggtgtcttcattgtagtgggtattaattgtcttcagcctcttgatatccataccttcctgtcctctgcctagaagcaaggccagcggtgcctttacggactgatcgtgtggtgcgatttagggattcttcagttttgcttgctttaggtttccaaaagttatacattggtgttttgattggaataaagaaatcctataagctatttgggaaaaattatagtgtatgtttcccatccagaaacatgcctttctatttattagagtattatattcctgtgaaaatttttctaattttcttcacttgttttacacaattttgttattgtagttttttccattatatttttatagttgattattgcttttacatgggaaagttatttttaattatatatttgtatagtcatctcactgttgttaattttcaatagtttgttggtttagttctgttaacttttggtaaaatgacaccatctacaaagaaaaaaaaaaaaaaaaaa

SEQ ID NO: 12810 - DNA, 3258 bp, Homo sapiens
cagcccgtcgtggatgactagagccaaccacctgccttccgtcttccaggcagaaccacagagaggctacagccgtcctggcctccctccggccctgagagctcctctggcctgtctcaagtcttaacgtctcaagcgcagactgccggctccgaacggggagaccaggcttctgcaccggaaacaaggcaccggttgtgacgtcacagccgcagagcgcccgacttcccagaaggcaccgagtccctgccgttctcctcaactggcggcggcgcgaacgaatagtcgccggcgacctgtgagggcactcggaagggcgaggggagggctcgaccgctcgcgcctagtttttctatctctcccggagcctgagtctctgagccgtccccagcaaacgctcaggggctgcagaggccccgagagcttggctctctggcagatttcctctagtaagaggtggctctggaggccccgcgaaacgagtgtggtgtgtggttgcaaggcatgatggctgcaaaagtggttcctatgcccccaaagccaaagcagtcctttatactgagagttccgccagactccaagctgggccaagacctacttcgagatgccactaacgggcccaagaccatccaccagctagtgctggagcacttcctcaccttcttgcccaagccaagcctggtccagcccagtcagaaagtcaaggagaccttggttattatgaaagatgtgagctcaagccttcagaacagagtgcatcctcgtcccttggtgaagcttctgcccaaaggagtccaaaaggaacaagagacagtgtctctgtatttgaaagctaaccctgaggagctggtggtctttgaggatttgaatgtatttcactgccaggaagaatgtgtgagcttggatcctactcaacaactcacgtcagagaaggaagatgacagcagtgtcggggaaatgatgttactggcagtcaatggcagtaatcctgaaggtgaagatcctgagagggaacctgtagaaaatgaagattatagagaaaagtcttcagatgatgatgaaatggattcttccttggtctctcagcagcctcccgataaccaggaaaaggaacgactaaatacatccattccacaaaaaaggaaaatgagaaatctgttagttaccattgagaatgatactcctctagaggaactctcaaaatatgtagacatcagtattattgcccttactcgaaatcggaggacaaggagatggtacacttgtccactgtgtgggaaacagtttaatgaaagttcttacctcatttcccaccagaggacccacactggagaaaaaccctatgactgtaatcactgtgggaaaagcttcaatcataaaacaaacctcaataaacatgagcgaattcatacaggagagaaaccttattcctgttctcagtgtggaaaaaacttccgtcagaattctcatcggagtcgtcatgaaggaatccatataagggagaagatatttaagtgtccagaatgtgggaaaaccttcccaaagaatgaggagtttgtgcttcatctgcagagtcatgaggctgagagaccatatggttgcaaaaaatgtgggagaagatttggtcggctgtcaaactgtacccggcatgagaaaacccactcagcctgtaagacccgaaagcagaagtaatactgggaaccctttctgggtctgatggtgctgcctcaacctgagagctttcataagtagttctgaattcccaagctgcctaaaaaggtataaatgtgtaaaaatctcattattgccaaaattggataaatgcccatcttagctaaaacctcaaattgctagaaaattcacagggaagaaaacatttcaagggctatacctcagcatctaggctttttggactaaggagctttcctttttgaagttatatgataatgtacaggtcacagatcccctttcccaacactttgaagatgaatctggagtctgcttacttggaaggcaaagagtgacttgtgtctattgaaagtatatccgttttccccccacatggggattcatacttgagaaatagtgcaaagatgcttatctggaactgtgttctggtgaaagaaccaaattactggcttgttagccaacagcttctgatagcaattcatataaccctctaagaatacctgtttaagtcttgagtgttgaaaggaattgtttactttggaatataggaaaacagttgaatgtcagactctcatttgtatgtgatctaaatttgcaatcaatttcaataatatttacaatttgtgataaaactgacttttacagattccttttcacaacataatttaggtgtctactgttcttattgtattttgttctgctgttgatctctccagcagccgtctcatgcttctcccttgctaaaagaagtttggattactcaggcagggccatccagccccaccactagaaaagctcttcagaatcttgtccctctgttgagcccagatctcatgtgctacgaaggaaaccccaagacccagagaggaagggtcaacctggaggcaggaaaaagttggcttggatccatgtctcatcaataaccttaccatatgcttaggtcccctctatgctgtcatcagacctttggcaatggggtggtcactacctcacaaggcaaagtgttgtatgattagaaattacgtctccagtggttagctcacattgcctctcaagagacaggtttccaggtgtcttcattgtagtgggtattaattgtcttcagcctcttgatatccataccttcctgtcctctgcctagaagcaaggccagcggtgcctttacggactgatcgtgtggtgcgatttagggattcttcagttttgcttgctttaggtttccaaaagttatacattggtgttttgattggaataaagaaatcctataagctatttgggaaaaattatagtgtatgtttcccatccagaaacatgcctttctatttattagagtattatattcctgtgaaaatttttctaattttcttcacttgttttacacaattttgttattgtagttttttccattatatttttatagttgattattgcttttacatgggaaagttatttttaattatatatttgtatagtcatctcactgttgttaattttcaatagtttgttggtttagttctgttaacttttggtaaaatgacaccatctacaaagaaaaaaaaaaaaaaaaaa

SEQ ID NO: 12811 - DNA, 3130 bp, Homo sapiens
cagcccgtcgtggatgactagagccaaccacctgccttccgtcttccaggcagaaccacagagaggctacagccgtcctggcctccctccggccctgagagctcctctggcctgtctcaagtcttaacgtctcaagcgcagactgccggctccgaacggggagaccaggcttctgcaccggaaacaaggcaccggttgtgacgtcacagccgcagagcgcccgacttcccagaaggcaccgagtccctgccgttctcctcaactggcggcggcgcgaacgaatagtcgccggcgacctcttggctctctggcagatttcctctagtaagaggtggctctggaggccccgcgaaacgagtgtggtgtgtggttgcaaggcatgatggctgcaaaagtggttcctatgcccccaaagccaaagcagtcctttatactgagagttccgccagactccaagctgggccaagacctacttcgagatgccactaacgggcccaagaccatccaccagctagtgctggagcacttcctcaccttcttgcccaagccaagcctggtccagcccagtcagaaagtcaaggagaccttggttattatgaaagatgtgagctcaagccttcagaacagagtgcatcctcgtcccttggtgaagcttctgcccaaaggagtccaaaaggaacaagagacagtgtctctgtatttgaaagctaaccctgagctggtggtctttgaggatttgaatgtatttcactgccaggaagaatgtgtgagcttggatcctactcaacaactcacgtcagagaaggaagatgacagcagtgtcggggaaatgatgttactggcagtcaatggcagtaatcctgaaggtgaagatcctgagagggaacctgtagaaaatgaagattatagagaaaagtcttcagatgatgatgaaatggattcttccttggtctctcagcagcctcccgataaccaggaaaaggaacgactaaatacatccattccacaaaaaaggaaaatgagaaatctgttagttaccattgagaatgatactcctctagaggaactctcaaaatatgtagacatcagtattattgcccttactcgaaatcggaggacaaggagatggtacacttgtccactgtgtgggaaacagtttaatgaaagttcttacctcatttcccaccagaggacccacactggagaaaaaccctatgactgtaatcactgtgggaaaagcttcaatcataaaacaaacctcaataaacatgagcgaattcatacaggagagaaaccttattcctgttctcagtgtggaaaaaacttccgtcagaattctcatcggagtcgtcatgaaggaatccatataagggagaagatatttaagtgtccagaatgtgggaaaaccttcccaaagaatgaggagtttgtgcttcatctgcagagtcatgaggctgagagaccatatggttgcaaaaaatgtgggagaagatttggtcggctgtcaaactgtacccggcatgagaaaacccactcagcctgtaagacccgaaagcagaagtaatactgggaaccctttctgggtctgatggtgctgcctcaacctgagagctttcataagtagttctgaattcccaagctgcctaaaaaggtataaatgtgtaaaaatctcattattgccaaaattggataaatgcccatcttagctaaaacctcaaattgctagaaaattcacagggaagaaaacatttcaagggctatacctcagcatctaggctttttggactaaggagctttcctttttgaagttatatgataatgtacaggtcacagatcccctttcccaacactttgaagatgaatctggagtctgcttacttggaaggcaaagagtgacttgtgtctattgaaagtatatccgttttccccccacatggggattcatacttgagaaatagtgcaaagatgcttatctggaactgtgttctggtgaaagaaccaaattactggcttgttagccaacagcttctgatagcaattcatataaccctctaagaatacctgtttaagtcttgagtgttgaaaggaattgtttactttggaatataggaaaacagttgaatgtcagactctcatttgtatgtgatctaaatttgcaatcaatttcaataatatttacaatttgtgataaaactgacttttacagattccttttcacaacataatttaggtgtctactgttcttattgtattttgttctgctgttgatctctccagcagccgtctcatgcttctcccttgctaaaagaagtttggattactcaggcagggccatccagccccaccactagaaaagctcttcagaatcttgtccctctgttgagcccagatctcatgtgctacgaaggaaaccccaagacccagagaggaagggtcaacctggaggcaggaaaaagttggcttggatccatgtctcatcaataaccttaccatatgcttaggtcccctctatgctgtcatcagacctttggcaatggggtggtcactacctcacaaggcaaagtgttgtatgattagaaattacgtctccagtggttagctcacattgcctctcaagagacaggtttccaggtgtcttcattgtagtgggtattaattgtcttcagcctcttgatatccataccttcctgtcctctgcctagaagcaaggccagcggtgcctttacggactgatcgtgtggtgcgatttagggattcttcagttttgcttgctttaggtttccaaaagttatacattggtgttttgattggaataaagaaatcctataagctatttgggaaaaattatagtgtatgtttcccatccagaaacatgcctttctatttattagagtattatattcctgtgaaaatttttctaattttcttcacttgttttacacaattttgttattgtagttttttccattatatttttatagttgattattgcttttacatgggaaagttatttttaattatatatttgtatagtcatctcactgttgttaattttcaatagtttgttggtttagttctgttaacttttggtaaaatgacaccatctacaaagaaaaaaaaaaaaaaaaaa

SEQ ID NO: 12812 - DNA, 7158 bp, Homo sapiens
tcctagtgagtatcgagttggtcttattatcgcgtgaactgggagcctttgtttcctgcgtgtcgcaggaagtgacgtttcgggtacagccgctaccagagtccctttctcgcgaggcggaagaaccccgatcgctgaggagcaagggggcgctaggaaagggaactgggttgcgacggtccggcgagagagagctggggtgctggggtgcggggaagttggggagcagaggccgcttggtgtccgagtagggtaagaccgcaccgacccagtccgttaggaaagaagggaaacgaggcaattgtcgggcggatccccggacggagggctaaggttgtgtggaaggcgctgctccccggatggcgaccgcagatactccggccccggcctccagtggcctctcgccgaaggaagaaggggagcttgaagatggggaaatcagtgacgacgataataacagccagatacggagtcggagcagcagcagcagcagcggcggcgggctgttaccctatccgcggcgaaggcctcctcactcggcccggggcggtggatctggcggaggcggtggctcttcctcgtcatcgtcctcttctcagcagcagctgaggaatttctcacgctcgcggcacgcgtctgagcggggccacctcaggggacccagcagctaccgacccaaagaaccgttccggtctcatccgccttctgtacggatgccttcgagctcactgtccgaaagcagtccccggccgtctttctgggagcggagccacctcgccttggaccgtttccgctttcgaggcaggccttaccggggtgggagtcgctggagtcgggggcgaggagtgggtgagcgaggaggcaagccggggtgcagacctcctctgggaggaggagcaggatccgggttcagcagcagtcagagctggcgagagccctctccacctcggaagagctccaaaagttttggaaggtctccatcaagaaaacaaaattattcatcaaaaaatgaaaactgtgtggaagaaacttttgaagatttgcttttaaagtataaacaaatacagttggaactagaatgcatcaataaggatgaaaaactagcattgagtagcaaagaagagaatgtgcaggaagatcctaaaacattgaacttcgaggaccaaactagcactgataatgtcagtattacaaaggattcaagtaaagaagtagctcctgaggagaaaacacaagtcaaaacttttcaggcatttgaattaaaaccactcaggcaaaaattgactttaccaggagataagaaccgtttgaaaaaagttaaagatggagcaaaaccactttccctgaaatccgacactactgattctagtcaaggattacaagataaagaacaaaatttaacaagaagaattagtacctcagatattctgtctgaaaagaaacttggtgaagatgaagaggaactatctgaattacagcttcgccttttggctcttcagtcagccagtaaaaaatggcaacaaaaagaacagcaggtgatgaaagaaagcaaagaaaagttgactaagacgaaaactgtacagcaaaaagttaaaacaagtacaaaaacacattcggccaaaaaagttagcactacagctaaacaagcattgaggaagcagcaaacaaaggcatggaagaaactacaacaacaaaaagagcaggaaagacagaaagaagaggatcagcggaaacaagctgaagaagaagagagaaggaaaagagaggaagaaatcagaaaaattcgagatctctcaaatcaggaagaacagtacaatcgattcatgaaattggttggtggcaagaggagatcaagaagtaaatcttcagatcctgacctgaggcgatccttagataagcaacctactgatagtggaggaggcatttatcagtatgataactatgaagaagttgctatggatacagatagtgaaaccagttctccagctccttcaccagtgcaaccgccatttttctctgaatgttcattggggtatttttctccagcaccatctctttctttgcctccaccacctcaggtttcttctctgccacctttgagccagccttatgtggaaggcttgtgtgtttctcttgaacctctacctcctctaccaccattaccacctctcccacctgaagatccagaacagcctccaaaaccaccttttgcagatgaggaagaggaggaagaaatgctgcttcgagaagaactacttaaatctctagcaaataaaagagcttttaagccagaggaaacatccagtaatagtgacccaccttcacctccagttctgaacaattcacatcctgtgccaagaagcaatctatcaatagtcagtattaacacagtgtctcagcctaggatacagaatccaaagtttcacagaggaccccgtcttccacgaactgtgatctcgcttccaaagcataaatcagtggttgtaacactaaatgattcagatgatagtgaatctgatggagaggcttccaagtcaacaaatagtgtttttggtggattagagtccatgattaaagaagcaagacgaactgctgagcaagcttcaaaaccgaaagtacctccaaaatctgaaaaagaaaatgatcctctgcgaacaccggaggctttgcctgaagaaaagaagattgaatatagattgttaaaggaagagattgccaaccgtgagaaacagcgtttgattaaatcagatcagctgaagacaagttcatcatccccagcaaactctgatgtggaaattgatggtattggcaggatagcaatggttactaagcaggttacagatgcagaatcaaaactgaaaaaacataggattctcttgatgaaagatgaatctgttttaaagaatttagtgcaacaagaagctaagaagaaagaatctgttagaaatgctgaagcaaagattacaaaacttacagaacagcttcaagcaactgaaaaaattcttaatgttaacagaatgtttttgaagaagcttcaggaacaaattcacagagttcaacagcgtgttacaattaagaaagctttgactctaaaatatggagaagagcttgctcgggcaaaggcagtggccagtaaagaaataggaaaacgtaaactggaacaagatcgctttgggccaaacaaaatgatgagactggacagttctccagtatcaagtccaagaaagcattcagcagaactaattgctatggagaaaagacggttacaaaagctagaatatgaatatgccctgaaaattcaaaaattaaaagaagcccgtgcccttaaagcaaaggaacaacaaaatatctctccagttgtggaagaggaacccgaattttctttacctcaaccctcacttcatgatctgacacaagataaattaaccctggacactgaagaaaatgatgttgatgatgaaattttgtctggttcaagcagagagcgaagaagatcttttttagaatccaattattttactaaacctaaccttaagcacactgatactgctaacaaagaatgcataaacaaacttaataaaaatactgtagaaaaaccagaactttttctagggttaaaaattggtgaattgcaaaaattgtattcaaaagctgacagcctaaaacagctgattttaaaaaccaccacaggcattacagagaaggttttgcatggtcaggagatttctgtagatgtggattttgtcacagcacaaagtaaaacaatggaagtgaagccatgtccttttagaccctaccatagtcctcttctagtttttaagtcctacagatttagtccatattatcgaaccaaggaaaaacttcccctgagctcagtatcatacagtaatatgattgaaccggatcagtgtttctgccgttttgatttaacaggaacatgtaatgatgatgattgtcaatggcagcatatacaagactatacacttagccgaaaacagttattccaggacattctgtcatataatctgtctttgattggttgtgcagagacaagtactaatgaagaaattactgcttcagcagaaaaatatgttgagaaactttttggagtaaacaaagatcgaatgtcaatggaccagatggctgttctccttgttagcaatatcaatgaaagtaaaggtcatactcctccatttacaacctacaaagataaaagaaagtggaagccaaagttttggagaaaacctatttcagataatagcttcagtagtgatgaggaacagtctacaggaccaattaagtatgctttccagccagagaaccaaataaatgttccagctctggatacagttgtcactccagatgatgtcagatactttacaaatgagactgatgacatcgctaatttagaagcaagtgtgcttgaaaatccttctcatgtacaactttggctcaagcttgcgtacaagtacttgaatcaaaatgagggggagtgctcagaatccttggattctgctttaaatgttctggcgcgagcattggaaaataacaaagacaatccagaaatttggtgccattacctcagattgttctcaaaaagaggaaccaaggacgaggtgcaggaaatgtgtgaaacagctgttgaatatgctccagattatcaaagcttttggacttttctacacctagaaagtacctttgaagaaaaggattacgtatgtgagagaatgttggagtttctgatgggagcagccaagcaggaaacatccaatattttgtcctttcagcttttagaggctcttttgtttagagttcagctgcacatatttactggaagatgccaaagtgcactggcaattttacagaatgcattgaaatctgctaatgatggaatagtagctgaataccttaaaaccagtgatcgatgtttggcatggttggcctacatacatcttattgaattcaacattctcccttcaaaattttatgatccatctaatgataatccttcaagaattgttaacactgaatcatttgtaatgccatggcaagctgttcaagatgtaaagactaatcctgacatgttgttagcagtttttgaagatgcagtgaaagcttgcacagatgagagccttgctgttgaggaaagaatagaggcctgccttccactttacacaaacatgattgctctgcaccaactcctggagaggtatgaggctgcaatggagctttgtaaatctttattggaatcatgtcctattaactgccagttgctggaagctcttgttgcattatatttgcaaacaaatcagcatgacaaagccagagcagtgtggcttactgcatttgaaaaaaatcctcagaatgcagaggttttttatcatatgtgcaaattcttcatcttacagaatcgaggcgataatcttcttccatttttgcggaaatttattgcatccttctttaaaccggggtttgagaagtataataacttggatctgtttcggtatctcttaaatattccaggaccaattgacattccatctcgtttatgtaaagggaattttgatgatgatatgtttaaccaccaagttccttatttgtggctgatttactgcctttgtcatcctcttcaatcaagtattaaagaaacagtggaggcatatgaggcagcattaggggtggctatgagatgtgatatagtacagaagatatggatggattatcttgtctttgcaaataatagagctgctggatccagaaacaaagttcaagaattcaaattttttactgatttagtgaatagatgtttggttacagtccctgcccgataccccattccttttagcagtgctgattactggtccaactatgaatttcataatagggttattttcttttatttgagctgtgttccaaagacccagcattccaaaaccttggaacggttttgttcagttatgccagctaattctggacttgcattgaggttacttcaacatgaatgggaagaaagcaatgttcagattctgaaacttcaagccaagatgtttacatataatatcccaacatgcctggccacctggaaaatagccattgctgctgagattgttctaaagggacaaagagaggtccaccgtttatatcagagagccttacagaagttacctctttgtgcatcactgtggaaagatcaactcttgtttgaagcatcagaaggaggtaaaactgataacctgagaaaactagtttccaagtgccaagagattggagtcagcctaaatgagctcttaaatttaaacagtaacaaaacagaaagcaagaatcactgaacactgggtgcagtcagttctaagtccttataataattgccaaaattatttgaatgattcttcaagattaggctgatccctggctaaggtctgtgtaaggcagacaagcgttattgatcatatcaagttccctacaatatcctgtcctcaaaaccggaagcaatgaacatgatcctcttcggttggataaatgaacttcctgtttggcctgcttctaggccctgccagattctcataacatcatatacgtaagtatagttcctcaaagtgactgacatttattttaattttgctttgtttttttttattttctcccccattcctttattttgtgttattcctgactcacttgacactctctgatgcctgagagattcctgtttgggatttaatatccagggctgtgtttacagtaaaaaaagcaggcagtcccttttagtttttcctttttaaatttttttgagattcttcatttcaggatttaaaactatagcagtccatcttaaggaaagtgtaactgccatggccacaagtctgctagttgcacttgaatgctctatcagggttgtttattaccctttctacgttctggactccttgccgagactgtttaacttgaagattaaagaaactattgcaaatgccagtgcatcagaacctaagagtggtcaaatattatgtgcaatttttttgtaaagaaattttaatttataataaagtttaacagtttaaagaacagttaatatttgaactgctttgtattgaaatactactttgtagtattgaaattgtttatatacttttttaatataagttaactttctaaaaa

SEQ ID NO: 12813 - DNA, 4093 bp, Homo sapiens
gggatcccgggagggagcggagcggacctgggcttggtcgcctccaagccggcgggaccgagtgctttaggccgctcgaaagaaagttgctccgacccgggaaaaggagaagatgaaggaagccaaggatgcccgctataccaatgggcacctcttcaccaccatttcagtttcaggcatgaccatgtgctatgcctgtaacaagagcatcacagccaaggaagccctcatctgcccaacctgcaatgtgactatccacaaccgctgtaaagacaccctcgccaactgtaccaaggtcaagcagaagcaacagaaagcggccctgctgaagaacaacaccgccttgcagtccgtttctcttcgaagtaagacaaccatccgggagcggccaagctcggccatctacccctccgacagcttccggcagtccctcctgggctcccgccgtggccgctcctccttgtctttagccaagagtgtttctaccaccaacattgctggacatttcaatgatgagtctcccctggggctgcgccggatcctctcacagtccacagactccctcaacatgcggaaccgaaccctatccgtggaatccctcattgacgaagaggtaatctacagtgagctgatgagtgactttgagatggatgagaaggactttgcagctgactcttggagtcttgctgtggacagcagcttcctgcagcagcataaaaaggaggtgatgaagcagcaagatgtcatctatgagctaatccagacagagctgcaccatgtgaggacactgaagatcatgacccgcctcttccgcacggggatgctggaagagctacacttggagccaggagtggtccagggcctgttcccctgcgtggacgagctcagtgacatccatacacgcttcctcagccagctattagaacgccgacgccaggccctgtgccctggcagcacccggaactttgtcatccatcgcttgggtgatctgctcatcagccagttctcaggtcctagtgcggagcagatgtgtaagacctactcggagttctgcagccgccacagcaaggccttaaagctctataaggagctgtacgcccgagacaaacgcttccagcaattcatccggaaagtgacccgccccgccgtgctcaagcggcacggggtacaggagtgcatcctgctggtgactcagcgcatcaccaagtacccgttactcatcagccgcatcctgcagcattcccacgggatcgaggaggagcgccaggacctgaccacagcactggggctagtgaaggagctgctgtccaatgtggacgagggtatttatcagctggagaaaggggcccgtctgcaggagatctacaaccgcatggaccctcgggcccaaaccccagtgcctggcaagggcccctttggccgagaggaacttctgaggcgcaaactcatccacgatggctgcctgctctggaagacagcgacggggcgcttcaaagatgtgctagtgctgctgatgacagatgtactggtgtttctccaggaaaaggaccagaagtacatctttcctaccctggacaagccttcagtggtatcgctgcagaatctaatcgtacgagacattgccaaccaggagaaagggatgtttctgatcagcgcagccccacctgagatgtacgaggtgcacacagcatcccgggatgaccggagcacctggatccgggtcattcagcagagcgtgcgcacatgcccatccagggaggacttccccctgattgagacagaggatgaggcttacctgcggcgaattaagatggagttgcagcagaaggaccgggcactggtggagctgctgcgagagaaggtcgggctgtttgctgagatgacccatttccaggccgaagaggatggtggcagtgggatggccctgcccaccctgcccaggggccttttccgctctgagtcccttgagtcccctcgtggcgagcggctgctgcaggatgccatccgtgaggtggagggtctgaaagacctgctggtggggccaggagtggaactgctcttgacaccccgagagccagccctgcccttggaaccagacagcggtggtaacacgagtcctggggtcactgccaatggtgaggccagaaccttcaatggctccattgaactctgcagagctgactcagactctagccagagggatcgaaatggaaatcagctgagatcaccgcaagaggaggcgttacagcgattggtcaatctctatggacttctacatggcctacaggcagctgtggcccagcaggacactctgatggaagcccggttccctgagggccctgagcggcgggagaagctgtgccgagccaactctcgggatggggaggctggcagggctggggctgcccctgtggcccctgaaaagcaggccacggaactggcattactgcagcggcaacatgcgctgctgcaggaggagctacggcgctgccggcggctaggtgaagaacgggcaaccgaagctggcagcctggaggcccggctccgggagagtgagcaggcccgggcactgctggagcgtgaggccgaagaggctcgaaggcagctggccgccctgggccagaccgagccactcccagctgaggccccctgggcccgcagacctgtggatcctcggcggcgcagcctccccgcaggcgatgccctgtacttgagtttcaaccccccacagcccagccgaggcactgaccgcctggatctacctgtcactactcgctctgtccatcgaaactttgaggaccgagagaggcaggaactggggagccccgaagagcggctgcaagacagcagtgaccctgacactggcagcgaggaggaaggtagcagccgtctgtctccgccccacagtccacgagactttaccagaatgcaggacatcccggaggagacggagagccgcgacggggaggctgtagcctccgagagctaagggggcccctcccccctgccccgtgccccactgaagaacattactgagggggctaaccttggggactccaatttgccaatgatgagggaacatttgaaagaactgcaaattgtccttgccagctcttgggatccttggatacctggggccatttaagaagctaggggaattaggccacaacaccccctgggacatccgaaagctacaccacagatgccagtggttcatgccttcttcccgcaactttaggaaaatttatttatttattgtttattagttatggggggagaggggagatttaaaggaccagggacatgggaaccaagccatagggatcagagggccttgtccttgaacactactggggtatattcaggctcatccacgcagctgctgggttcttgccctaacggccctcccctgcaacatccgtcttggaggagaggctgcagccacagcaccctactgccctttaaataaaggagggctgtgggcagggccatgtccctttctcctctcccctcaacctcttactgctgttctccctttctccgtccttcatggaagccctgggagataacctggcttcctggagttgatggaataaaggttggggtggccataatggtttgttgggggtgagggaaaaaacccacagggaccagaatgttttgttgttcttttgttttcttttttgtaccaaagtcaactgcacgtgttttatatttttaagagatcgtaggcaattagagatcgaagcctcctatctccacatctctgaagaagttgaggggtgggggagagaatgacttctgccttcatctgcagtaacggggggacctatactgacctcttccccagccatttagaaacaagttctagggtgggttggaaaatctccaagagccctgacctcatcttccacctcagcaaccatgacctgaaacctcagcgtgaatttgggggatttttcagtggaacccttgcccccaaatgtcgaccagcccccaaatgtcgaagaattttcttcttgccaattttgttgtttaaaaaaaaaattcagggaaaattaaaaacctggaactccaaaaaaaaaaaaaaaaa

SEQ ID NO: 12814 - DNA, 1439 bp, Homo sapiens
atcttcaagtatggggtctgctggcttgtcgcggctgcatgggcttttcgcggtctataagcccccggggctaaaatggaagcacctgcgggatacagtggagctacaacttctgaagggtctcaatgccaggaagcctcccgctcctaaacagcgtgttcgcttcttgctgggccccatggaaggcagcgaagagaaggagctgaccctcacagccaccagcgtaccctctttcatcaaccatccactggtatgtggaccagcattcgcccatctcaaggttggcgtgggacatcggttggatgcccaggcttctggagtacttgtgctcggcgtgggacatggatgcaggctcctcaccgatatgtacaatgctcatcttaccaaggattacacagtgcgtggcctcctgggcaaagctacagatgacttccgtgaggacgggaggctggtagagaagacaacctatgaccacgtgaccagagagaagctggaccgcattctggccgttatccaaggctcccatcagaaggccctggtgatgtactccaacctcgacctgaagacccaggaggcctatgagatggccgtgagaggcctgatccggcccatgaacaagtccccgatgctgataactggcatccgatgcctctactttgcacctccggaattcctcttagaggtgcagtgcatgcatgagacgcagaaagagctgcggaagttggttcatgaaatcggcctggaactaaagaccactgctgtctgcacccaagtgcggcgcacgcgcgacggcttcttcacgctagacagtgccctcctgaggacccagtgggacctaaccaacatccaggatgctatccgggctgctacccctcaggtagctgcagagctggagaagagcttgagcccggggctggacaccaagcagctccccagtccgggatggtcctgggactcccagggcccgagctctaccttggggctggagaggggtgcggggcagtgaatgcccaggcagctcctggggcagtggatggataaatagaagaactgctatgagctggacctgatagctgtgcagaaagtgagagcaggggcaccttttctacgtaagacacaaaactcaagctgtaacagaaaggtcaatggacttgacccaactgagaaggaaaaacttctgtatggaggaaaagacagtaaacatgacagactgatagaaagtattggcagaccaggcgtggtggcgggcacttgtaatcccagctactcccaaggctgaggcaggagaattgcttgagcccaggagtttaaggttgtagtgcgctagacggcgcctgtgaatagccactgcactctagtctggggaacatatgagacccctgccatctcaaaaaaaaaaaaattctcaataaactatgtgcccacgaaaattaaaaatt

SEQ ID NO: 12815 - DNA, 3999 bp, Homo sapiens
tgattcgagcgggaagaggggggtgggtgggatcggtgggggagaccatgacctccagctacgggcacgttctggagcggcaaccggcgctgggcggccgcttggacagcccgggcaacctcgacaccctgcaggcgaaaaagaacttctccgtcagtcacctgctagacctggaggaagccggggacatggtggcggcacaggcggatgagaacgtgggcgaggctggccggagcctgctggagtcgccgggactcaccagcggcagcgacaccccgcagcaggacaatgaccagctgaactcagaagaaaaaaagaagagaaagcagcgaaggaataggacaaccttcaatagcagccagctgcaggctttggagcgtgtctttgagcggacacactatcctgatgcttttgtgcgagaagaccttgcccgccgggtgaacctcaccgaggcgagagtgcaggtgtggtttcagaaccgaagagccaagttccgcaggaatgagagagccatgctagccaataaaaacgcttccctcctcaaatcctactcaggagacgtgactgctgtggagcagcccatcgtacctcgtcctgctccgagacccaccgattatctctcctgggggacagcgtctccgtacagcgccatggctacttattctgccacatgtgccaacaatagccctgcacagggcatcaacatggccaacagcattgccaacctgagactgaaggccaaggaatatagtttacagaggaaccaggtgccaacagtcaactgaggaaaaaaaataattaaacaggcctaagaagaaatcaaaaaccataagacacctatcctgctctgttatttcttcatctgctggggggaaaaagtaaattacaaacaaacaaacaaagcagaactaaaatattgggaccatggcagagaaaagcaggagaggagcaaaatgaaaattagttaacaaatgttcctcctccctctgggataccaccaccacttgtttctgtgtgtgtttattttgtttttctttcattcatgctttgcttaatgtactccaggcttcttcagataggttcagcccacccacccccatgattgtatgaagttttaaaaaaaactacagcagccaaagaaactatatatatatatatatatatatatatccagaatgattgcctctactgtcctcattgacttgtttgaaccttagtgccttaccctgtcctcttcccagttctctttatagaagctctaggagctttcgaaaagccaaagtctttctgaagaatctgtgctggacagacataattccctttctcattgtctccatctttgttggtcatggtaaggtttttccatcagcctctgaaaaaatagttgtgcacaacatctgctcactggactgtctgatccaatgtaattggctgcgtctggctaattctaagcactaaagtctacatctaagctatagatttaagcttgaagctacagattatatcactatcaccaccacccctcaccctatgcaatcaatcaatcaatcatcttaagttaaagatatttgttgtctttgaatgatttgctgtcacagactatttggtagaagaaatatttttcacctgagagaggaagagaaatttctctagtaacacaaagagtgagttctaaaaggcatgcccacatctctttcgtgccttaaggatagtgagatgcacacttatatatatactgtatatatttatatatttatatatatatttcatatatatatataatattgcaagcttaagtttgcaatttcccaaacaatacaaaaagcaaattacacaccctcaccactgttcttatctctatagtgatgaaacattaattagggatcttgctgcttttctttttctacacgaagttttcattaaagccacagaataattgatagggcagctgtttgagaacaggtcccattttcacattagggctttaaatgaattagaaactatttgaggctataaaaatgtccttgagtttggagcctgagctctggtgaaatgctgatacatctgatctatcatgggaattgcagttagagagagtaaggaataccatttagtcatctatccgttcttcacttagcaggaatatgaaagaaaggcacatgtttaagaggaatacctaaaggtttttctaaattccaacatttaaaaggcaattgtgggctatttttattttttaatattttgaaataaagtttagtgtctagggctgggagccaggactgatcttccatttctttttctttgttcccagccatgcttttgtaacttgccaggtggacttgaccaactacattaccatgctgtgcctcagtttacccatttgtaaaatgggattaataatacttacctacctcacaggggtgttgtgaggctctattcatttgctcctttattctttcctgtattctctgtatgtccagcactttgtagccatgggaggaaagggactataaaagtgtacaatgttaatggaatgatacggtacctgaaagccttgttttctagtaagaaaatgctaccttgctgtacatacttataaccttgtatttggaaatgagaaataggtttatattttcagatctctcaaaaatcacatcatttgaccaaagaataatttaagacacatagaacagatttttttaatttatattttcatcctgaccagcttagttctaataatttttagttgtgagtgattaaaaaactttggatcaattttggtcaaacatgccaactttgtagtctgagtgacaggcaaggatttttgggtttaagatgcacttttagcacacatttgtatttcccttggcatatcagattgagctaatggtgatgttatttcaatctaacagccaccaatctgaaattgtatttcaaatgttgattctgtagttctttaaataataatgaagctcatcttatacattttgctttcaccaattgattccttcttcttttagcccactattaaaacatttcttactgaatggttcatgtaggcttgctgaacagcacgcattacttgcttcctgaagagttcccccattcatccatttgtcccattagttgctgtggattatcaagttttgaaggaactgtacatcccaacagactgaaacattctaagtgaaatgagtataatccaagtaactggtgaactttggaggtttggagcttgaagagaatggctaagaagatttgaattatagggagggaacagaaatcatacatgaaaaggttttactgagaaggggaaaaccttagatagagggacatgtgaaacaaaatcatttgaaattttgattcagacatccatttccagtggcaaacagcaaagcctgaacccataaacccaaatgataggtgaagttgggtggttttatccaatgtctcaagcaagcaatgtctgggaatatcatagagtaacaagtgctggtcagccaaagaaacattcactgctggtgaaccaataccataagcatgtattatctaagcacttgatcaagaaatatacatgttgtacaagctctcaattttgttcatttattatcaaatttttaaaatacaagtttggtatgtgatttggaaaagatgccttctggatcttaagccagttgtcagtggaggtcctcagggctgcaaatgtcaagacataaccctgttcctcaccatcatgataccagatacaggtgaatacataggaactatctgcctgtgtcctcaatctcccttcaaacaagatgctgatttgtagggtacttggcaggttaaattaaaccagaagaggtgacttaataaaaaagggaatgacatttagggtataaagatctcataagaaatgtaatatgtaaattatatcttgctttatgttgtaaaatatacattgtttgcgctagaatagaaatgatttcttttcaataaaaagaaagaaggactcta

SEQ ID NO: 12816 - DNA, 4442 bp, Homo sapiens
gaccactgtgagcccgcggcgtgaggcgtgggaggaagcgcggctgctgtcgcccagcgccgccccgtcgtcgtctgccttcgcttcacggcgccgagccgcggtccgaagtcttgctgtgtcacccaggctgccaggctggagtggagtggcatgatctcggctgactgcaacctctgcctcccagaatatgacagatacctagcatctagcaaaataatggcagctgcttaccttgaccccaacttgaatcacacaccaaattcgagtactaagactcacctgggtactggtatggaacgttctcctggtgcaatggagcgagtattaaaggtctttcattattttgaaagcaatagtgagccaaccacctgggccagtattatcaggcatggagatgctactgatgtcaggggcatcattcagaagatagtggacagtcacaaagtaaagcatgtggcctgctatggattccgcctcagtcacctgcggtcagaggaggttcactggcttcacgtggatatgggcgtctccagtgtgagggagaagtatgagcttgctcacccaccagaggagtggaaatatgaattgagaattcgttatttgccaaaaggatttctaaaccagtttactgaagataagccaactttgaatttcttctatcaacaggtgaagagcgattatatgttagagatagctgatcaagtggaccaggaaattgctttgaagttgggttgtctagaaatacggcgatcatactgggagatgcggggcaatgcactagaaaagaagtctaactatgaagtattagaaaaagatgttggtttaaagcgattttttcctaagagtttactggattctgtcaaggccaaaacactaagaaaactgatccaacaaacatttagacaatttgccaaccttaatagagaagaaagtattctgaaattctttgagatcctgtctccagtctacagatttgataaggaatgcttcaagtgtgctcttggttcaagctggattatttcagtggaactggcaatcggcccagaagaaggaatcagttacctaacggacaagggctgcaatcccacacatcttgctgacttcactcaagtgcaaaccattcagtattcaaacagtgaagacaaggacagaaaaggaatgctacaactaaaaatagcaggtgcacccgagcctctgacagtgacggcaccatccctaaccattgcggagaatatggctgacctaatagatgggtactgccggctggtgaatggaacctcgcagtcatttatcatcagacctcagaaagaaggtgaacgggctttgccatcaataccaaagttggccaacagcgaaaagcaaggcatgcggacacacgccgtctctgtgtcagaaacagatgattatgctgagattatagatgaagaagatacttacaccatgccctcaaccagggattatgagattcaaagagaaagaatagaacttggacgatgtattggagaaggccaatttggagatgtacatcaaggcatttatatgagtccagagaatccagctttggcggttgcaattaaaacatgtaaaaactgtacttcggacagcgtgagagagaaatttcttcaagaagccttaacaatgcgtcagtttgaccatcctcatattgtgaagctgattggagtcatcacagagaatcctgtctggataatcatggagctgtgcacacttggagagctgaggtcatttttgcaagtaaggaaatacagtttggatctagcatctttgatcctgtatgcctatcagcttagtacagctcttgcatatctagagagcaaaagatttgtacacagggacattgctgctcggaatgttctggtgtcctcaaatgattgtgtaaaattaggagactttggattatcccgatatatggaagatagtacttactacaaagcttccaaaggaaaattgcctattaaatggatggctccagagtcaatcaattttcgacgttttacctcagctagtgacgtatggatgtttggtgtgtgtatgtgggagatactgatgcatggtgtgaagccttttcaaggagtgaagaacaatgatgtaatcggtcgaattgaaaatggggaaagattaccaatgcctccaaattgtcctcctaccctctacagccttatgacgaaatgctgggcctatgaccccagcaggcggcccaggtttactgaacttaaagctcagctcagcacaatcctggaggaagagaaggctcagcaagaagagcgcatgaggatggagtccagaagacaggccacagtgtcctgggactccggagggtctgatgaagcaccgcccaagcccagcagaccgggttatcccagtccgaggtccagcgaaggattttatcccagcccacagcacatggtacaaaccaatcattaccaggtttctggctaccctggttcacatggaatcacagccatggctggcagcatctatccaggtcaggcatctcttttggaccaaacagattcatggaatcatagacctcaggagatagcaatgtggcagcccaatgtggaggactctacagtattggacctgcgagggattgggcaagtgttgccaacccatctgatggaagagcgtctaatccgacagcaacaggaaatggaagaagatcagcgctggctggaaaaagaggaaagatttctgaaacctgatgtgagactctctcgaggcagtattgacagggaggatggaagtcttcagggtccgattggaaaccaacatatatatcagcctgtgggtaaaccagatcctgcagctccaccaaagaaaccgcctcgccctggagctcccggtcatctgggaagccttgccagcctcagcagccctgctgacagctacaacgagggtgtcaagcttcagccccaggaaatcagcccccctcctactgccaacctggaccggtcgaatgataaggtgtacgagaatgtgacgggcctggtgaaagctgtcatcgagatgtccagtaaaatccagccagccccaccagaggagtatgtccctatggtgaaggaagtcggcttggccctgaggacattattggccactgtggatgagaccattcccctcctaccagccagcacccaccgagagattgagatggcacagaagctattgaactctgacctgggtgagctcatcaacaagatgaaactggcccagcagtatgtcatgaccagcctccagcaagagtacaaaaagcaaatgctgactgctgctcacgccctggctgtggatgccaaaaacttactcgatgtcattgaccaagcaagactgaaaatgcttgggcagacgagaccacactgagcctcccctaggagcacgtcttgctaccctcttttgaagatgttctctagccttccaccagcagcgaggaattaaccctgtgtcctcagtcgccagcacttacagctccaacttttttgaatgaccatctggttgaaaaatctttctcatataagtttaaccacactttgatttgggttcattttttgttttgtttttttcaatcatgatattcagaaaaatccaggatccaaaatgtggcgtttttctaagaatgaaaattatatgtaagcttttaagcatcatgaagaacaatttatgttcacattaagatacgttctaaagggggatggccaaggggtgacatcttaattcctaaactaccttagctgcatagtggaagaggagagcatgaagcaaagaattccaggaaacccaagaggctgagaattcttttgtctaccatagaattattatccagactggaatttttgtttgttagaacacccttcagttgcaatatgctaatcccactttacaaagaatataaaagctatattttgaagacttgagttatttcagaaaaaactacagccctttttgtcttacctgccttttactttcgtgtggatatgtgaagcattgggtcgggaactagctgtagaacacaactaaaaactcatgtcttttttcacagaataatgtgccagttttttgtagcaatgttatttctcttggaagcagaaatgctttgtaccagagcacctccaaactgcattgaggagaagttccagaaccatcccctttttccatttttatataatttataaagaaagattaaagccatgttgactattttacagccactggagttaactaacccttccttgtatctgtcttcccaggagagaatgaagcaaaacaggaatttggttttcttttgatgtccagttacaccatccattctgttaattttgaaaaaatataccctccctttagtttgttgggggatataaattattctcaggaagaatataatgaactgtacagttactttgacctattaaaaaggtgttaccagtaaa

SEQ ID NO: 12817 - DNA, 4453 bp, Homo sapiens
gaccactgtgagcccgcggcgtgaggcgtgggaggaagcgcggctgctgtcgcccagcgccgccccgtcgtcgtctgccttcgcttcacggcgccgagccgcggtccgagcagaactggggctcccttgcatcttccagttacaaattcagtgccttctgcagtttccccagagctcctcaagaataacggaagggagaatatgacagatacctagcatctagcaaaataatggcagctgcttaccttgaccccaacttgaatcacacaccaaattcgagtactaagactcacctgggtactggtatggaacgttctcctggtgcaatggagcgagtattaaaggtctttcattattttgaaagcaatagtgagccaaccacctgggccagtattatcaggcatggagatgctactgatgtcaggggcatcattcagaagatagtggacagtcacaaagtaaagcatgtggcctgctatggattccgcctcagtcacctgcggtcagaggaggttcactggcttcacgtggatatgggcgtctccagtgtgagggagaagtatgagcttgctcacccaccagaggagtggaaatatgaattgagaattcgttatttgccaaaaggatttctaaaccagtttactgaagataagccaactttgaatttcttctatcaacaggtgaagagcgattatatgttagagatagctgatcaagtggaccaggaaattgctttgaagttgggttgtctagaaatacggcgatcatactgggagatgcggggcaatgcactagaaaagaagtctaactatgaagtattagaaaaagatgttggtttaaagcgattttttcctaagagtttactggattctgtcaaggccaaaacactaagaaaactgatccaacaaacatttagacaatttgccaaccttaatagagaagaaagtattctgaaattctttgagatcctgtctccagtctacagatttgataaggaatgcttcaagtgtgctcttggttcaagctggattatttcagtggaactggcaatcggcccagaagaaggaatcagttacctaacggacaagggctgcaatcccacacatcttgctgacttcactcaagtgcaaaccattcagtattcaaacagtgaagacaaggacagaaaaggaatgctacaactaaaaatagcaggtgcacccgagcctctgacagtgacggcaccatccctaaccattgcggagaatatggctgacctaatagatgggtactgccggctggtgaatggaacctcgcagtcatttatcatcagacctcagaaagaaggtgaacgggctttgccatcaataccaaagttggccaacagcgaaaagcaaggcatgcggacacacgccgtctctgtgtcagaaacagatgattatgctgagattatagatgaagaagatacttacaccatgccctcaaccagggattatgagattcaaagagaaagaatagaacttggacgatgtattggagaaggccaatttggagatgtacatcaaggcatttatatgagtccagagaatccagctttggcggttgcaattaaaacatgtaaaaactgtacttcggacagcgtgagagagaaatttcttcaagaagccttaacaatgcgtcagtttgaccatcctcatattgtgaagctgattggagtcatcacagagaatcctgtctggataatcatggagctgtgcacacttggagagctgaggtcatttttgcaagtaaggaaatacagtttggatctagcatctttgatcctgtatgcctatcagcttagtacagctcttgcatatctagagagcaaaagatttgtacacagggacattgctgctcggaatgttctggtgtcctcaaatgattgtgtaaaattaggagactttggattatcccgatatatggaagatagtacttactacaaagcttccaaaggaaaattgcctattaaatggatggctccagagtcaatcaattttcgacgttttacctcagctagtgacgtatggatgtttggtgtgtgtatgtgggagatactgatgcatggtgtgaagccttttcaaggagtgaagaacaatgatgtaatcggtcgaattgaaaatggggaaagattaccaatgcctccaaattgtcctcctaccctctacagccttatgacgaaatgctgggcctatgaccccagcaggcggcccaggtttactgaacttaaagctcagctcagcacaatcctggaggaagagaaggctcagcaagaagagcgcatgaggatggagtccagaagacaggccacagtgtcctgggactccggagggtctgatgaagcaccgcccaagcccagcagaccgggttatcccagtccgaggtccagcgaaggattttatcccagcccacagcacatggtacaaaccaatcattaccaggtttctggctaccctggttcacatggaatcacagccatggctggcagcatctatccaggtcaggcatctcttttggaccaaacagattcatggaatcatagacctcaggagatagcaatgtggcagcccaatgtggaggactctacagtattggacctgcgagggattgggcaagtgttgccaacccatctgatggaagagcgtctaatccgacagcaacaggaaatggaagaagatcagcgctggctggaaaaagaggaaagatttctgaaacctgatgtgagactctctcgaggcagtattgacagggaggatggaagtcttcagggtccgattggaaaccaacatatatatcagcctgtgggtaaaccagatcctgcagctccaccaaagaaaccgcctcgccctggagctcccggtcatctgggaagccttgccagcctcagcagccctgctgacagctacaacgagggtgtcaagcttcagccccaggaaatcagcccccctcctactgccaacctggaccggtcgaatgataaggtgtacgagaatgtgacgggcctggtgaaagctgtcatcgagatgtccagtaaaatccagccagccccaccagaggagtatgtccctatggtgaaggaagtcggcttggccctgaggacattattggccactgtggatgagaccattcccctcctaccagccagcacccaccgagagattgagatggcacagaagctattgaactctgacctgggtgagctcatcaacaagatgaaactggcccagcagtatgtcatgaccagcctccagcaagagtacaaaaagcaaatgctgactgctgctcacgccctggctgtggatgccaaaaacttactcgatgtcattgaccaagcaagactgaaaatgcttgggcagacgagaccacactgagcctcccctaggagcacgtcttgctaccctcttttgaagatgttctctagccttccaccagcagcgaggaattaaccctgtgtcctcagtcgccagcacttacagctccaacttttttgaatgaccatctggttgaaaaatctttctcatataagtttaaccacactttgatttgggttcattttttgttttgtttttttcaatcatgatattcagaaaaatccaggatccaaaatgtggcgtttttctaagaatgaaaattatatgtaagcttttaagcatcatgaagaacaatttatgttcacattaagatacgttctaaagggggatggccaaggggtgacatcttaattcctaaactaccttagctgcatagtggaagaggagagcatgaagcaaagaattccaggaaacccaagaggctgagaattcttttgtctaccatagaattattatccagactggaatttttgtttgttagaacacccttcagttgcaatatgctaatcccactttacaaagaatataaaagctatattttgaagacttgagttatttcagaaaaaactacagccctttttgtcttacctgccttttactttcgtgtggatatgtgaagcattgggtcgggaactagctgtagaacacaactaaaaactcatgtcttttttcacagaataatgtgccagttttttgtagcaatgttatttctcttggaagcagaaatgctttgtaccagagcacctccaaactgcattgaggagaagttccagaaccatcccctttttccatttttatataatttataaagaaagattaaagccatgttgactattttacagccactggagttaactaacccttccttgtatctgtcttcccaggagagaatgaagcaaaacaggaatttggttttcttttgatgtccagttacaccatccattctgttaattttgaaaaaatataccctccctttagtttgttgggggatataaattattctcaggaagaatataatgaactgtacagttactttgacctattaaaaaggtgttaccagtaaa

SEQ ID NO: 12818 - DNA, 1754 bp, Homo sapiens
ggaaggtgcgtccgagccatggccgctgccaacccgtgggacccggcgtccgcgcctaacggcgctgggctagtgctaggccacttcatagcttcggggatggtcaatcaggagatgttaaacatgtctaagaaaacagtttcttgttttgtgaacttcaccagactacagcagatcacaaatattcaagctgaaatctaccagaaaaacctggaaattgaactcctgaaactagaaaaagatacagcagatgttgttcatcctttctttttggctcagaagtgtcatactctgcaaagcatgaataatcatttggaagcagtgctgaaagagaagagatcccttaggcaaagactgttgaaacccatgtgccaggaaaacttacctattgaagctgtttatcacagatatatggtacatttgctggagttggctgtgactttcattgagagattagaaacccaccttgaaacaattagaaatattcctcatttagctgcaaatctaaagaaaatgaaccaggctttagcaaagatggatatattggtgactgagacagaagaactggcagagaatatactcaagtggcgtaaacaacaaaacgaagtttcgtcttgtatccccaaaatattagctgaagaaagttatctttataaacatgatattataatgcctcctttaccttttacttctaaagttcatgtccaaactattaatgccaagtagtcatcaactttatttttgcttaattatgtgtagtcatatgaagtctatttctagttgactgtaacatgggtattaatagtctttgctgctggtaatactgaaagaacctgctttatattggagtatcaagatctcaggttcattaagaccaaactgacttttcctttgtttttcatatatttttattctacctttcagtaaaactagagaagctaaaaaagagccatgacaatttattaatataagtgaattaaccatttctcaggtgggaaattctctttttttaaaaatgtgtgtttatcgtctggtgtggtggctcacacctgtaatcctaacacttggggaggctgaggcgggcagatcacttaaacccaggagttcaagaccagcctgggtaacatggtgaaatcccatatctacaaaataaacaaaaaattagccgaccatggtggtgcatgcctgtagtcccagctattcgggaggctgaggtaagaggatcacctaagcctgtgaggtcatggttgcaatgagtcatgatcacgccactgcgctacagcctgggcgacacagtaagaccctgtctcaaaaaaaagaagtgtgtttctggccaggcacggtggctcacgcctgtaatcccagcactttgggaggcctaggtgggcagatcatgaggtcaggagttcgagaccagcctggccaacatggcgaaacacctgtctctactaaaaatacaaaaattaggccgggcgcagtggctcacacctgtaatcccaacactttgggaggccgacccagatgggtggatcacctgaggtcaggagtttgagaccagccttgacaacatggtgaaaccccatctctggtagaaatataaaaaattaaccgggcatggtggtggacgcctgtaatcccagctacttgggaggctgaggcagaataatcgcttgaacccaggaggcagaggttgcagtaagccaagatcgtgcctctgcactccaacctgggtgatggagcaagactccatctcc

SEQ ID NO: 12819 - DNA, 3330 bp, Homo sapiens
cggcggaagcggagagcaacagcgcgccgagacggagttttgccatgttgtccaggctggtgtcgaaatcctgagctcaagtggtctgcctgcctcggcttcccaaagtgctgggattacaggtgaggctgctgtcagaaaggaacttttacacagtttgccttcagagacagtctatcggcatgttgtagagttttattactaagaaaataaatgttacttacatgattgtggtggtgccatgcagcaagaatcagagagatgcagagttagagccagaaggcctgacatggcactttatgtacctaaagctcgtaggggtgcagtactccttaagacaggtgatgaagaagaaagctgtggttcacctaactctgtggtgaaagaaaagcaaaaagaaagttctctctcccaaaaagaagtctttaaagacaaaccggaggctcgaagactaaatatcaatcctgatagaaaggagcataattgtagagaagaaaagaaatcttcaacaaaattaagaatggacacatgccttcaaaaaacaaatagagtttgttctaagagaggaaccactgaatccaaagaagtattatcccaaggacaacagcagggagccccaaatgctggggttataactaatgcacctttgcagagacattttaaaccaaagaaggtggagtgtttggaagttgaaactacggatgtgacaggacatgagaggatacttctttcacaggcctgtttagaaatcagcgaggctcaagttccaagcaaaccattccaaaatgtggaattctgtgacttcagtaggcatgaacctgatggggaagcatttgaagacaaagatttggaaggcagaattgaaactgataccgaggttttggagatactatatgagtttcctagagtttttagttctgtcatgaaacctgagaatatgattgtaccaataaaactaagctctgattctgaaattgtacaacaaagcatgcaaacatcagatggaatattgaatcccagcagcggaggcatcaccactacttctgttcctggaagtccagatggtgtctttgatcaaacttgcgtagattttgaagttgagagtgtaggtggtatagccaatagtacaggtttcatcttagatcaaaaagatacagattccattcctgcaactatgggtcacatctctctgtcagagagcacaaatgacactgttagtccagtaatgattagagaatgtgagaagaatgacagcactgctgatgagttacatgtaaagcacgaacctcctgatacagctgtccttgctcatgaaacacatagagatagtggatttaagaatgtaggtgacattaccaataaagcatgtatgatggacactacaggtatgtcctgtagtgatcatgtaactgttgatagcccttatgtagttgcagttagaatagctgatgagacctctattaatacacgaagtttctcaaagtttgtaggaatgagtgcagatgcaacccctcttcatgtagctagaagtgggaatgacactgaagatttcagcaacccttctgcttgctcagatatttatggtgagagtatttcatctcattttacagagtcaacaggaaagttgatagagagcttgtcagattgtgcttcctccttacctataaaaaagattgctggtagtaattataacacttttttggactctgaactcagtatgttaaatgggacaaaagttctttcagacagtgccgtgggcattgacctgggtagtactggtgatacaacagaagcattgcacgaactaagaactgccgaagagttcaaaacagaagagcaagatgactcagggagtatagaatttggtgtatcttttcctgatagggaatcatcatctatggaaacatccatcgaaccaaaagcaactgaaacttctcgcacagagggaattactgccattgaggagagctgggagtctatgtttaacgatgatggtgactgcctggatccacgtcttctacaagagttatcagggaataccaagagcagagagagcatccaggaacctagatctgattactacaatcatgaagttcctgatattgacctcagtgattgtgaattcccacatgtcattgaaatttatgactttccccaagaatttcgtactgaagaccttctacgggttttctgcagttatcaaaagaaaggatttgatattaaatgggtggatgatacacatgccctaggagtattctccagtccaattacagctcgtgatgcgttgggtattaaacacaccatggtgaagattcgtcccttgtcacaggccacaagagcagccaaggccaaagctagagcttatgctgagttcctccagccagcaaaggagcgtcctgagacttcagcagccctagccagaaggttagtcatcagtgcccttggggttcgaagtaagcagagcaaaaccgaacgagaagcagagctcaagaaactgcaagaagccagagagagaaagcggttggaagccaagcaacgggaagacatctgggaaggcagagaccagtctacagtttgaacatcactcaatgaaagggataattccatgaatcagaaaatgtttccatagccttcagataagatgatccttccagagctctatgtacatgcagatgtgcatgttaaagagataaagtgatcgagacaaggactgactgggtatagaaggaagacagactcctgtcttcactcctaaatgcagttctttggaatcaccctactgtggtgggcgtagtagggagccatcagctaggaagaaacgtgggagatgtgaattccaagagttgcctggacagggcaagtcatgttagcgtgggtcacacttccaagatatttaaagcaaatacaaaacagaacagaggattcaaaccgcaagtatgggagatttaggccctgcagaggcagaccattccttagtatctcacaaagcagagtaatactggaggcagagtagggggtggttggagagcagttagtacaaagaggcagaacagtgtctggtttacttggcatacacagaatctgcactgccggttccagaactccaaagttggtgaactacaggagatgtgggtatttagactccaaagtttatactgagctcagtgcctgggaccgctccagctgcactgcagccaggggggataccagcttcattcctcagagtaaaccaaccttgggagctgtgtgccagttccagtgtaagcagtaataccatgttgtaagagggaacattaaagcccattttatgacataaaaaaaaaaaaaaaa

SEQ ID NO: 12820 - DNA, 6527 bp, Homo sapiens
ggcgcgcatgcgtgcagctctttggaggcggtagctttttcggcgtcgagactggaggctgagtgctaaactgtgtggggcgcggatgggatccagctgttagtcgggtaggcatagctttgtgttattcttggaaaatttcgcaccacttgtgaattccttgaacctgggcattgcaaacccacttctgttgggcccatctcctttgcactttgctcagattaagactcagttggcgcttcagcagctgaatgccgttgcctcacatggttcaacaccaccttatactttattaaatcaggctttcttgaaaatagccatgtcgagacccaggtttaatcctcgaggagactttccacttcaaaggccacgagcacctaacccttctgggatgaggcctccaggaccatttatgaggcctggatctatgggtctcccaagattttacccagcagggagagcacgtggaattccacacagatttgctggccatgaatcttatcagaacatggggccacagagaatgaatgttcaggtaactcaacacagaactgatccaagattgaccaaagaaaaactggattttcatgaagcacaacagaagaaggggaagcctcatggtagccggtgggatgatgagcctcatatatctgcatcagtggcagtgaaacagagttctgtaacacaggttacagagcagagtcccaaagtacagagccgctatacaaaagagagtgcctcaagtatcttagcaagttttggattatctaatgaagacctagaagaacttagtcgctatcctgatgaacaactaactcctgaaaatatgccattaattttgagggatataagaatgcgaaaaatggggcgccgattacctaatttaccttctcagagcagaaataaagaaacacttggtagtgaagcagtttcaagtaatgtgatcgattatgggcatgcaagcaaatatggctacacagaagatccacttgaagtacgtatttatgatcctgaaattccaactgatgaggtcgagaatgaatttcagtcacagcagaacatttctgcatctgttcccaatccaaatgtgatatgtaattctatgtttcctgttgaagacgtatttcgccaaatggacttccccggtgagtcctccaataatcggtcctttttctcagttgagagtggaaccaagatgtcaggcttacacatttcaggaggacagtcagtccttgaacccataaaatccgtcaaccaatccattaaccaaacagttagccagacaatgagtcaatctctgattcctccatctatgaaccagcaacctttttcgtcggaattaatttcatctgtaagccagcaagagcggatcccacatgaacctgtgattaattcatctaacgtacatgttggatcaagaggaagtaaaaagaattaccagtcacaggctgacattcccattcggtctccctttggtattgtgaaagcatcctggctaccaaagttttcacatgctgatgcccagaagatgaagagacttccaactccttctatgatgaatgattattatgcagcatctccaagaatatttccacatttgtgttctctgtgtaacgtagaatgtagtcatttgaaggattggattcagcatcaaaatacatctactcatattgagagctgtcgacagttacgtcaacagtatcctgattggaatcctgagatcctcccatcgagaagaaatgagggcaatagaaaagaaaatgaaactccacgaagacgttctcattcccccagtcctaggcgttctagaagatcaagctcaagtcacagattccgtcggtctcgaagcccaatgcattacatgtataggccgagaagtcgaagtccaagaatttgccatcgtttcatttctagatacagatccagatccagatcccgttcaccatatcgaattagaaatccatttagaggtagtccaaaatgctttcgatcagttagccctgagaggatgtcaaggagatcagtgagatcatcagatagaaaaaaagcattagaagatgtagtacaacgatctgggcatgggacagaatttaataaacagaagcatcttgaagctgctgataagggacattcaccagcacaaaagcctaaaactagcagtggaacaaaaccatcagttaaacctacaagcgctacaaagagtgattcaaatctaggaggacattctattcgttgtaaatcaaagaatcttgaagatgacactttgtcagaatgtaaacaggtgtctgataaagctgtttctctccagcgaaagcttcggaaagaacagtcattgcattatggttcggttcttcttataactgaattaccagaggatggttgtactgaagaagatgtgagaaaattatttcaaccatttgggaaagtgaatgatgtcctaattgttccatatagaaaagaggcttacctagaaatggaatttaaagaggcaattactgcaattatgaagtacattgaaacaacacctcttacgataaaaggaaaaagtgtgaaaatatgtgttccaggaaagaaaaaagcacagaacaaagaggtgaagaaaaagactttagagtcaaagaaagtatctgcatctaccttaaaaagagatgcagatgcttcaaaagctgttgaaattgttacttcaacttctgctgccaaaactggacaagccaaggcatctgtagccaaagtaaacaaatctacagggaaatcagcaagttctgtaaaatctgtggtaacggtagctgttaaaggtaataaagcttcaatcaaaacagcaaaatctggtggaaagaagtctctagaagccaaaaagactgggaatgtcaaaaacaaagactctaacaaacctgtgactataccagaaaactctgaaataaagaccagtattgaagtcaaagccactgaaaactgtgctaaagaagctatttctgatgctgctttggaggccacagagaatgaaccacttaacaaggaaacagaagaaatgtgtgtgatgcttgtctctaatttgcctaataaaggatattctgtagaagaagtttatgacttagcaaaaccatttggtggtttaaaggatatcttgattttatcatctcataaaaaggcatatatagaaataaatagaaaagctgctgagtctatggtaaaattttatacctgcttcccagtattgatggatggaaatcaactctcaataagtatggctcctgaaaacatgaatataaaagatgaggaagctatatttataaccttggtaaaagaaaatgacccagaggcaaacatagatacaatttatgatcgatttgtacatcttgataatttaccggaagatggacttcagtgtgtactttgtgttggacttcagtttggaaaagtggatcaccatgtattcataagtaatagaaacaaggcaattcttcagttagatagtcctgaatctgctcagtcaatgtatagctttctgaaacaaaatccacaaaatattggtgaccatatgttgacctgctcattatctccaaagatagacttaccagaggtgcaaattgagcatgacccagaattagaaaaagaaagccctggcttgaaaaacagtccaattgatgaaagtgaggtgcaaacagcaactgatagtccctctgttaaacctaatgagcttgaagaagaaagtactcccagcattcaaacagaaactttggtacagcaggaagagccttgtgaggaagaagctgaaaaagcaacatgtgattctgactttgctgttgaaactttggagcttgaaactcaaggagaggaggtcaaagaagaaattcctcttgtagcatccgcttcagtcagtattgaacaattcactgaaaatgccgaggagtgtgctttaaatcagcagatgtttaacagtgacttggagaagaaaggggcagaaattattaaccctaaaacagcattgttaccatctgacagtgtgtttgcagaagaaaggaacctcaaaggaattctagaagaatctccatctgaagcagaagatttcatttctggaattacacagactatggtagaagctgtagctgaagtagaaaaaaatgaaactgtttcggaaatattgccatcaacttgtattgtgacgttagtaccaggaattcccactggggatgagaagacagtggacaaaaagaatatttctgaaaaaaaaggtaacatggatgaaaaggaggagaaggaatttaatactaaggaaaccagaatggatcttcaaataggaacagagaaggctgaaaagaatgaaggtaggatggatgcagaaaaggtggaaaagatggcagcaatgaaagaaaagcctgcagaaaacactttattcaaggcatacccaaataaaggagtgggtcaggctaataagcctgatgaaactagtaaaactagtattctggctgtatcagatgtatctagcagtaaaccaagcatcaaggctgttatagtctcttctcctaaggcaaaagctacagtttcaaaaactgaaaatcagaaaagttttccaaaatctgtgcccagagatcaaataaatgctgaaaagaaactttcagccaaggaatttggtctgcttaaacccacaagtgccaggtcaggcttggcagaaagcagcagtaaattcaaacctactcagagcagtcttaccagaggaggcagtggaaggatctcagccctgcaaggcaagctttctaaactggattacagagatataacaaaacaatctcaggaaacagaggctagaccttccatcatgaaacgggatgacagcaacaataagactttggctgagcaaaacactaagaatcctaaaagcactactggtagaagttccaaatctaaagaggagccattatttccatttaatttggatgaatttgttactgtggatgaggttatagaagaagtgaatccttctcaggccaagcagaatccactaaagggaaaaaggaaagaaactctcaaaaatgttcctttctctgaacttaacttaaagaagaaaaaggggaaaacttccactcctcgtggtgttgagggagaactatcttttgtgacattggatgagattggggaagaggaagatgcagctgcacatctagcacaagctctagtcactgtggatgaagtaattgatgaagaagaactaaatatggaagaaatggtaaaaaattcaaattcactttttacattagatgaattaattgaccaagatgattgcatttcccacagtgaacctaaagatgttactgttctgtcagtggctgaagaacaagatctcctcaaacaggaacgcttggtaactgtggatgaaattggagaagtggaagagctacctttgaatgagtcagcagacataacttttgccactttaaatactaaaggaaatgaaggagatactgtaagggattccattggcttcatttcttctcaggtgcccgaagacccttctactttagttactgtagatgaaatacaagatgacagcagtgatttgcatttagtgactttggatgaagtaactgaagaggatgaagactctctggcggattttaacaaccttaaagaagagcttaattttgttactgttgatgaagttggagaggaggaagatggagataatgatttaaaagttgagttagcacaaagcaaaaatgaccatcccacagataaaaaagggaatagaaagaagagagctgtggacacaaaaaagacaaaacttgaatccttgtcccaagtgggtccagtaaatgagaatgttatggaagaagatctaaaaaccatgattgaaagacacttaacagctaaaactccaaccaagagagttagaattgggaaaactctgccatcagaaaaagctgttgtgacagaaccagcaaaaggtgaagaggccttccagatgagtgaagttgatgaggaatctggattaaaggattcagaaccagagcgaaaacgcaagaagactgaagactcttcttcaggcaaatcagtggcgtctgatgtccctgaggaattagactttcttgtacctaaggctggattcttctgtccaatttgttccctcttctactcaggtgaaaaagcaatgacaaatcactgcaagagtacacgtcataagcaaaatactgagaaattcatggccaagcaaagaaaggaaaaggagcagaatgaggctgaagaaagaagctctaggtgattgggggaaaggaaagaattcactagaaatttgtttagggtccagttgatttgtgtatttttgttatcatttaatttgtaattttcgtttcagaagcaaatattcgtgttgtacaaatttctgattgccctaaatgtagagagactgatggggaaagtatgatgggtttgatttttatatcaaatcatcaggcatggagaaatatcttttagaagtgttaaaataaatgttcctactgtatatttaaaatacaaaaaaaaaaaaaaaaaaa

SEQ ID NO: 12821 - DNA, 4805 bp, Homo sapiens
cgggtcgctgctcggctcgccggctgggcggtgggggttggtgacgcgggccggggctcacgagaggcccgggaggcggggctttgctggcttcccagagagaggcaggacagaatgctttgacctccaagctgttttaaatctagtagataagccagatcctgtgttgccataagcccttggcccacatttaagtgggaatgcagctagcttggatgtctgaaactttgtaggcgcctctgtctgaatcctgaacacaggcaccaggactactgagagctcgtcatctgtgcaggatagccacacagcaaacatgtttgcaaaactgaagaagaaaattgcagaagagactgctgttgctcagaggccaggaggtgctactaggatcccacggtctgtgagcaaggaatcagttgcctcaatgggagctgactcaggagatgactttgcttccgatggaagcagctccagagaagatctttcatcccagcttctgagaaggaatgaacagatacggaagttagaggccagactttctgactatgctgaacaggtccgaaacttgcagaagataaaagagaagcttgaaattgcattagaaaaacaccaggattcttccatgcggaaatttcaagagcagaatgagacattccaagccaacagagccaaaatggcagaaggactggctttggcattagccagaaaggaccaggaatggtcagaaaagatggatcagcttgaaaaggagaaaaatattctgacagcccagttacaggaaatgaagaaccagagtatgaatcttttccaaaggagagatgaaatggatgaattagaggggttccagcagcaggaactaagtaaaataaagcacatgcttttaaaaaaagaagaaagtctagggaaaatggaacaagaattggaggcacgaaccagagaacttagtcgtacccaggaggagttgatgaactccaatcagatgtcatcagacttaagccagaagctagaagaattgcagagacactactcaacgctggaagagcagagagatcatgtgatagcttcaaaaacaggtgcagaaagtaagatcacagccctggaacaaaaggaacaagagctccaagcactcattcagcagctttccattgatttgcaaaaggtcactgctgaaactcaagagaaagaagacgttatcacacatttgcaagagaaggttgcatccttggagaagagactagaacagaacttatcaggagaagaacacgtgcaagaactcctgaaagagaaaacacttgctgagcagaatttggaggataccagacaacagctcttggcagccagaagcagccaggctaaggccattaacaccctggagactcgggtgagagaactggagcagaccttgcaggcctctgaggagcagctccaacagagcaagggcattgtggctgcccaggaaactcagatacaggagctcgctgccgccaaccaggagagcagccatgtgcagcagcaggcccttgctctggagcagcagttcttggagcgcacccaggcgctagaagcccagatagtggccctggagagaacgcgggcagctgaccagaccaccgcagagcaagggatgagacaactggagcaagaaaatgcagcccttaaagaatgcaggaatgaatatgaacgttctttacaaaatcaccaatttgaactaaagaagctgaaggaagaatggagccaaagagaaattgtgagcgtggccatggctcaagccctggaggaggtgcggaagcaaagggaagagttccagcaacaggcagctaacctgacagccataatagacgagaaggaacagaatctgcgggaaaaaaccgaagtgcttctccagaaagagcaggagattctccagctggagcgaggtcacaactctgccctgctgcagatacaccagctgcaggccgagctggaggccctgaggaccctcaaggcggaggaggctgcagtggtcgcggagcaggaggacctgctgaggctgcggggcccattgcaggccgaagcactctcagtcaatgagtcgcacgtgacctcgagggccatgcaggaccctgtgttccagcttccaactgcaggaagaacaccaaatggtgaggttggggccatggatctcacacagctacagaaggagaaacaggacttggagcagcaacttctggagaaaaataagaccataaagcagatgcagcagcggatgctggagctccggaagactctgcagaaggagctgaaaatcagacccgataatgagctcttcgaagtccgggagaaacctggacctgagatggcaaacatggcgccttccgtcacgaataacactgacctgacagatgcccgcgagatcaactttgagtaccttaaacatgtggttttaaaattcatgtcttgtcgcgaatccgaggcttttcatcttataaaagctgtgtcagtgttgctgaacttttcccaagaggaggagaacatgctcaaggaaactctggaatataagatgtcatggtttgggtccaaaccagctcccaagggcagcatccggccgtctatctcaaaccctcggataccatggtcctagaggggactacccaaggatggagctccgtgggttgacactttttctgtgaaaagaacactgacacaccagtctgggtgggtttttaatcactgtaactgcagtattttgtacaagtgtctaaacattgtttacaagactaaggcccacttccctgcaggctgacctgaacctcagggggtagctgatcctgtcattctggtcaccaaacaggagggtcctggcactacccagatttccacagtgctgctaatatcccagctccagccagcaccccatctgcacctgaatcctctaacttcacggtagcacttacagctgaagccatcagcatctggcaggcacacctgagtcaccatgtagcgctgctactggaggtagagacggccctttgagatggtgcccagcaggccaaacccacctgcctctgccaggaacagccaactccatgggaactctatgggagtggcttttaaaaattcagatgagttagaagctttttatcccttcctctcaagaaaatattctttcaccctgtctctcaaaccacctagaactttagaggatccatctttaagggccggtgtggatgaatgagaaaatgcacctttctgacagtatctccactttacttaagaaaactagcaaatatatgaaaagacccttagtaccaaatacactcaattgcctttttaatgaatgtacttgtcttggataggttgctggtaaaccattttaaactattttttatagctgaagttcttcactactataaacatgtcttctgtactataaaatccatttaactggtgttcttaaaatcagagcgtccagaggaaattcttcctaaaactaggattcctgttcctttgtcttctcactcgcactctggcactgctccctctgaagtgcagtgggatctcgtgtgctttgtcttgattctgtgctgcgctgccgctgggcgatgcagaccacctgtcttctactgaaggacagtccgctgtctccagtgggggcagcagctgtcccccagcctcgatggagacactggggcagtctgccttgtctgtggagctgctctctctccctcatcccaccccaaatacttaaaatgacactacacccagacggcgcccagctggctgcagcacttgtagcatgcacatgactctggtagtaaccaacaaaaacttgttttatggattcctcgtttactgaggaaagggaacatgctggttctggaaaagccacaatattgaatctaaaaggaaaccgtttattgtttgatgaaagtttcactggttaaataaaaaactaaattaataactggagcctctaaatttattatccattatccagtgatggaaagttgtatttctcaatcatgcttagggccaaaataggtatataaaatgtgtcacagaaaaacacgcatttgcaacgttaacctaacgaaatttccatgaagaaccaagtcagggcagcatctccttagtcccagctcaggctctctgccttccagaggccgcttctccagtgactaacctcctcctctggctcctccttgcagacagttatcccttgtttagaacacgaatttccatttacctggtgggaacacgaaacaggagtctcttctgttctgcaagtttgatgggtaagaggtagccttttttcaaagtaggatttcctttttcaactgttccaggaaagaatctctaagactgggtagctcacagccagccaaaggcagctacatttccacagaagcccgtccgctgcctccgtggcttctccagccattgaactggtcccacacgcaccccaggccccactcctcggcagtttcaggtgtagctgtggggcccgttcctaggtctgtactcactttagggaggcttcactgactaggctttcctcctgcatgttgaatttccttcagctttaagaggaagagtggaataaatattctaagtgatttaatgcactttgacttgtataaaactttctgtgttagcgacggtatctatagccctttatacgagcgatggatcttgagctctccttccatgttgtaaatagggattgtattcttgaaaactgctgtagcaaattcatctgtggtgcaatacactttttgattaaagctcttcaatccagatgcaactacaatggattttactaaaaaaaa

SEQ ID NO: 12822 - DNA, 4067 bp, Homo sapiens
atcactcctagctgctcagcaaaccactgaggttcctgggaaaaaaaaaaaaatatctcaagggtgtgttaacttgggacactcgttaactgggggaccttcttgaggcttttttccttctttttaaaaatcatctttgattattcttcttttctagtaaaataatatttagaaaaaataatgtcagagcacagcagaaattcagatcaagaagaacttctcgatgaggagattaatgaagatgaaatcttggccaacttgtctgctgaagaactgaaagaactgcagtcggaaatggaagtcatggcccctgaccccagccttcccgtgggaatgattcagaaagatcaaactgacaagccaccgacaggaaacttcaatcataaatctcttgttgattatatgtattgggaaaaggcatccaggcgcatgctggaagaggaacgagttcctgtcacctttgtgaaatccgaggaaaagactcaagaagagcatgaagaaatagaaaaacgtaataaaaatatggcccagtatttaaaagaaaagctcaataatgaaatagttgcaaataaaagagaatcaaagggcagcagcaatatccaagaaacagatgaagaagatgaagaagaagaagatgatgatgatgacgacgaaggagaagatgatggtgaagagagtgaagaaacgaacagagaagaggaaggcaaagcaaaggaacaaattagaaattgtgagaacaactgccagcaggtaactgacaaagcattcaaagaacagagagacagaccagaggcccaagaacaaagtgagaaaaaaatatcgaaattagatcctaagaagttagctctagacaccagctttttgaaggtaagtacaaggccttcaggaaaccagacagacctggatgggagcttgaggagagttaggaaaaatgatcctgacatgaaggaactcaacctgaacaacattgaaaacatccccaaagaaatgttactggactttgtcaatgcaatgaagaaaaacaagcacatcaaaacattcagtttagccaatgtgggtgcagatgagaatgtagcatttgccttggctaacatgttgcgtgaaaatagaagcatcaccactctcaacatcgagtccaatttcatcacaggtaaagggattgtggccatcatgaggtgtctccagtttaatgagacgctaactgagcttcggtttcacaatcagaggcacatgttgggtcaccatgctgaaatggaaatagccaggcttttgaaggcaaacaacactctcctgaagatgggctaccattttgagcttccgggtcccagaatggtggtcactaatctgctcaccaggaatcaggataaacaaaggcagaaacgacaggaagagcaaaaacagcagcaactcaaggaacagaagaagctgatagccatgttagagaatgggttggggctgccccctgggatgtgggagctgttgggaggacccaagccagattccagaatgcaggaattcttccagccaccgccacctcggcctcccaacccccaaaatgtcccctttagtcaacgcagtgaaatgatgaaaaagccatcgcaggccccgaagtacaggacagaccctgactccttccgggtggtgaagctgaagagaatccagcgcaaatctcggatgccggaagccagagaaccacccgagaaaaccaacctcaaagatgtcatcaaaacgctcaagccagtgccgagaaacaggccacccccattggtggaaatcactcccagagatcagctgctaaacgacattcgtcacagcagtgtcgcctatcttaaacctgtgcaactgccaaaagaactggcgtaagaggcaacagagccatctagaagaacaagaaatggaaatagtgactcttggattacagcatggagactatgtcagcagcaatactttaggatccacgtggcagaactggaaacaatgctaccatctgataagggtatttgtaaaaggcagaatgtttgggccatgaagaagtaggggctgaagaggaaggtggaaggagataaaatataatatttagaggcaatattttctacttgcaatcaatttgagtgactcaggtgaaatttagagtcatatttcccgaagcagaagttaaagaaaattttttaaacatttgctttattattgttttcttctggtaaataataaatataacagaagtgttaactattgtattcccatttttttctccttccatctcttctgcggtaattcatcacatagtatcttaaagggaacaaataatgtttcatcctatggaaatgtgaaggatgaattgagctcctggcccttctgatgctttgaaatggaaggattgttccttagagcttctctgcagaatcagtggagattttcagtttcccaccctgcctggctttctctcttggtgactcccttggtgttttggagtattctttctataggggtacctgtgaggggcagaacacgtaagccacagaacatggtgaaaactaagtgtcactaggaaaagtaatgggaaagtaaaccctgcatatatgaaaacttcctggcagcaagttttcatatatagagggacaatgggagacagcatgctgtttttatagaaaagaagttttacataatatagttattgacaagcttttggttttggctaaatacacacacacacacacacgctcatatgtgtttactctgtaagtctaatttgattttatcactctcaaacatattttaaaggaaacttgcttacaggaaggattaaacttgaactacttatcctattctttaaggcactccattgcctggccccaatttactaatcctgtcttatttcccacaaatcctttatactctactcgatgaaacatccttgtgcacacccttgtgcctttgctcgcattaatccttccaagagacttccctcctgttctccattaatgaacgtcctacccagtcttcaactcccgggtcagatcctgtgtcctccataaaaaattttccagacaactccaatctgtccttcttccaagttcctagaggccttaattattcattctagccactaggtgcatagaatttgagatttttgtaataatagaagtagtgtgaaccctagaaattagaaaatcaagctttgggccaggtgcggtggctcatgcctgtaatcccagcactatgggaggccagggagggaggatctccagaggtcaggagttcgagaccagcctggccaacatggtgaaaccccgtctctattaaaaatacaaaaattagctgggcatgatggcaggcacctgtaatcccagctactcgggaggctgaggcaggagaattgcttgaactggggaggcagaggttgcagtgagacaagatcacgtcactgtactccagcctgggtgacagagtgatactccatctcaaaaaaaaaaaaaaaaaaaaaaaaaaaaaaaaaaaaaaacctttggtgccttttctctcttctttacctgagtaaataattggcacctgccttctttctccttttatgttatcataagtggcatgtatcaaaccaaacaggctaggggagaataggtctaattgtgacagacttaaaaacaacacattatttggaaagacaagccatgggaaagaaatatggcgtttctatttttttaagataatttagtatgtacaaaagtatccaaatttaaatatagttttcaatggctgatagttttgttttctcacccttcaatatttctagaaaacatccttgcatacaaagcaggatagctaagaaagggctgtaacaaacaaaacttcaagtgtctagcacatactacatctaagaggctaaactctgataggaaaagcactttaaacataattaaaagcttaatgtaaattagtagttgaaattctaggccggtgcggtggctcatgcctgtaatcccagcactgtaggcggccgaggtgggtgaatcacatgaggtcaggagttcaagaccagcctgaccaacatggtgaaaccccatttctac

SEQ ID NO: 12823 - DNA, 926 bp, Homo sapiens
acgtcacgtcgtttaatccggaaacggcggcggcggcgacaggaccgaggggccttagttggtgggcaagtcggggatcccagaaagagaagcgtgacccggaagcggaaacgggtgtccgtcccagctccggcctgccagtgagcttctaccatcatggacctattgttcgggcgccggaagacgccagaggagctactgcggcagaaccagagggccctgaaccgtgccatgcgggagctggaccgcgagcgacagaaactagagacccaggagaagaaaatcattgcagacattaagaagatggccaagcaaggccagatggatgctgttcgcatcatggcaaaagacttggtgcgcacccggcgctatgtgcgcaagtttgtattgatgcgggccaacatccaggctgtgtccctcaagatccagacactcaagtccaacaactcgatggcacaagccatgaagggtgtcaccaaggccatgggcaccatgaacagacagctgaagttgccccagatccagaagatcatgatggagtttgagcggcaggcagagatcatggatatgaaggaggagatgatgaatgatgccattgatgatgccatgggtgatgaggaagatgaagaggagagtgatgctgtggtgtcccaggttctggatgagctgggacttagcctaacagatgagctgtcgaacctcccctcaactgggggctcgcttagtgtggctgctggtgggaaaaaagcagaggccgcagcctcagccctagctgatgctgatgcagacctggaggaacggcttaagaacctgcggagggactgagtgcccctgccactccgagataaccagtggatgcccaggatcttttaccacaacccctctgtaataaaagagatttgacactaaaaaaaaaaaaaaaaaaa

SEQ ID NO: 12824 - DNA, 928 bp, Homo sapiens
ggtgagtggcccctgctggaccgtggatcccgggcgggcgtgcgggcggcagcgtacgaggccttctactcgcccgggtgtccggtgcctcgcttctccctgggaccctgtcgtcaacatcgaggcctgccagtgagcttctaccatcatggacctattgttcgggcgccggaagacgccagaggagctactgcggcagaaccagagggccctgaaccgtgccatgcgggagctggaccgcgagcgacagaaactagagacccaggagaagaaaatcattgcagacattaagaagatggccaagcaaggccagatggatgctgttcgcatcatggcaaaagacttggtgcgcacccggcgctatgtgcgcaagtttgtattgatgcgggccaacatccaggctgtgtccctcaagatccagacactcaagtccaacaactcgatggcacaagccatgaagggtgtcaccaaggccatgggcaccatgaacagacagctgaagttgccccagatccagaagatcatgatggagtttgagcggcaggcagagatcatggatatgaaggaggagatgatgaatgatgccattgatgatgccatgggtgatgaggaagatgaagaggagagtgatgctgtggtgtcccaggttctggatgagctgggacttagcctaacagatgagctgtcgaacctcccctcaactgggggctcgcttagtgtggctgctggtgggaaaaaagcagaggccgcagcctcagccctagctgatgctgatgcagacctggaggaacggcttaagaacctgcggagggactgagtgcccctgccactccgagataaccagtggatgcccaggatcttttaccacaacccctctgtaataaaagagatttgacactaaaaaaaaaaaaaaaaaaaaaaaaaaaaa

SEQ ID NO: 12825 - DNA, 2571 bp, Homo sapiens
acaaagtcttgctctgtcacccaggctggagtgcagtggcgcaatcacggctctctgcagcctcgacccccggggctcaagctattctcctgcctcaccctcctgagtagataggactacaggcacgtgcggctatgcctagctaattttttaaatcttaagtagagacattgtctcactgtgttgcccagactggtcttgaactcctaggttgaagggatcttccagcctctgcctcccgaagtgctgtattacagaacatatgcagtaatgtcacctcaaaagagagttaagaacgtccaggcacaaaacaggacttcacaaggtagtagtagttttcagaccacgctttcagcctggaaagtaaaacaggatccaagcaactcgaagaacatctcaaaacatggacaaaacaatccagtgggagattatgaacatgctgatgatcaagctgaagaagatgctttgcaaatggcagtgggatattttgagaaaggtcccattaaagcttcacagaataaagataaaaccttggaaaaacacttgaaaactgtggaaaatgtggcttggaagaatgggttagcttcagaagaaattgatattctattaaatattgcactcagtggcaaatttggaaatgctgtaaacacacggatattgaagtgcatgatcccagcaacagtaatatcagaagattctgtggttaaggcagtctcctggctttgtgttggcaagtgttctggtagcaccaaggtacttttttatcgttggctggttgcaatgtttgacttcattgatcgtaaggagcaaattaacttgctctatggcttcttttttgcttcattgcaagatgatgcactgtgcccttatgtttgccatttgttatatttacttaccaaaaaagagaatgtcaaaccatttcgtgtgagaaaactgcttgatcttcaggccaaaatgggaatgcagcctcatctccaggctttgttgtcactgtataagttctttgctcctgctctgatttcagtatctttgcctgtaaggaagaagatatattttaagaattcagagaatctatggaagacggctctgcttgccgtgaagcaaagaaaccggggaccttctccagaacctctgaagttgatgttaggtccagctaatgttcgtcctctaaaaagaaagtggaattctctctcagttataccagtgctcaattccagtagctacactaaagaatgtggaaaaaaagagatgagtctttctgattgtctgaatagaagtggatcatttccactagaacaacttcaaagcttcccccaacttttacagaacatccattgcttagagctgccttctcagatgggctcagtgctaaacaactctctgctgcttcactacattaactgtgtcagagatgagccagtcttgctgaggttttattactggttgagtcaaacattacaagaagaatgtatttggtacaaggtgaataattatgaacatggaaaagaatttaccaacttcctggataccatcatcagggcagagtgcttcttacaagaggggttttattcctgtgaagcattcctgtataagagccttcctctctgggatggcctttgttgtcggtcacagttccttcagcttgtgagctggattccttttagtagcttctctgaggtgaaaccacttctttttgaccatctagcgcagctcttctttacatcaaccatttatttcaagtgtagtgtgcttcagagtctgaaagagctattgcagaattggctgttgtggctttctatggacattcacatgaaacctgttacaaacagtcctctagagacaactttgggtggatccatgaactctgtgtctaaactgatccactatgtagggtggctatccactactgcaatgcgcttggagagcaacaatactttcttgctgcactttattttggatttctatgagaaggtgtgtgacatatatataaattataaccttccattagtggtattgtttcctcctgggatcttctattctgcactcctcagcctggataccagcatcctgaaccagctgtgttttattatgcacagatatcgtaaaaatttgactgccgcaaagaaaaatgagttggtacaaaagacaaaatcagagttcaatttcagcagcaagacttatcaagaatttaatcactatttgacatcaatggttggttgcctgtggacgtccaaaccctttgggaaaggaatatatattgaccctgaaatcctagaaaaaactggagtggctgaatataaaaacagtttaaatgtagtccatcatccttctttcttgagttacgctgtttcctttttgctacaggaaagcccagaagaaaggacagtaaatgtgagctctattcggggaaagaaatggagctggtatttggactatttattttcacaggggttacaaggcttgaaactttttataagaagtagtgttcatcattcttccattcccagagcagagggcataaactgcaacaatcaatattaaatgaatgttgacataaactgaaaaaaaaaa

SEQ ID NO: 12826 - DNA, 8974 bp, Homo sapiens
cggacgcccggcgagtggcggaaagcgagaccccggcgccgagtgaggtcggccaggctgctgccgacttccccgctggcccctttgttcccctcccggggccctgccggcggcggttcccggttgcccgcgccagagcctcaggccggctccttttgcccttgagaagggttcgctgccaggccttcgagttccgggcgcagctcccgggagagccggcgccctgcctggcccggcggcctcctctcgggcacgaaggcttgctgctgcttctccagaacttcccttcctcgtagacacagcaaagagacttttaaaaaaccatggcagatgtggacccagatacattgctggaatggctacagatgggacagggagatgaaagggacatgcaactaatagcccttgaacagctatgcatgctgcttttgatgtctgacaacgtggatcgttgttttgaaacatgtcctcctcgcactttcttaccagccctttgcaaaatttttcttgatgaaagtgctccagacaatgtattagaggtgacagcccgtgccataacatactacctggatgtatctgcggaatgtacccgaaggattgttggggtagatggagctataaaagcactttgtaatcgtttggttgtagttgaacttaacaacaggactagcagagacttagctgaacagtgtgtaaaggtattagaactgatatgtactcgtgagtcaggagcagtctttgaggctggtggtttgaattgtgtgcttaccttcattcgtgacagtggacatctagttcataaagacaccttgcactctgctatggctgtggtatcaagactctgtggcaaaatggagcctcaagattcttctttagaaatttgtgtagaatctctgtctagtttattaaagcatgaagatcatcaggtttcagatggagctctgcgatgctttgcatcactggctgaccgatttacccgtcgtggtgttgacccagctccattagccaagcatggattaactgaggagctgttatctcgaatggctgctgctggtggtactgtttcaggaccatcatcagcatgcaaaccaggtcgcagcaccacaggagctccatccaccactgcagattccaaattgagtaatcaggtgtcaacaattgtaagtctgctctcaacactttgcagaggctctccggtagtaacacatgatcttctgaggtcggagcttccagattcaattgaaagtgcattgcagggtgatgaaagatgtgtgcttgatactatgcgtttggttgaccttctcttggtgctattatttgaaggacgaaaagctttgccaaagtctagtgctggatctacaggcagaatcccaggactccggagattagatagttctggggagcgctcacatcggcagcttatagattgtattcgaagtaaagataccgatgcacttatagatgcaattgacacaggagcctttgaagtaaattttatggatgatgtaggtcagactctattaaactgggcctctgcttttggaactcaggaaatggtagaatttctttgtgagagaggtgcagatgttaatagaggtcaaaggtcatcatcattacattatgctgcatgttttggaagacctcaagtagcaaagactctgttacggcatggtgcaaatccagatctgagagatgaagatgggaaaactccattagataaagctcgagaaaggggccatagtgaagtggtagctattcttcagtctccaggtgattggatgtgtccagttaataaaggagatgataagaaaaaaaaagatacaaacaaagatgaagaagaatgtaatgagcccaaaggagatccggaaatggcacccatatacttgaaaaggttattgccagtgtttgcacaaacatttcagcaaactatgctgccttcaataaggaaagcaagtcttgctctaattcgaaaaatgattcatttttgctctgaagcactgttacaagaagtttgtgattctgatgttggtcacaatttgcctacaatactagtggaaatcactgcaactgtccttgatcaagaggatgatgatgatggccacttgctagctttgcagatcataagggatatagtagataaaggtggtgatatatacaagcatcagctagccagacttggtgtaataagcaaagtgtcaacgttggcaggtccttcctctgatgatgagaatgaagaggaatcaaaaccagaaaaagaagatgaaccacaggaagatgctcaagaattgcaacaaggtaaaccatatcattggagagactggtcaatcattaggggaagggactgcttatatatttggagtgatgcagcagccttggaattatctaatggcagtaatggatggttcagatttatcttggatggaaaacttgccaccatgtattcaagtggtagtccggaaggtggatctgacagttcagaaagccgaagtgaattcttagagaagttacaaagagctcgaggccaagtaaagccatctacttcaagtcaacctatactgtcagcaccaggacccactaaacttactgtaggaaattggtcactgacatgtttgaaagaaggagaaattgctattcataattcagatggtcagcaagctacaatattgaaagaagatttacctggttttgtatttgaatctaatagaggaaccaaacattcatttactgcagaaacttccctgggttcagaatttgtgactggctggactggcaaaagaggcagaaaactgaaatctaagttagaaaaaacaaagcaaaaggtacgaactatggctcgagatttatacgatgaccattttaaagctgttgaaagcatgcctcgtggagtagtggtgacactcagaaacatagcaactcagttagagtcatcttgggaacttcatacaaatagacaatgtattgaaagtgagaacacttggagagatttaatgaagacagctttaaaaaacctaattgtacttttgaaggatgaaaacacaatttcaccatatgaaatgtgtagcagtggcttggtacaagcacttcttactgtgttaaacaatgtaagtatatttagggctacaaagcaaaaacagaatgaagtcccaaaggtgattttaagtgttttcaagactgcattcactgaaaatgaagatgacgaaagtcgaccagcagttgcgttaattcgaaagttaatagctgtactagaatctattgaacgtctacctctccatttgtatgatacaccaggatccacatataacctccagatacttacaaggagattacgatttcggttggaacgtgcacctggtgaaactgcattgattgacaggactggcagaatgttgaagatggaacctttggctacagttgaatctctggaacagtaccttttgaaaatggtagcaaaacagtggtatgattttgaccgatcttcatttgtttttgttcgaaaattaagagaaggacaaaattttatatttcggcaccagcatgattttgatgaaaatggaatcatttactggattggaacaaatgcaaaaactgcttatgaatgggtaaatccagctgcctatggacttgtagtagtaacgtcatcagaaggaagaaatctaccttatggccgcttagaagacatactaagtcgtgataattcagctttaaattgtcatagcaatgatgataagaatgcctggtttgccatagatctgggtctctgggtgataccatcagcatatacacttcgtcatgctcgtggttatggaaggtctgcactgagaaattgggttttccaggtatccaaagatggacagaactggacttctttgtatacccatgttgatgactgcagtctcaatgaaccagggtcaactgcaacttggcctcttgatccaccaaaggatgagaaacaagggtggagacatgtgagaattaaacagatggggaaaaatgccagtggacaaacacactacctctcattatctggattcgaactttatggcactgtaaatggagtatgtgaagatcagctagggaaagcagctaaagaagcagaagctaatcttagacggcagagacgtctagtacgttcccaggttctgaaatacatggttccaggagctcgtgttatcagaggcctggattggaaatggcgagatcaggatggcagcccacagggagaaggcactgtcacaggagaactacacaatggctggattgatgtcacctgggatgctggtggctcaaactcttaccgtatgggcgcagaaggaaaatttgacctcaagcttgcaccagggtacgaccctgatacagtggcatcacccaaacctgtttcatccactgtttcaggcacaacgcaatcatggagcagcttggtgaaaaacaactgtccagacaagacatctgctgctgcaggctcctcaagtagaaaaggaagcagcagttctgtgtgtagcgtggccagtagcagcgacatcagcttgggttcgaccaaaacggaacggagatcagaaattgtaatggaacacagtatagtttcaggagctgatgtccatgaaccaattgttgttctttcatctgctgaaaacgtccctcaaacagaagtagggtcatcttccagtgcaagcaccagcaccttaacagcggaaacgggaagtgaaaatgctgaaaggaagttaggccctgatagttctgttcgtactcctggggagtctagtgcaatatccatgggaattgtcagtgttagttctcctgatgttagttcagtatctgaattaactaataaagaagcagcttcacaacgacctcttagctcttcagcaagtaacagactgtcagtgagttctttgttggctgctggggcccctatgagctctagtgcaagtgtacctaacctgtcctcaagagaaacatctagcttggagagttttgtaaggagagtggcaaacatagcacggactaatgccacgaacaacatgaatctaagccgaagcagcagtgataacaacactaatactttggggaggaatgtgatgagcacagcaacttctcctcttatgggtgctcagagtttccctaatttgaccacacctggtactacatcaacagtgactatgtcaacatccagtgttactagcagcagcaatgtagctacagcaacaacagttttatcagttggtcaatctttaagtaacactttaaccaccagcctcacatcaacttccagtgagagtgacacaggtcaggaagcagaatattccttatatgatttccttgatagctgccgtgccagtactctattggctgagctcgatgatgatgaggacttacctgagccagatgaagaagatgatgagaatgaagatgacaatcaggaggaccaagaatacgaggaggttatgattctgagacgcccatccctgcaacgtcgagctggctcccgctctgatgtaacgcatcatgctgttacctcgcagctaccacaggtacctgctggagcagggagccgacctattggggagcaggaagaagaagagtacgaaactaaaggaggacgccggagaacatgggatgatgattatgtgctaaagagacagttttctgcattggttcctgcttttgatcctagacctggtcgtactaatgtccagcagacaactgatctagaaataccacccccagggacccctcattcagagctcttggaagaagtcgaatgtactccgtcacctcgattagctctcactttgaaagtaacaggtcttggaacgactcgtgaagttgaattaccactcaccaatttcagatcaaccatcttttactatgtacaaaaattgcttcaattgtcctgtaatggcaatgtgaaatcagataaacttaggcgtatttgggagcccacatacacaatcatgtacagagaaatgaaggattctgataaagaaaaggaaaatggaaaaatgggttgctggtctatagagcatgtggagcagtaccttggcactgatgaattaccaaagaatgacttgataacctacctgcagaagaatgcagacgctgctttcctgcgccactggaaattaactggcactaataaaagtattaggaaaaacagaaattgttctcagctcatagctgcatataaggatttttgtgagcatggaacaaagtctgggttaaaccagggggccatttctactcttcaaagtagtgatattcttaatttaacaaaagaacaacctcaggccaaagcaggcaatggacagaactcttgtggagtagaagatgtccttcagcttctgcgtattctatatatagttgcaagtgacccttattcaagaatatcccaggaagatggtgatgaacagcttcagtttacttttccaccagatgaattcactagcaaaaaaattacaacaaaaatattacagcagattgaggaaccattggcactggcaagtggggctctgccagactggtgtgaacaattaaccagcaaatgtccttttctaataccatttgaaactagacagctttatttcacatgtacagcatttggcgcctcaagagcaatagtatggttacagaaccgacgtgaagccactgtggagcgaacgagaaccacaagcagtgttaggcgagatgaccctggagagtttcgagttggtcgtctcaagcatgaaagagtaaaagttccacgtggcgagtcactgatggaatgggctgagaatgtcatgcaaatacatgcagatcggaaatcagttcttgaggttgaatttttaggagaagaaggaactggcttgggacccacattagagttttatgctctggtggcagcagaattccagagaactgacttgggagcttggctttgtgatgataattttccagatgatgaatctcgtcacgttgatcttggaggtggattgaaacctcctggatattatgtgcagaggtcatgtggactgttcacagcaccatttccacaggatagtgatgagcttgaaaggatcacgaaactgtttcatttccttggaattttcttggccaaatgcattcaagacaatagacttgtggacttacctatttctaaacctttttttaaacttatgtgtatgggtgacattaaaagcaatatgagtaaactgatttatgagtcacgaggtgatagagacttacactgtactgaaagtcagtctgaagcttctacagaagaaggtcatgattcactctcggtaggaagctttgaagaggattcaaaatcagaatttattcttgatccccctaaaccaaaacccccagcttggtttaatggaattttgacttgggaagactttgaattagtaaacccacacagagccagatttttaaaagaaattaaagaccttgctatcaagaggcgccaaattttaagcaacaaaggtctttctgaagatgagaagaacacaaaattacaggaactagtgctgaagaatccatcaggttctgggcctccacttagcatagaggatttaggtttaaatttccagttttgcccttcctcaagaatatatggttttacagctgtggatctcaagccaagtggtgaagatgagatgataacaatggataatgcagaagaatatgtggatttgatgtttgacttttgtatgcatacgggtattcagaaacaaatggaagcctttagagatgggtttaataaagtttttccaatggagaaattaagttccttcagccatgaagaagtccaaatgattctttgtggaaaccagtcaccatcctgggcagcagaggatattatcaattacactgaacctaagctgggttatacacgtgacagccctggtttcctgaggtttgtgagggttttatgtggcatgtcttctgatgaaaggaaagcattcttgcagtttaccactggttgttcaactctacccccaggtggactggctaacctgcatcccaggctcacggttgtacgcaaggttgatgctactgatgcaagctatccatcagtcaatacatgtgtgcattaccttaagttgcctgaatattcttccgaggagatcatgagagagcgcctgctagctgctacaatggagaaaggctttcatctcaattgagctttgaagtgcaatgggagacatcagagactttaaaaatactagtgaagcctcttgtgtttgtgtgcagagaagtatatgatccaccatgctaatgacacttgcctttttttccaccattaaggctttaagaacatgtggaataagttttttagctgctaatgacaaaacaaatcctgtaactacccagccagcaagtatatagcacagaacactgtgttactttacaagggcttatgtgactggaataaggtggtcccacttgactgttccaaagagcagcttctcagatcttcagtgttcactggtaaatttctaacagtgtatttgtgtaaagtttgtcatttcatactccatacactacagttgctgtcactgatccctgttttgctggcttttaagctacttggtcaaaaatcctgcttccttaaaacatagagaattaatgagcatctcaagctttttcttttcctttttaatgatgcctgcactatcaagagtattctagtgttctctctttgtttggcatataatcatgcaccaaactttttatttctttaaggtgggagtatatttttatttcctaaatgccatactatgaagatcaaagtcttaagtgtgtttgcagctcaaaaataaagatgtattaaggggggaaaacctggtctaagtgcaaggcacacttacagcgagttttactttcggttgtattttctttgtatattataaacatttatttaacttgttgccgtttgaagtaaaaaatttccaaaatgtatgctcaacaataatcattaaaatgtttgcagcgt

SEQ ID NO: 12827 - DNA, 4571 bp, Homo sapiens
agagatcttgcagccgcgagcgaagactgccctatcctcagactctaccgaaccccctgtggcctgcggagacgaggagacggacgggtctggtggccaatgagagcttcgatctcttgccccccgcccaatgggccgctgctcatgggccggggcgggactaggagggcaggtaggggcggtccgggctggcgcgcggcgcggcggctacgcggctgcggctcacagagctagcgcctctctgggtgtccgtgccagtgctgcgcgggaaggcaccaccaccacagccgccgccgctggccagggtgctggacaagacgggcccgtcggccacctcgccagctcaggcacccgctgcagccgtcgctgtctcctcccagaccggtccccatggaggagatggaagaggagttgaaatgccccgtgtgcggctccttctatcgggagcccatcatcctgccctgctctcacaatttgtgtcaggcgtgcgcccgcaacatcctggtgcagaccccagagtctgaatccccccagagccatcgggccgcgggctccggggtctccgactatgactatctggacctggacaagatgagcctatacagcgaggcggacagcggctatggctcctacggggggttcgccagcgcccccactaccccgtgccagaagtcccccaacggcgtccgcgtgtttcccccggctatgccgccaccggccacccacttgtcaccggccctggccccggtgccccgcaactcctgtatcacctgcccccagtgtcaccgcagcctcatcctggatgaccgggggctccgcggcttccccaagaatcgcgtactggaaggggtaattgaccgctaccagcagagcaaagccgcggccctcaagtgccagctctgcgagaaggcgcccaaggaagccaccgtcatgtgcgaacagtgcgatgtcttctactgcgatccgtgccgcctgcgctgccacccgccccgggggcccctagccaagcaccgcctggtgcccccggcccagggtcgtgtgagccggaggctgagcccacgcaaggtctccacctgcacagaccacgagctggagaaccacagcatgtactgcgtgcaatgcaagatgcccgtgtgctaccagtgcttggaggagggcaaacactccagccacgaagtcaaggctctgggggccatgtggaaactacataagagccagctctcccaggcgctgaacggactgtcagacagggccaaagaagccaaggagtttctggtacagctgcgcaacatggtccagcagatccaggagaacagtgtggagtttgaagcctgtctggtggcccaatgtgatgccctcatcgatgccctcaacagaagaaaagcccagctgctggcccgcgtcaacaaggagcatgagcacaagctgaaggtggttcgagatcagatctctcactgcacagtgaaattgcgccagaccacaggtctcatggagtactgcttggaggtgattaaggaaaatgatcctagtggttttttgcagatttctgacgccctcataagaagagtgcacctgactgaggatcagtggggtaaaggcacactcactccaaggatgaccacggactttgacttgagtctggacaacagccctctgctgcaatccatccaccagctggatttcgtgcaagtgaaagcttcctctccagtcccagcaacccctatcctacagctggaggaatgttgtacccacaacaacagcgctacgttgtcctggaaacagccacctctgtccacggtgcccgccgatggatacattctggagctggatgatggcaacggtggtcaattccgggaggtgtatgtggggaaggagacaatgtgcactgtggatggtcttcacttcaacagcacatacaacgctcgggtcaaggccttcaacaaaacaggagtcagcccgtacagcaagaccctggtcctccaaacgtctgaggtggcctggtttgctttcgaccctggctcggcgcactcggacatcatcctctccaatgacaacctgacagtgacctgtagtagctatgatgaccgggtggtgctagggaagactggcttctccaagggcatccactactgggagctcacggtagatcgctatgacaaccaccctgatcctgcctttggtgtggctcgcatggacgtgatgaaggatgtgatgttaggaaaagacgacaaagcttgggcaatgtatgtggacaataaccggagctggttcatgcacaacaactcgcacaccaacagaactgagggagggatcacaaaaggggccacaattggggtcctcctcgacttcaatagaaaaaacttgacattttttatcaacgatgaacaacaaggtcccatagcatttgataacgtggagggcctcttcttccctgcggtcagcctgaacaggaacgtgcaggtcacgctgcacaccgggctcccagtccccgacttctactccagcagagcatcaatagcctaaggatgtgccgtggaggcgccagctgcctgttcttacctccgcctgcgagagccacagcaaggagctcagccagccgtggtggggtgcagagttggcaggagtgggagaaggaggagagaaaagctggtcctctgcagtctttacacccacagctctgcccttttccctttcaacctctcctccgctgtcatgcctgcttccgcttccatgtccaacaattctaaccaacaaaggacctagacagcccaccaagtcacttggttcccactcccagattttgcttttatttaacttaattttttatgtaggtgagttatattttctttcttttctgatcaggttattggtgacttactggactggcaccgccaggagaaaattctcctgctaactttttttcttaagctttctgtcaaacaatgaggttgtagggggaggtagggaagaatgagctgaatttgtagcatacagcttacctgctagaatgttcttaccctcttacctctcctgtagcgttagctctgcagagctaagctttgggagaatgaatctatcactgagaagttttactactcattgaagcacaaaaatatccgctacacaggttcacatcagggtaggatcgttaggatggctctataattaggataggccagaaccctggccactgtataaaattggaaagtctctaagacacaggcaaaccaggggacttaatgatttggttcgtttatttaataaaagcttttaattgagaacctactattgaccaggcactgttcaagacactagaacattatgttctagacactgtggggacacagtggtgaacagacaggcatggtctctgcccttcggagcttatattccagtaggagaaaaagcaaaaataaaataattataaatggtcatatgtactagaaaggaaatgggcaagggtcaaagagactcatgggcaagatctttcaggcttcctagaatgatgctaaaaatccacacattctggccatagcaccagaaatgtaccaactcaatgccttttcagctgcactatttaattatggtacctgctgccactcatcacagagcccttcttggtagaaatgatgtcagcattcttatttgctgatgctgctatgataccacgccttaaaaattgacagttgaaaaaaaaaagagtgaccagagggcaaaggacccattctcagtaatgggagatcttgagttgcagtccacagcattcacattctcaggataaacatgcttgtctccatatatactatctgtgcctgttatgaatgaaaaatccatccactctgctgccattcacagcctaattttctggagtagtccaaacaatgtttggaaaaacatgggactgtatgtcattactatgactgatagcagaataataatgcatcttacttctatatagagatagacttacataggttacccttgaaattcattagtttgtcataaagttttaggaaaggtaggacccggaaagaagttctaattagttgtctaaatatttttcagtgagccaagaaattcaccatgaaaaaacaagaataacaaatagaagggaagagataggatgggaaagctaacaaattaaagttttggcaaaaaggaatatatgtaaatagctaattatttacttttgtgcttactttatttagattatttctatcagttacaatctttttctagttaagtgtacctaatttatggaatgggtgctatcctgtttatgtgtgtcttggtttttcttggctacagaaaaactgttgcagggcaacactagtttgatatttgatttactctccaatgagactcaatggctgggccgtggtagactcatagttcctcttgttctttattaaattcatcctgctaattagatttctagtgacttgtaacatgtagtttacactgaattgcaattacagatgcatacaactactatactagaaaaaattgtcatttctgatgtgccaataaatgatttttatgagagaataaaaaaaaaaaaaaaaaaaaaa

SEQ ID NO: 12828 - DNA, 4017 bp, Homo sapiens
agagatcttgcagccgcgagcgaagactgccctatcctcagactctaccgaaccccctgtggcctgcggagacgaggagacggacgggtctggtggccaatgagagcttcgatctcttgccccccgcccaatgggccgctgctcatgggccggggcgggactaggagggcaggtaggggcggtccgggctggcgcgcggcgcggcggctacgcggctgcggctcacagagctagcgcctctctgggtgtccgtgccagtgctgcgcgggaaggcaccaccaccacagccgccgccgctggccagggtgctggacaagacgggcccgtcggccacctcgccagctcaggcacccgctgcagccgtcgctgtctcctcccagaccggtccccatggaggagatggaagaggagttgaaatgccccgtgtgcggctccttctatcgggagcccatcatcctgccctgctctcacaatttgtgtcaggcgtgcgcccgcaacatcctggtgcagaccccagagtctgaatccccccagagccatcgggccgcgggctccggggtctccgactatgactatctggacctggacaagatgagcctatacagcgaggcggacagcggctatggctcctacggggggttcgccagcgcccccactaccccgtgccagaagtcccccaacggcgtccgcgtgtttcccccggctatgccgccaccggccacccacttgtcaccggccctggccccggtgccccgcaactcctgtatcacctgcccccagtgtcaccgcagcctcatcctggatgaccgggggctccgcggcttccccaagaatcgcgtactggaaggggtaattgaccgctaccagcagagcaaagccgcggccctcaagtgccagctctgcgagaaggcgcccaaggaagccaccgtcatgtgcgaacagtgcgatgtcttctactgcgatccgtgccgcctgcgctgccacccgccccgggggcccctagccaagcaccgcctggtgcccccggcccagggtcgtgtgagccggaggctgagcccacgcaaggtctccacctgcacagaccacgagctggagaaccacagcatgtactgcgtgcaatgcaagatgcccgtgtgctaccagtgcttggaggagggcaaacactccagccacgaagtcaaggctctgggggccatgtggaaactacataagagccagctctcccaggcgctgaacggactgtcagacagggccaaagaagccaaggagtttctggtacagctgcgcaacatggtccagcagatccaggagaacagtgtggagtttgaagcctgtctggtggcccaatgtgatgccctcatcgatgccctcaacagaagaaaagcccagctgctggcccgcgtcaacaaggagcatgagcacaagctgaaggtggttcgagatcagatctctcactgcacagtgaaattgcgccagaccacaggtctcatggagtactgcttggaggtgattaaggaaaatgatcctagtggttttttgcagatttctgacgccctcataagaagagtgcacctgactgaggatcagtggggtaaaggcacactcactccaaggatgaccacggactttgacttgagtctggacaacagccctctgctgcaatccatccaccagctggatttcgtgcaagtgaaagcttcctctccagtcccagcaacccctatcctacagctggaggaatgttgtacccacaacaacagcgctacgttgtcctggaaacagccacctctgtccacggtgcccgccgatggatacattctggagctggatgatggcaacggtggtcaattccgggaggtgtatgtggggaaggagacaatgtgcactgtggatggtcttcacttcaacagcacatacaacgctcgggtcaaggccttcaacaaaacaggagtcagcccgtacagcaagaccctggtcctccaaacgtctgagggtaaggcccttcagcagtatccctcagagcgagaactgcgtggcatctaaagtggctggcaagcccggaggtaaccccaccactgcccacattcctgaagtgtttccatgacttgctctgcattctgcacagagccgctgttcctctcctgcctttagagagcctatggtatgtggatgtgatcaaaccaaagattccacatcggcagttccaatggcttgggccggcggcttcctttgataacaatctaaataagctgcagttgaagaagctgaaaaatgaaggcctgaatgtgcccctggtgtgtaagacaaatgtatctaggctctagagcaggctcccattctccaccgatacacatcatgtgccagttttgcccagatgattctaaattactctgtagtacttgcttgttctgagggtgggacctaggttctttccagtcgtggatttgtatgactgaatgtgtttcaaatgggtggtggggtgctagagctgtttagagagggcctgttggctgctcctggcttacccacttagactgcctccgtttcatacccaaagcggaggccgtcagcaccaggattgagacttcctgtgggcaccaaacaggaagagaccagcaacttcgcattacccgccattttcatctttgccagtcccttcagtcttggctaggctaccgagagccaccatacaaggttcatctctagagaatttttgcttcttagctatactttaaatattttggtcatcaaagacaagtaatgtgtctcagatgagaggctgaatttgatggccagatataacctctgaggcttttaacattttcattttaagagtaagcaagacacatgaaattaaacctacaaggaggtatttgtggctggtgccaaagcattctgacactttggggtgtcattttaatcaaagaaatcacccccccacctcaccgggattctccataacttccctctgcagaactaattatgttgattttgttcaagttcaagatgttagctaaaagaactatggtggtgttttttttcccacttcccacaaacctcaacatgtgccagtcaccctaaaatgcttcacatggttaaaaacaagcacaattttgaatcctacagcaaggatgaaaggcccctagccgtgaaaacagtgctttggggagcagttgtcagtctaagtgatgctattccaagagaaggatatgctgagggaaaatgcccacatgacctgttcccatttggagtacagtgatgtggtagctacagcttcccccagaattatcattttagcaccttctctcagggatgacctatcagtttgagagcagttgcctcttttctcaaaataccatactaactgctaaagccctccaagagtctttcctagatgcaacgcagaaggcccttgctggtgatggcctcatttcccatgtgtgtacaaggtggtttgattgaagagtgaagtgcatgcctgcagagcagagagaaatttgtagcaatgttgctaatatgtgttatcagatctgcgggaaaactatttctattcataatacatcatgggaatcatactattctggtaaaaatcagttattagcataacagcctgagcacttatgtctctcgtttcatcctgcaggaggatgtagcgcctcagtttattttaatgttcataagattatggtgtctaatttaataaattacaggattggaactgcgatccttggtaccacagtcacagaactgggggtcattttctagatgaaacaaacggaacaagttctcttccaacaaagaaactgtactgtagaaattaatttcctccatgaattttatatattgtgtacaaatataaggtatgtatctgaatacaaagaaaagcctatcatcatatagatatcagtattctctgttactgcacagaagtaattttctcatgatgaaataaagttcacacacatactttctccaaaaaaaaaaaaaaaaaaaaaaaaaaaaaaaaaaaaaaaaaaa

SEQ ID NO: 12829 - DNA, 2420 bp, Homo sapiens
gggatgggggcggagtccagggcgtgggggggccggtttgttgtggtcgccattttgctggttgcattactgggtaatcggggccctggcttgccgcgtccgccggataccctcagccagtgggcaggtctgagctcgggctccccgagcagtttgagtccccttgcccgctccttcaggtctcagcggcggtggcagccgaggtgcaggatgcaagaaggcgccccccggccgggctcccgctccaggcctcgctcccctgcggccctctgagcccaccatggccgtcccaccgggccatggtcccttctctggcttcccagggccccaggagcacacgcaggtattgcctgatgtgcggctactgcctcggaggctgcccctggccttccgggatgcaacctcagccccgctgcgtaagctctctgtggacctcatcaagacctacaagcacatcaatgaggtatactatgcgaagaagaagcggcgggcccagcaggcgccaccccaggattcgagcaacaagaaggagaagaaggtcctgaaccatggttatgatgacgacaaccatgactacatcgtgcgcagtggcgagcgctggctggagcgctacgaaattgactcgctcattggcaaaggctcctttggccaggtggtgaaagcctatgatcatcagacccaggagcttgtggccatcaagatcatcaagaacaaaaaggctttcctgaaccaggcccagattgagctgcggctgctggagctgatgaaccagcatgacacggagatgaagtactatatagtacacctgaagcggcacttcatgttccggaaccacctgtgcctggtatttgagctgctgtcctacaacctgtacgacctcctgcgcaacacccacttccgcggcgtctcgctgaacctgacccggaagctggcgcagcagctctgcacggcactgctctttctggccacgcctgagctcagcatcattcactgcgacctcaagcccgaaaacatcttgctgtgcaaccccaagcgcagcgccatcaagattgtggacttcggcagctcctgccagcttggccagaggatctaccagtatatccagagccgcttctaccgctcacctgaggtgctcctgggcacaccctacgacctggccattgacatgtggtccctgggctgcatccttgtggagatgcacaccggagagcccctcttcagtggctccaatgaggtcgaccagatgaaccgcattgtggaggtgctgggcatcccaccggccgccatgctggaccaggcgcccaaggctcgcaagtactttgaacggctgcctgggggtggctggaccctacgaaggacgaaagaactcaggaaggacctggtgctgcgcatgctggagtatgagcccgccgcccgcatcagccccctgggggctctgcagcacggcttcttccgccgcacggccgacgaggccaccaacacgggcccggcaggcagcagtgcctccacctcgcccgcgcccctcgacacctgcccctcttccagcaccgccagctccatctccagttctggaggctccagtggctcctccagtgacaaccggacctaccgctacagcaaccgatattgtgggggccctgggccccctatcacagactgtgagatgaacagcccccaggtcccaccctcccagccgctgcggccctgggcagggggtgatgtgccccacaagacacatcaagcccctgcctctgcctcgtcactgcctgggaccggggcccagttacccccccagccccgataccttggtcgtcccccatcaccaacctcaccaccacccccggagctgatggatgtgagcctggtgggcggccctgctgactgctccccacctcacccagcgcctgccccccagcacccggctgcctcagccctccggactcggatgactggaggtcgtccacccctcccgcctcctgatgaccctgccactctggggcctcacctgggcctccgtggtgtaccccagagcacagcagccagctcgtgaccctgccccctccctggggcccctcctgaagccataccctcccccatctgggggccctgggctcccatcctcatctctctccttgactggaattgctgctacccagctggggtgggtgaggcctgcactgattggggcctggggcaggggggtcaaggagagggttttggccgctccctccccactaaggactggacccttgggcccctctccccctttttttctatttattgtaccaaagacagtggtggtccggtggagggaagaccccccctcaccccaggaccctaggagggggtgggggcaggtagggggagatggccttgctcctcctcgctgtacccccagtaaagagctttctcacaaaaaa

SEQ ID NO: 12830 - DNA, 2540 bp, Homo sapiens
gggatgggggcggagtccagggcgtgggggggccggtttgttgtggtcgccattttgctggttgcattactgggtaatcggggccctggcttgccgcgtccgccggataccctcagccagtgggcaggtctgagctcgggctccccgagcagtttgagtccccttgcccgctccttcaggtctcagcggcggtggcagccgaggtgcaggatgcaagaaggcgccccccggccgggctcccgctccaggcctcgctcccctgcggccctctgagcccaccatggccgtcccaccgggccatggtcccttctctggcttcccagggccccaggagcacacgcaggtattgcctgatgtgcggctactgcctcggaggctgcccctggccttccgggatgcaacctcagccccgctgcgtaagctctctgtggacctcatcaagacctacaagcacatcaatgaggtatactatgcgaagaagaagcggcgggcccagcaggcgccaccccaggattcgagcaacaagaaggagaagaaggtcctgaaccatggttatgatgacgacaaccatgactacatcgtgcgcagtggcgagcgctggctggagcgctacgaaattgactcgctcattggcaaaggctcctttggccaggtggtgaaagcctatgatcatcagacccaggagcttgtggccatcaagatcatcaagaacaaaaaggctttcctgaaccaggcccagattgagctgcggctgctggagctgatgaaccagcatgacacggagatgaagtactatatagtacacctgaagcggcacttcatgttccggaaccacctgtgcctggtatttgagctgctgtcctacaacctgtacgacctcctgcgcaacacccacttccgcggcgtctcgctgaacctgacccggaagctggcgcagcagctctgcacggcactgctctttctggccacgcctgagctcagcatcattcactgcgacctcaagcccgaaaacatcttgctgtgcaaccccaagcgcagcgccatcaagattgtggacttcggcagctcctgccagcttggccagaggatctaccagtatatccagagccgcttctaccgctcacctgaggtgctcctgggcacaccctacgacctggccattgacatgtggtccctgggctgcatccttgtggagatgcacaccggagagcccctcttcagtggctccaatgaggtcgaccagatgaaccgcattgtggaggtgctgggcatcccaccggccgccatgctggaccaggcgcccaaggctcgcaagtactttgaacggctgcctgggggtggctggaccctacgaaggacgaaagaactcaggaaggattaccagggccccgggacacggcggctgcaggaggtgctgggcgtgcagacgggcgggcccgggggccggcgggcgggggagccgggccacagccccgccgactacctccgcttccaggacctggtgctgcgcatgctggagtatgagcccgccgcccgcatcagccccctgggggctctgcagcacggcttcttccgccgcacggccgacgaggccaccaacacgggcccggcaggcagcagtgcctccacctcgcccgcgcccctcgacacctgcccctcttccagcaccgccagctccatctccagttctggaggctccagtggctcctccagtgacaaccggacctaccgctacagcaaccgatattgtgggggccctgggccccctatcacagactgtgagatgaacagcccccaggtcccaccctcccagccgctgcggccctgggcagggggtgatgtgccccacaagacacatcaagcccctgcctctgcctcgtcactgcctgggaccggggcccagttacccccccagccccgataccttggtcgtcccccatcaccaacctcaccaccacccccggagctgatggatgtgagcctggtgggcggccctgctgactgctccccacctcacccagcgcctgccccccagcacccggctgcctcagccctccggactcggatgactggaggtcgtccacccctcccgcctcctgatgaccctgccactctggggcctcacctgggcctccgtggtgtaccccagagcacagcagccagctcgtgaccctgccccctccctggggcccctcctgaagccataccctcccccatctgggggccctgggctcccatcctcatctctctccttgactggaattgctgctacccagctggggtgggtgaggcctgcactgattggggcctggggcaggggggtcaaggagagggttttggccgctccctccccactaaggactggacccttgggcccctctccccctttttttctatttattgtaccaaagacagtggtggtccggtggagggaagaccccccctcaccccaggaccctaggagggggtgggggcaggtagggggagatggccttgctcctcctcgctgtacccccagtaaagagctttctcacaaaaaa

SEQ ID NO: 12831 - DNA, 2456 bp, Homo sapiens
gggatgggggcggagtccagggcgtgggggggccggtttgttgtggtcgccattttgctggttgcattactgggtaatcggggccctggcttgccgcgtccgccggataccctcagccagtgggcaggtctgagctcgggctccccgagcagtttgagtccccttgcccgctccttcaggtctcagcggcggtggcagccgaggtgcaggatgcaagaaggcgccccccggccgggctcccgctccaggcctcgctcccctgcggccctctgagcccaccatggccgtcccaccgggccatggtcccttctctggcttcccagggccccaggagcacacgcaggtattgcctgatgtgcggctactgcctcggaggctgcccctggccttccgggatgcaacctcagccccgctgcgtaagctctctgtggacctcatcaagacctacaagcacatcaatgaggtatactatgcgaagaagaagcggcgggcccagcaggcgccaccccaggattcgagcaacaagaaggagaagaaggtcctgaaccatggttatgatgacgacaaccatgactacatcgtgcgcagtggcgagcgctggctggagcgctacgaaattgactcgctcattggcaaaggctcctttggccaggtggtgaaagcctatgatcatcagacccaggagcttgtggccatcaagatcatcaagaacaaaaaggctttcctgaaccaggcccagattgagctgcggctgctggagctgatgaaccagcatgacacggagatgaagtactatatagtacacctgaagcggcacttcatgttccggaaccacctgtgcctggtatttgagctgctgtcctacaacctgtacgacctcctgcgcaacacccacttccgcggcgtctcgctgaacctgacccggaagctggcgcagcagctctgcacggcactgctctttctggccacgcctgagctcagcatcattcactgcgacctcaagcccgaaaacatcttgctgtgcaaccccaagcgcagcgccatcaagattgtggacttcggcagctcctgccagcttggccagaggatctaccagtatatccagagccgcttctaccgctcacctgaggtgctcctgggcacaccctacgacctggccattgacatgtggtccctgggctgcatccttgtggagatgcacaccggagagcccctcttcagtggctccaatgaggtcgaccagatgaaccgcattgtggaggtgctgggcatcccaccggccgccatgctggaccaggcgcccaaggctcgcaagtactttgaacggctgcctgggggtggctggaccctacgaaggacgaaagaactcaggaaggattaccagggccccgggacacggcggctgcaggaggacctggtgctgcgcatgctggagtatgagcccgccgcccgcatcagccccctgggggctctgcagcacggcttcttccgccgcacggccgacgaggccaccaacacgggcccggcaggcagcagtgcctccacctcgcccgcgcccctcgacacctgcccctcttccagcaccgccagctccatctccagttctggaggctccagtggctcctccagtgacaaccggacctaccgctacagcaaccgatattgtgggggccctgggccccctatcacagactgtgagatgaacagcccccaggtcccaccctcccagccgctgcggccctgggcagggggtgatgtgccccacaagacacatcaagcccctgcctctgcctcgtcactgcctgggaccggggcccagttacccccccagccccgataccttggtcgtcccccatcaccaacctcaccaccacccccggagctgatggatgtgagcctggtgggcggccctgctgactgctccccacctcacccagcgcctgccccccagcacccggctgcctcagccctccggactcggatgactggaggtcgtccacccctcccgcctcctgatgaccctgccactctggggcctcacctgggcctccgtggtgtaccccagagcacagcagccagctcgtgaccctgccccctccctggggcccctcctgaagccataccctcccccatctgggggccctgggctcccatcctcatctctctccttgactggaattgctgctacccagctggggtgggtgaggcctgcactgattggggcctggggcaggggggtcaaggagagggttttggccgctccctccccactaaggactggacccttgggcccctctccccctttttttctatttattgtaccaaagacagtggtggtccggtggagggaagaccccccctcaccccaggaccctaggagggggtgggggcaggtagggggagatggccttgctcctcctcgctgtacccccagtaaagagctttctcacaaaaaa

SEQ ID NO: 12832 - DNA, 2561 bp, Homo sapiens
attcatatcatttttcttctccggccccatggaggaagtgagaaagttggcacagtcacgccgggcttcgcaggaccaggtcactcagtgacagatggacaatgcaagaatgaactccttcctggaataccccatacttagcagtggcgactcggggacctgctcagcccgagcctacccctcggaccataggattacaactttccagtcgtgcgcggtcagcgccaacagttgcggcggcgacgaccgcttcctagtgggcaggggggtgcagatcggttcgccccaccaccaccaccaccaccaccatcaccacccccagccggctacctaccagacttccgggaacctgggggtgtcctactcccactcaagttgtggtccaagctatggctcacagaacttcagtgcgccttacagcccctacgcgttaaatcaggaagcagacgtaagtggtgggtacccccagtgcgctcccgctgtttactctggaaatctctcatctcccatggtccagcatcaccaccaccaccagggttatgctgggggcgcggtgggctcgcctcaatacattcaccactcatatggacaggagcaccagagcctggccctggctacgtataataactccttgtcccctctccacgccagccaccaagaagcctgtcgctcccccgcatcggagacatcttctccagcgcagacttttgactggatgaaagtcaaaagaaaccctcccaaaacagggaaagttggagagtacggctacctgggtcaacccaacgcggtgcgcaccaacttcactaccaagcagctcacggaactggagaaggagttccacttcaacaagtacctgacgcgcgcccgcagggtggagatcgctgcatccctgcagctcaacgagacccaagtgaagatctggttccagaaccgccgaatgaagcaaaagaaacgtgagaaggagggtctcttgcccatctctccggccaccccgccaggaaacgacgagaaggccgaggaatcctcagagaagtccagctcttcgccctgcgttccttccccggggtcttctacctcagacactctgactacctcccactgaggcggctccagccccagacaacagcccaggcatctccttgggctgggacttcttacccaaagcacatgcttagcttatctttctttccatttacagtctctttcttcctttctaatcctatctggggagctcctggccaggataatatatttgcagataattctggaccagagacttggtgcggggttaacaccttcatccagattgggtgccagcatacattttctggtgggccttaacatccctcctgcttttaggagaattcacagaacctactgttcctttcagatgaccttttggaaaatagttccctttgccaacagaaacatgccagaaggaatcttctcatcttttatctaactatatgtacagctctcccctcccttgtccttgaaagtaggatatagcgaaaggcgagtccaggagctcaggaagaagagatgcactatatgtttacacaattaattcatcccttaatttaagtcattttcatgtgtgtgagtttgctggttgtaaatactttgtcctaagagatttatctttatacagattttctagaaatgtttaggttactaaaacagggtgggcaaactctctaaactggtacaattttataggtgaaagaaaaaattccctcatttaaacccaatcagatgcctcagagggtagccttgatttgttcttacagttaagaagccctgcagagcacaaacttcagaaacccggcttcctgtgctaagtctttcccaatctctacccctttcttctcgggccaccctctgtttaaaatttgtgctgggttattcagaacctaaaagtattattcaaaccaatttcttccttccacagttatcttagctggatataatgtattttcagctcaattgttaatgtgatggatggcacaatgaatgtatattttgtgttattcgtgaatagtcttttgcatgtcgcacaatgtttgatgtccccaaagtaccacactgagttctatcagttatcctttgtgagcctatgatattccccatttcctgtacaatcatgaacagctctgagatcctggagtgatatgatccagagcagagtttacgggtcttaggatgtctgtaataaataaatatactcaagtttcaggtatgcttaagcatccgtgtatttggctgggctacaatttgttaattcctatgaagttggcacatttcatgaggggaaagggagaagggtggtaaatattttcaaagagatgggccttttcttgaataaaagttaataacagctcctttattataatcaaagctcataatggaaaaaaagactgatgaagaaatttatgaagcagatttatttttgaaacaaacatggatacttcctgggtcaagtgctaaccttttcacctccaactggatgttgacgtatatataaacagaactcccttcaaaagccaaaaaaaaaaaaaaaa

SEQ ID NO: 12833 - DNA, 5698 bp, Homo sapiens
aggttcaagtggagctctcctaaccgacgcgcgtctgtggagaagcggcttggtcgggggtggtctcgtggggtcctgcctgtttagtcgctttcagggttcttgagccccttcacgaccgtcaccatggaagtgtcaccattgcagcctgtaaatgaaaatatgcaagtcaacaaaataaagaaaaatgaagatgctaagaaaagactgtctgttgaaagaatctatcaaaagaaaacacaattggaacatattttgctccgcccagacacctacattggttctgtggaattagtgacccagcaaatgtgggtttacgatgaagatgttggcattaactatagggaagtcacttttgttcctggtttgtacaaaatctttgatgagattctagttaatgctgcggacaacaaacaaagggacccaaaaatgtcttgtattagagtcacaattgatccggaaaacaatttaattagtatatggaataatggaaaaggtattcctgttgttgaacacaaagttgaaaagatgtatgtcccagctctcatatttggacagctcctaacttctagtaactatgatgatgatgaaaagaaagtgacaggtggtcgaaatggctatggagccaaattgtgtaacatattcagtaccaaatttactgtggaaacagccagtagagaatacaagaaaatgttcaaacagacatggatggataatatgggaagagctggtgagatggaactcaagcccttcaatggagaagattatacatgtatcacctttcagcctgatttgtctaagtttaaaatgcaaagcctggacaaagatattgttgcactaatggtcagaagagcatatgatattgctggatccaccaaagatgtcaaagtctttcttaatggaaataaactgccagtaaaaggatttcgtagttatgtggacatgtatttgaaggacaagttggatgaaactggtaactccttgaaagtaatacatgaacaagtaaaccacaggtgggaagtgtgtttaactatgagtgaaaaaggctttcagcaaattagctttgtcaacagcattgctacatccaagggtggcagacatgttgattatgtagctgatcagattgtgactaaacttgttgatgttgtgaagaagaagaacaagggtggtgttgcagtaaaagcacatcaggtgaaaaatcacatgtggatttttgtaaatgccttaattgaaaacccaacctttgactctcagacaaaagaaaacatgactttacaacccaagagctttggatcaacatgccaattgagtgaaaaatttatcaaagctgccattggctgtggtattgtagaaagcatactaaactgggtgaagtttaaggcccaagtccagttaaacaagaagtgttcagctgtaaaacataatagaatcaagggaattcccaaactcgatgatgccaatgatgcagggggccgaaactccactgagtgtacgcttatcctgactgagggagattcagccaaaactttggctgtttcaggccttggtgtggttgggagagacaaatatggggttttccctcttagaggaaaaatactcaatgttcgagaagcttctcataagcagatcatggaaaatgctgagattaacaatatcatcaagattgtgggtcttcagtacaagaaaaactatgaagatgaagattcattgaagacgcttcgttatgggaagataatgattatgacagatcaggaccaagatggttcccacatcaaaggcttgctgattaattttatccatcacaactggccctctcttctgcgacatcgttttctggaggaatttatcactcccattgtaaaggtatctaaaaacaagcaagaaatggcattttacagccttcctgaatttgaagagtggaagagttctactccaaatcataaaaaatggaaagtcaaatattacaaaggtttgggcaccagcacatcaaaggaagctaaagaatactttgcagatatgaaaagacatcgtatccagttcaaatattctggtcctgaagatgatgctgctatcagcctggcctttagcaaaaaacagatagatgatcgaaaggaatggttaactaatttcatggaggatagaagacaacgaaagttacttgggcttcctgaggattacttgtatggacaaactaccacatatctgacatataatgacttcatcaacaaggaacttatcttgttctcaaattctgataacgagagatctatcccttctatggtggatggtttgaaaccaggtcagagaaaggttttgtttacttgcttcaaacggaatgacaagcgagaagtaaaggttgcccaattagctggatcagtggctgaaatgtcttcttatcatcatggtgagatgtcactaatgatgaccattatcaatttggctcagaattttgtgggtagcaataatctaaacctcttgcagcccattggtcagtttggtaccaggctacatggtggcaaggattctgctagtccacgatacatctttacaatgctcagctctttggctcgattgttatttccaccaaaagatgatcacacgttgaagtttttatatgatgacaaccagcgtgttgagcctgaatggtacattcctattattcccatggtgctgataaatggtgctgaaggaatcggtactgggtggtcctgcaaaatccccaactttgatgtgcgtgaaattgtaaataacatcaggcgtttgatggatggagaagaacctttgccaatgcttccaagttacaagaacttcaagggtactattgaagaactggctccaaatcaatatgtgattagtggtgaagtagctattcttaattctacaaccattgaaatctcagagcttcccgtcagaacatggacccagacatacaaagaacaagttctagaacccatgttgaatggcaccgagaagacacctcctctcataacagactatagggaataccatacagataccactgtgaaatttgttgtgaagatgactgaagaaaaactggcagaggcagagagagttggactacacaaagtcttcaaactccaaactagtctcacatgcaactctatggtgctttttgaccacgtaggctgtttaaagaaatatgacacggtgttggatattctaagagacttttttgaactcagacttaaatattatggattaagaaaagaatggctcctaggaatgcttggtgctgaatctgctaaactgaataatcaggctcgctttatcttagagaaaatagatggcaaaataatcattgaaaataagcctaagaaagaattaattaaagttctgattcagaggggatatgattcggatcctgtgaaggcctggaaagaagcccagcaaaaggttccagatgaagaagaaaatgaagagagtgacaacgaaaaggaaactgaaaagagtgactccgtaacagattctggaccaaccttcaactatcttcttgatatgcccctttggtatttaaccaaggaaaagaaagatgaactctgcaggctaagaaatgaaaaagaacaagagctggacacattaaaaagaaagagtccatcagatttgtggaaagaagacttggctacatttattgaagaattggaggctgttgaagccaaggaaaaacaagatgaacaagtcggacttcctgggaaaggggggaaggccaaggggaaaaaaacacaaatggctgaagttttgccttctccgcgtggtcaaagagtcattccacgaataaccatagaaatgaaagcagaggcagaaaagaaaaataaaaagaaaattaagaatgaaaatactgaaggaagccctcaagaagatggtgtggaactagaaggcctaaaacaaagattagaaaagaaacagaaaagagaaccaggtacaaagacaaagaaacaaactacattggcatttaagccaatcaaaaaaggaaagaagagaaatccctggtctgattcagaatcagataggagcagtgacgaaagtaattttgatgtccctccacgagaaacagagccacggagagcagcaacaaaaacaaaattcacaatggatttggattcagatgaagatttctcagattttgatgaaaaaactgatgatgaagattttgtcccatcagatgctagtccacctaagaccaaaacttccccaaaacttagtaacaaagaactgaaaccacagaaaagtgtcgtgtcagaccttgaagctgatgatgttaagggcagtgtaccactgtcttcaagccctcctgctacacatttcccagatgaaactgaaattacaaacccagttcctaaaaagaatgtgacagtgaagaagacagcagcaaaaagtcagtcttccacctccactaccggtgccaaaaaaagggctgccccaaaaggaactaaaagggatccagctttgaattctggtgtctctcaaaagcctgatcctgccaaaaccaagaatcgccgcaaaaggaagccatccacttctgatgattctgactctaattttgagaaaattgtttcgaaagcagtcacaagcaagaaatccaagggggagagtgatgacttccatatggactttgactcagctgtggctcctcgggcaaaatctgtacgggcaaagaaacctataaagtacctggaagagtcagatgaagatgatctgttttaaaatgtgaggcgattattttaagtaattatcttaccaagcccaagactggttttaaagttacctgaagctcttaacttcctcccctctgaatttagtttggggaaggtgtttttagtacaagacatcaaagtgaagtaaagcccaagtgttctttagctttttataatactgtctaaatagtgaccatctcatgggcattgttttcttctctgctttgtctgtgttttgagtctgctttcttttgtctttaaaacctgatttttaagttcttctgaactgtagaaatagctatctgatcacttcagcgtaaagcagtgtgtttattaaccatccactaagctaaaactagagcagtttgatttaaaagtgtcactcttcctccttttctactttcagtagatatgagatagagcataattatctgttttatcttagttttatacataatttaccatcagatagaactttatggttctagtacagatactctactacactcagcctcttatgtgccaagtttttctttaagcaatgagaaattgctcatgttcttcatcttctcaaatcatcagaggccaaagaaaaacactttggctgtgtctataacttgacacagtcaatagaatgaagaaaattagagtagttatgtgattatttcagctcttgacctgtcccctctggctgcctctgagtctgaatctcccaaagagagaaaccaatttctaagaggactggattgcagaagactcggggacaacatttgatccaagatcttaaatgttatattgataaccatgctcagcaatgagctattagattcattttgggaaatctccataatttcaatttgtaaactttgttaagacctgtctacattgttatatgtgtgtgacttgagtaatgttatcaacgtttttgtaaatatttactatgtttttctattagctaaattccaacaattttgtactttaataaa

SEQ ID NO: 12834 - DNA, 9528 bp, Homo sapiens
agtccagctgccgtcgccgccgccagcggacggggcggggatcctggtgccaggtcttcgttaacccgcccccgccgcctcagtcagctgtcccagcccgggcccgaccgtcatggagcggtgcggggcctacgcctgttccgtgtgaggcgcatcgctgccgccgccgccgacgccgccttcgtttgtcgaggcctccggaacccccgccgcctcccggagcccctcgcccttggcagcctgtcaccgccccctgggcgggctcgaatgcgcgtccggtgaaggtgcaggcccggcgccgccactgccgcagccaggagatggttcgggcctagcggagccgggactggagcaacatgaaccgtgaagaccggaatgtgctgcgtatgaaagaacgggaaaggcggaatcaggaaattcagcagggcgaagacgccttcccacctagctctcctctctttgcagagccatacaaagttactagcaaagaagataagttatcaagtcgtattcagagtatgcttggaaactacgatgaaatgaaggatttcataggagacagatctataccaaagcttgttgcaattcccaagcctacagtaccaccatcagcagatgaaaaatctaacccaaatttctttgaacagagacatggaggctctcatcagagtagcaaatggactccagtaggacccgcacccagcacttctcagtctcagaaacggtcctcaggcttacagagtggacatagtagccagcggaccagcgcaggtagcagtagtggcactaacagtagtggtcagaggcacgaccgtgagtcatataacaatagtgggagcagtagccggaaaaaaggccagcatggatcagaacactccaaatcacgttcttccagccctggaaaaccccaggctgtttcttcattaaactctagtcattccaggtctcatgggaatgatcaccatagcaaggaacatcaacgctccaaatcacctcgggaccctgatgcaaactgggattctccttcccgtgtacctttttcaagtgggcagcactcaactcaatctttcccaccctcattgatgtcaaagtccaattcaatgttacagaaacccactgcctatgtgcggcccatggacggacaggagtccatggaaccaaagctgtcctctgagcactacagcagccaatcccatggcaacagcatgactgagctgaagcccagcagcaaagcacatctcaccaagctgaaaataccttcccaaccactggatgcatcagcttctggtgatgtgagctgtgtggatgaaatcctaaaagagatgacgcattcatggcctccccctctaacggctattcatacaccatgcaaaacagaaccttccaaatttccttttccaactaaggagtctcagcagtccaattttggcactggagaacaaaaaagatataatccttctaaaacttcaaatgggcaccagtctaaatctatgttaaaagatgacttaaaactaagcagcagtgaagacagtgatggggaacaggattgtgataagacaatgccgaggagtacaccaggaagtaactctgaaccttcacaccataatagtgaaggagcagataactccagggatgattctagtagccacagtggatctgaaagcagctctggatctgactcagagagtgaaagtagttccagtgacagtgaggcaaatgagccatcccagagtgcatctcccgagcctgaacccccgccaacaaacaaatggcaacttgataattggctgaataaagtgaacccacataaagtgtcacccgcctcttcagtggacagtaacatcccatcatctcaaggctacaaaaaggaaggccgagagcagggcactgggaatagctacactgatacaagtggacctaaagaaacgagttccgctactccgggacgagactccaaaaccatccaaaagggatcagaaagtgggcgtgggaggcagaaatctcctgcacagagtgacagcacaacacagagaagaactgtaggcaaaaaacaacccaaaaaggctgagaaggcagctgctgaagagcctcgtggaggcctgaagatagaaagtgaaacccctgtagacttggctagcagcatgccctccagcagacacaaagcagccaccaaaggctcaaggaaacccaatataaagaaggagtctaagtcttcccctcgacctacagcagagaaaaagaaatataagtcaacaagtaaatcttcccagaaatcaagggaaatcatagaaacagatacctcatcctcagattcagatgaaagtgagagccttcctccttcctcacaaactcctaagtaccccgagagcaataggactcctgttaaaccctcctcagtggaggaagaagatagcttttttcggcaacgaatgttctctcctatggaagagaaggaacttctttcacccctcagtgagcctgatgacaggtacccacttattgtgaagattgacctgaatcttttgactagaataccaggaaagccttacaaagaaacagagccgcccaagggggaaaagaaaaatgtgccagaaaagcacacgagagaggctcagaaacaagcctcagaaaaagtttccaacaaaggcaagaggaagcataagaatgaagatgataaccgagccagtgagagcaagaaacccaaaacggaggacaagaattcagcaggccataagccatccagcaacagagagtcatctaagcagagtgctgcaaaagaaaaggatttgttgccttctcccgctgggcctgttccttcaaaagatccaaaaacagagcatggctctcggaagaggactattagtcagtcttcttccttaaagtcaagcagtaacagcaacaaggagacgagtggcagcagcaaaaacagttcctccacatcaaagcagaagaagaccgaagggaagacttccagtagctccaaggaggttaaggaaaaggctccaagtagctcctctaactgtcctccatctgcaccaactcttgattcttctaagcctcggagaacaaagcttgtctttgatgacagaaattattcagcagaccattatttacaagaagcaaaaaagctaaagcacaatgcagatgcattgtctgataggtttgagaaagctgtatactatcttgatgctgtggtatctttcattgaatgtgggaatgcattagagaagaatgctcaggaatccaaatccccattccctatgtattcagagacggtggatctcatcaaatacactatgaagctaaagaattacttggcaccagatgctacagctgcagataaacgactcacagtactttgcctgcgatgcgagtctttgctgtacctgaggctgttcaaactgaagaaggaaaatgctctgaagtactcaaagacactgacagagcacctgaagaattcttataataattctcaagcaccatcgcctggcttgggaagcaaagctgtggggatgccttcccctgtttctccaaagctgtcaccaggcaattcaggaaattattcatctggggccagtagtgcttctgcaagtggttcttcagtgaccattccacagaagatccaccagatggcagccagctatgttcaggtcacatccaacttcctctatgccaccgaaatttgggaccaagctgaacagctttccaaagagcaaaaagaattctttgctgaactggataaagtaatgggccctctcatctttaatgcaagcatcatgacagatctagttcgttatacccggcagggactgcactggcttcgccaggatgccaagttgatatcttgaactgaacacattctcgttgcctctgattttctccacaacactgtgtcacatcacgaaggaaaactgccataacataccacctagtcgacactaagaatgaggaatagttttctcctcgttggttcatgtgttgttgtttttgataatccaaagcgatcatgtcagttggccctttaatatttccaatgtgaaagattatttaaatgcttttaaatctgcagcacattgataagatggtttccgtgagctatgataagattgaaattccagttgcaattcataactaatgaattgaaattttatttattttaatttttttaagttcccagattggggctagtttaagacttagttatttctgcctataaatttactctgttgaatatttagcataaatttaatgtagacatttttatttatataccttgggagctttattacctaatatctttttgtggtagctgttctaagagtaagaattggttcgtctaaaataaggacatattctttctacacctgctacctgacctgatatttgaaatcttaactccaattttattattgtggaatttacagttagtattaaggatattcttctacacatgaaaaaatcacttaaatatgagaaaatggcattctacatgtatgtactatgaaatgtgtctgatttggtatgcattatttcaaaaactgtgaatgtgtgttaataacactacagcaatcacacagtgactatagcttgcatttaatgcattacaaaagagggaggacaaactttctagaagaagcatttcatgttgaagggtttcataaaaggacaatcctgaacgttacggattttattaaaaccatatgttattttttgttgctaatcatttgacacttaatcgaaacagaataagttactgtggaaaaaaggatgatccaactcctgaggattgccgcctgtgtgtctttaattgattatctttgatagttagagttatttttcagatttttccccctcatactggattgtgatgctctgatatgagcatgcaatgactgatacagaaataggctggagcttcggtgtgtgcttttgctatacagcttacagttctaatgcctgatgtagagatgatgaatttctcctttttaaacctatcttctgtttactccttttgcattatgaaggccctcttcaatgatgtatgtttctgatggaatcagaaaatttcacactagaaaagtgtacctaacttgattcagtgtgagctcttgggacagggagtggagccaggggtagagcttaaagaagctggctctgtaagagttgtatatcaaagtaccttttgctacaaggtgcatatagaagtctaagataagaaatgtaccctctatactttatttttcatgcccctatcatgtttggtgtgccttaaatcttacctttaaatgaagactctatggattgtttacaaatgaagttttacactaggaccagatcgtccatacatgattggtcttctacaataataatgttcaattctttcattttaaatctttctttagggtcatataaagattagttctttcagaaaagctattgctttggtacatgacttagtctaaccagttgggtaatgctgctttgaaaaatagtttgtccctctccccattccaaaaatgaatccattcagtcagaaaaaaagattatcctactatttgtagatgattgctaaggcttgaaataggaaaggggaaagaagggatagaaaagtttcaagtccagtagtgcagtgaatcctttgtgtttgagacttttttacacttatttctgaagttagtgaactttcattgtccctgtggcctcatatttatagagcttcttaactgttttgtacctcagattgtttttagatgtcattgaagattgagatgtacaaattatgttgaatttaacctgtttctcttggagaaattgcctctgatatctttctaacttaatcttagtgtgttctaggaacagttttccataagaggacaacttctcaatgatcatgatagttatttagtaagaaataatggttgttaatcaaatacatgttatgtcttgtccttctctgatttttctgacttggattccttaatttgcagtgatgtcttagaaatggaaaaagtatcctctgggctttcagactttcagcaacaacagccagtgggatacctctgagttcttgtgttctagtctcttgtatgtcctgaaaggcagcaggagcatttttggggtcacactgatattttgttaaagcagagtttcctgcatggtttatggtgctgctctaatattttctctttaaaactgtgtcaatttttggagaatgaatttttcaaccttttcattgtggaggatttttcccacaaggtagtaatgggcaatggatcaaaatcctatcataaatgattgaattttcaatgtcatagtgtgtggaaatactactccctttcctccatgtctatcttcttagatgttctgtctttgtcatcatctgctccagcacatactttggactcctttacaggtgaccttcccccctccctcctcaataggtgtcctcagtgttttctaagcatttaaaactgaatttgacaagtggctaaaaacttagtctgagacttgtacttagtatatggttaattatagaaacaacaactattttaaacagttactctgttgactgctctttatgactacacttgtatgccaggaggcagcagcctatacaccattagactctttacaagcaaccaacgaaccaattgcagtggttgcagttgtcacagtagtcttgcctgggccagactgggctgggctgtgggaagcattccccttcaggggagtttccacagctcagcccaggctccagtctggctagagagcatccagcccattccttgcctcagtgccacctttttctgggcaagtagccaagaagtgactttatatgcagtgagtacttcagataaacttacagctacagctgccgaagagtggagaaggttgaccaccatttatttaattctctagtgtaaaaacaattgagagcagtgtgcgtgagcccacagacacctgtgtttctgggagctctggcagtggcggattcataggcacttgggctgcactttgaatgacacacttggctttattagattcactagtttttaaaaaattgttgttcgtttcttttcattaaaggtttaatcagacagatcagacagcataattttgtatttaatgacagaaacgttggtacatttcttcatgaatgagcttgcattctgaagcaagagcctacaaaaggcacttgttataaatgaaagttctggctctagaggccagtactctggagtttcagagcagccagtgattgttccagtcagtgatgcctagttatatagaggaggagtacactgtgcactcttctaggtgtaagggtatgcaactttggatcttaaaattctgtacacatacacactttatatatatgtatgtatgtatgaaaacatgaaattagtttgtcaaatatgtgtgtgtttagtattttagcttagtgcaactatttccacattatttattaaattgatctaagacactttcttgttgacaccttgaatattaatgttcaagggtgcaatgtgtattcctttagattgttaaagcttaattactatgatttgtagtaaattaacttttaaaatgtatttgagcccttctgtagtgtcgtagggctcttacagggtgggaaagattttaattttccagttgctaattgaacagtatggcctcattatatattttgatttataggagtttgtgtctgggtcccaggaacatctactggggatgactgttaggcagcttgtgatgatgttttttaaaaaacctaagtaacttggggagacagagcatttcaaacccatatagacacctatcatacctgtatatcccctaatacatggaacataaatttcatttcagctttatgcattaatgtattgaagaggcaggctttttttccagtaataatactgtacatctaaggttgctattcagtaaaactaatagaagagataattattgaataccttggaatatgtagtgagaagaggccaaatttttcatgtttgtgagcatgtctttcagatactcgctaatggagaaattcactttagacctctagaccccaaaaccaagttagcaagtgacaaaaagtaaattattaatagtctgtaaagtggatgctggtcttacaaagctcctattcacatgaaccctatggttaattagaaagaacttgctgtctccagaaaagggaatggaaataataactatgtatcttcttttcatgtaatttggtcacagaataaggtattcaagttaagtctaatccaagtcttagagatctttaagtatcctaaaatagcagcctaagtagtcatcatgtaaagaagttgactttcaggaatgtcagcattgacctctccttgccactgttactcagctaaacataacttgccattcttaaaaataaaaaagctcccacccagaaactctagtgatactcagttttgacctcttactgcttccatgtgggacttcttttcagcttttaaccattggaattttctacctgctatgttcctctctggaaaatatcaatttggaaatgctgcctttcaaatcaatgccatgatcatccatattgttgagtttgttgttggtgttccagaagtgtccccattttacaactttatgcacacacctggcaaatcattaacatgagcattcaacagtactgggatgggtggggtgggggtagggggctcaccaacagaactggccagttgacattgcctgaaaaggcaccacctttaagggccagttgtggggttggtaagcacagttatgaaaatttctatctagcctccgttttgaatggttttaagaaattttgtatatggaggatggaaatgcttatatatttattgaaaatccttttatttgaaattaaaattatttggtatataattgtttgatatttggggagggttttggaggggagataatgtcactgataaattaaaagcctgttgattttgcagaaaggtactgttagtgactgataaggatgcctttgttttgtacatgaaccaaatctttgttttacatttcttttatccaaaatatttaggcatctgacattttcaaccagaatttcaattatatactgtgatttttatttgttgcaatacattacaatttcagaggtactttggggctcaaaagctaggatttctaagtcagtatgtgcatttcacacgataaagctgttaatggtgagcaaagtattatatactaactagatttttccacatctgtatagtatattatatgtattttgtggtattgagagtatagaaagtttagagtgtcaaacatgcgtttaatgtgtatttttaaacaaatttatggcaattaaaatatttggagacaagggtatcacatttcaatttgtaaagatctttttaactctactgtgtcattaagatgctttgtacaatgccaaaccatagttggagaaactaagtttaataaatatcaaatagattttctgtattaaagttactgaacactgta

SEQ ID NO: 12835 - DNA, 1428 bp, Homo sapiens
gtttacctctctgttctgcaagagctggaagctccagttggggtaaggaggctcccatcccgagcttgcgtagtggttctgtgtggcgctgaggaatttggaaacctcaaatggctaaactattacaacctccacccaagttcctgccctcagagtggcacattgctaacaagaaccagtaccacagagcagacgctcaaaggtcccgatcagaacgcctggtcgcagaaagccagaggcttgtggatgaaattgaaaagaccacaagaaaatctcaaagcgatgtgaacaagaaactagaacagagactcgaggaagtccagttctggaagaaggagttagatgacaaacttgagcagcttgtgaatgtaactgatgatctactcatatataagatcagattggaaaaagccctggagaccttgaaagagcccttgcacatcactgagacatgcctggcatacagggagaagcgcattggcattgacctggtgcacgacacagtggagcatgagctgataaaggaggctgagatcatccagggcattatggctctgctgacccgtaccttggaggaggcttccgagcagattcggatgaaccgctctgccaagtacaatcttgagaaggatttgaaggacaagtttgtggccctgaccatagatgatatctgcttctcgctcaacaacaactcaccaaacatcagatattctgagaacgccgtgaggattgagccaaactccgtgagtctggaagactggttggacttctccagcaccaatgtggagaaggctgacaagcagcggaacaactccctgatgctgaaagccctggtggatcgaatcctgtcccagacagccaatgatctgcgcaagcagtgtgatgtggtggacacggcattcaagaatgggctgaaggatacaaaggatgccagggacaagctggctgatcatctggccaaggtcatggaagagattgcttcccaggagaaaaatattacagctcttgaaaaggccatccttgaccaagaagggccagccaaggtggctcatacgcgcttggagaccaggacacaccggccgaacgtggagctgtgtcgtgatgtcgcacaatataggctaatgaaggaggttcaagagatcacccacaatgtcgcaagattgaaggaaactttagcccaagctcaggcagagctgaaagggctgcatcgcagacagcttgccctgcaggaggagatccaggtcaaagagaacaccatttatatcgacgaagtgctgtgtatgcagatgaggaaatccatcccacttcgggatggggaagaccatggggtctgggctgggggcctccgccctgatgctgtctgctaatagtagggctagttccaattctcattaaaccacattgtaaacagtaaaaaaaaaaaaaaaa

SEQ ID NO: 12836 - DNA, 1511 bp, Homo sapiens
ccgagcctagtgcctcccacgcccggcggccgcgagccggggtccgcgagggcggagtggggcgcggcagccaggaacccgactacgaatcccagggtgcgggcgggcggagcgaggagggacgctgggcctgcccggtgcgcacgggggcggggaccggcaaggcgggaccatttcccggcataggctccggtgcccctgcccggctcccgccgggaagttctaggccgccgcacagaaagccctgccctccacgccgggtctctggagcgccctgggttgcccggccggtccctgccgctgacttgttgacactgcgagcactcagtccctcccgcgcgcctcctccccgcccgccccgccgctcctcctccctgtaacatgccatagtgcgcctgcgaccacacggccggggcgctagcgttcgccttcagccaccatggggaatgggatgaacaagatcctgcccggcctgtacatcggcaacttcaaagatgccagagacgcggaacaattgagcaagaacaaggtgacacatattctgtctgtccatgatagtgccaggcctatgttggagggagttaaatacctgtgcatcccagcagcggattcaccatctcaaaacctgacaagacatttcaaagaaagtattaaattcattcacgagtgccggctccgcggtgagagctgccttgtacactgcctggccggggtctccaggagcgtgacactggtgatcgcatacatcatgaccgtcactgactttggctgggaggatgccctgcacaccgtgcgtgctgggagatcctgtgccaaccccaacgtgggcttccagagacagctccaggagtttgagaagcatgaggtccatcagtatcggcagtggctgaaggaagaatatggagagagccctttgcaggatgcagaagaagccaaaaacattctggccgctccaggaattctgaagttctgggcctttctcagaagactgtaatgtacctgaagtttctgaaatattgcaaacccacagagtttaggctggtgctgccaaaaagaaaagcaacatagagtttaagtatccagtagtgatttgtaaacttgtttttcatttgaagctgaatatatacgtagtcatgtttatgttgagaactaaggatattctttagcaagagaaaatattttccccttatccccactgctgtggaggtttctgtacctcgcttggatgcctgtaaggatcccgggagccttgccgcactgccttgtgggtggcttggcgctcgtgattgcttcctgtgaacgcctcccaaggacgagcccagtgtagttgtgtggcgtgaactctgcccgtgtgttctcaaattccccagcttgggaaatagcccttggtgtgggttttatctctggtttgtgttctccgtggtggaattgaccgaaagctctatgttttcgttaataaagggcaacttagccaagtttaaaaaaaaaaaaaaaaaaaaaaaaaaaaaaaa

SEQ ID NO: 12837 - DNA, 4540 bp, Homo sapiens
attctggggttcgtttagaggtttgaattttctcggagaaagacaggccggccacgaggaaaacagaaacaagccgcagcaacatctaagcccttgaaaggatcctgagagaggggggaaagggaaaacagcagccaccagcccaaccacttgtgtcttctgccccttcccacctatcttgcccaccccaccagcccacgctgcttgggacttgaaatctgtggccgaaggaccgtcactacataacttcaaaaataatcaaccaccctcccttcccaaaccacccaaattcactcatccagcgtttacttttttgaatccactcagaacttttttctgcgacccccctccctaaatggagttgggtgggggggaaatgaatactgagttggcctttattttttaaaagactttttgatccaatgaggccccctaaataattgagttttgggtcctggttggttgttttattttttttcctccaaaattttaccccctcccccctgagcccgaggtgctgacgtcgcaaaaaaattggataaaaccaccatcatgggttcgggtcccatagaccccaaagaacttctcaagggcctggacagcttccttaaccgagatggggaagtcaaaagtgtggatgggatttccaagatcttcagtttgatgaaggaagcacgaaagatggtgagtcgatgcacttacttgaacattctcctgcagacccgttcaccagaaatattggtcaaatttattgacgttggcggctacaaacttcttaacaattggctgacgtattcaaagacaaccaacaacattcccctcctccagcaaattctactgaccctgcagcatctaccgctcactgtagaccatctcaagcagaacaacacagctaaactggtgaagcagctgagcaagtcaagtgaggatgaagagctccggaaattggcctcagtccttgtcagcgactggatggctgtcatccgctctcagagcagtacccagcctgctgagaaagataagaagaaacgtaaagatgaaggaaaaagtcgaactacccttcctgagcgacctttgacagaggtgaaggctgagacccgggctgaggaggccccagagaagaagagggagaagcccaagtctcttcgcaccacagcacccagtcatgccaagttccgttccactggactagagctggagacaccatccttggtgcctgtgaagaagaatgccagcacagtggtggtttctgacaagtacaaccttaaacccatccccctcaaacgtcagagcaacgtagctgctccaggagatgccactccccctgcagagaagaaatacaagccactcaacacaacacctaatgccaccaaagagatcaaagtgaagatcatcccgccacagcctatggagggcctgggctttctggatgctcttaattcagcccctgttccaggcatcaaaattaagaagaaaaaaaaagtactgtcacctacggctgccaagccaagcccctttgaagggaaaacgagcacagaaccaagcacagccaaaccttcttccccagaaccagcaccaccttctgaggcaatggacgcagaccgtccaggcaccccggttccccctgttgaagtcccggagctcatggatacagcctctttggagccaggagctctggatgccaagccagtggagagtcctggagatcctaaccaactgacccggaaaggcaggaagaggaaaagtgtgacatggcctgaggaaggcaaactgagagaatatttctattttgaattggatgaaactgaacgagtaaatgtgaataagatcaaggactttggtgaggcggctaagcgagagatactgtcagaccgacatgcatttgagacagcgcggcgtctgagccatgataacatggaggagaaggtgccctgggtgtgcccccggcccctggttctgccctcacctcttgtcacccctggaagcaatagtcaggagcgatatatccaggctgagcgggagaagggaatccttcaggagctcttcctgaacaaggagagtcctcatgagcctgatcctgagccctacgagcccataccccctaaactcatccccctagatgaggagtgttccatggatgagactccgtatgttgagactctggaacctggggggtcaggtggctcacctgatggggcaggaggctccaagttgcctccagttctggccaatcttatgggaagcatgggtgctggaaagggcccccaaggccctggaggaggaggcattaatgtccaagagatcctcacctccatcatgggtagcccaaacagtcatccttcagaggaactactgaaacaaccagactattcggacaagatcaagcagatgctggtgccacatggactcctaggccctggcccaatagccaatggtttcccaccagggggtcctgggggccccaagggcatgcagcactttccccctggacctgggggacctatgccaggtccccatggaggccctggtgggccagtgggtccacgtcttctgggtcctccaccccctccccggggaggtgatcccttctgggatggcccgggcgaccctatgcggggtggcccaatgcgggggggtccaggaccaggtcctggaccataccatagaggccgaggtggccgaggaggaaacgaacctcctcctcctcctcctccattccgaggcgccagaggaggtcgctctggaggaggacccccaaatggacgagggggccctggtgggggcatggttggaggtggtgggcatcgtcctcacgaaggccctggtgggggcatgggcaacagcagtggacatcgtccccacgaaggccctggcggtggcatgggaagtgggcatcgcccccatgaaggccctggtggtagcatgggtgggggtggaggacatcgtccccacgaaggccctggcggtggcatcagtggtggcagtggccatcgtccccatgaaggccctggcggaggaatgggtgccggtggtggacatcgcccccacgaaggccctggcggaagcatgggtggaagtggtggacatcgtccccatgaaggccctggacacggggggccccatggccaccggcctcatgatgtccctggtcaccgaggccatgaccatcgagggccgccacctcatgagcaccgtggccatgatggtcctggccacgggggagggggccaccgagggcacgatggaggccacagccatggaggagacatgtcaaaccgccctgtctgccgacatttcatgatgaagggcaactgccgctatgagaacaactgtgccttctaccacccgggtgtcaatgggccccccctgccctagggaccatttgcctgccctgttcacacaacccctgtggactgcagcctcgctctttccaccctgttatggcttctgtgaggcccattttcccttttccccagctgatgaggagccggccccctcagttcccacttgcttgggttcctgggggttttctgatcactggtgcgcattgatgtacatattttcctccagtctggggaggagagagactggaaacgttcctggactgctgaagaggagacccagttggcttcactttttgagaagattcgccctgtaccccaaacccctttccagtattacccttaatgcttgagaacctaaagctggttatcctggcgaacacccctacccttctattgcgggtccccacatgcacacagaactctgacacaggatcagctgcacttaagaaatcatcccagctaagttcattattcctcatggggtggggagatgctgaaaggggtattgtatatcccactgcactgagagggctcaatcagctggatttgagttctggaacacacatcatccccacccctcccccagcgtgggctcaccattcttagtcctttctcaagtgggaccttcaactttctgtgaacacccagtctgcgtcctgggtctgctaggttcgatgatggcgaactcgtatctgcatccggtgcaagttttagctggcagaggtgagaccggtggtgctggtctgcctttgccaactatagccagtctggagacttgataaaatacttcagtgagaccagcttctcatcaacttgggcccggcgtgctgggcctgaaagtcacactacatgcactgcctttgggagtcagctcactccctgctcccacctggaaccttgccagcgtgaaggaggcttccaggtacttcaccctgtcaaccacctctgaatccccaccaggcgccttcctgggtggattcaacaagatgattttgccctttcccagttctctccttcactttggcatcagttgttttctatgaaaacagtggattggttgggttttgtgcagggtcttgggttagagccaaaatggatttgaggatgagtatttttttttttggttttgtatattttgtacattaataataaacagtggaaagagaagcagcttaaaaaaaaaaaaaaaaaaaaaa

SEQ ID NO: 12838 - DNA, 1710 bp, Homo sapiens
atggatgattgtggcaagttaaagaaatacaaggaactcacccttactagaaaccaaggcatttgtgggaagaacaattcatacattgagcatcaaatacatcaagtacgttttggaagacatcgagaggagtgtaactactttcttgtagtttatcaaaatcccataataagaaacatggattcagacgacctgcaagtcttccagaatgagctcatttgctgcatttgcgtgaactacttcatagatccggtcaccattgactgtgggcacagcttttgcaggccctgcctctgcctctgctcagaagaaggcagagcaccaatgcgctgcccttcgtgcagaaaaatctcagagaagcccaacttcaacaccaatgtggtactcaaaaagctgtcttccctagccagacagaccagacctcagaacatcaacagctcagacaatatctgtgtgctccatgaggagactaaggagctcttctgtgaggctgacaagagattgctctgtgggccctgctctgagtcaccagagcacatggctcacagccacagcccaataggatgggctgctgaggaatgcagggagaaacttataaaggaaatggactatttatgggaaatcaatcaagagacaagaaacaatctaaatcaggaaactagaacatttcattcgttaaaggactatgtgtcagtaaggaagaggataatcactattcaatatcaaaagatgcctatatttctcgatgaggaggagcaacggcatctgcaggcactggaaagagaagcagaagagcttttccaacaactacaagacagtcaagtgagaatgacccaacatttagaaaggatgaaagacatgtacagagagctgtgggagacatgccacgtgcctgacgtggagctgctccaggatgtgagaaatgtatcagcaaggactgatttggcacagatgcaaaagccccagccagtgaacccagagctcacttcatggtgcataactggagtcctagacatgctcaacaacttcagagtggatagtgctctgagcacggaaatgattccttgctatataagcctttctgaggatgtgagatatgtgatatttggagatgaccatctcagtgctcccacggatccccagggagtggacagctttgctgtgtggggagcgcaagcattcacctccggcaagcattactgggaggtggatgtgaccctctcctccaactggattctgggagtctgtcaagattccaggactgcagatgccaatttcgttattgattctgatgaaagattttttttaatttcctcaaagaggagcaatcactatagtctctccaccaactctccacctttaattcagtatgtgcaaaggcctctgggtcaagttggggtgtttctggattatgataatggatctgtgagtttttttgatgtttctaaaggttctcttatctatggttttcctccttcctccttctcttcccctctgaggcctttcttttgctttggttgtacatgaaaagttggtttcacgatgatttattgtgacctcccacatatgaggcaaatactgtcctaagacactatgtgcgagagcctgtgagctcattgtaacttcatggaatgtaattactatgtggttatgaatgggataaccaccttgaatgtgtacttttgttaattaaattattttaattaataa

SEQ ID NO: 12839 - DNA, 1702 bp, Homo sapiens
acaactgctaaagctccagagacacgagcgtgtgtggcagcaagagccgccagttcgggaccaccgcagctggggtggcagcggcgcaggaggggtcgcggggcgggagtggtgagcgcaggcggcaggggtctgggaaagacgaagtcgctatttgctgtctgagcgcgctcgcagctcctggaagtgttgccgcctctcggtttcgctctcgctcgctgcgctcctagaaggggcggccgcctccaggactgaccagggccaagtggcgctcggcgggcactacatggcggagggtgaagggtacttcgccatgtctgaggacgagctggcctgcagcccctacatccccctaggcggcgacttcggcggcggcgacttcggcggcggcgacttcggcggcggcgacttcggcggcggcgacttcggcggtggcggcagcttcggtgggcattgcttggactattgcgaaagccctacggcgcactgcaatgtgctgaactgggagcaagtgcagcggctggacggcatcctgagtgagaccattccgattcacgggcgcggcaacttccccacgctcgagctgcagccgagcctgatcgtgaaggtggtgcggcggcgcctggccgagaagcgcattggcgtccgcgacgtgcgcctcaacggctcggcagccagccatgtcctgcaccaggacagcggcctgggctacaaggacctggacctcatcttctgcgccgacctgcgcggggaaggggagtttcagactgtgaaggacgtcgtgctggactgcctgttggacttcttacccgagggggtgaacaaagagaagatcacaccactcacgctcaaggaagcttatgtgcagaaaatggttaaagtgtgcaatgactctgaccgatggagtcttatatccctgtcaaacaacagtggcaaaaatgtggaactgaaatttgtggattccctccggaggcagtttgaattcagtgtagattcttttcaaatcaaattagactctcttctgctcttttatgaatgttcagagaacccaatgactgagacatttcaccccacaataatcggggagagcgtctatggcgatttccaggaagcctttgatcacctttgtaacaagatcattgccaccaggaacccagaggaaatccgagggggaggcctgcttaagtactgcaacctcttggtgaggggctttaggcccgcctctgatgaaatcaaggcccttcaaaggtacatgtgttccaggtttttcatcgacttctcagacattggagagcagcagagaaaactggagtcctatttgcagaaccactttgtgggattggaagaccgcaagtatgagtatctcatgacccttcatggagtggtaaatgagagcacagtgtgcctgatgggacatgaaagaagacagactttaaaccttatcaccatgctggctatccgggtgttagctgaccaaaatgtcattcctaatgtggctaatgtcacttgctattaccagccagccccctatgtagcagatgccaactttagcaattactacattgcacaggttcagccagtattcacgtgccagcaacagacctactccacttggctaccctgcaattaagaatcatttaaaaatgtcctgtggggaagccatttcagacaagacaggagagaaaaaaaaaaaaaaaaaaaa

SEQ ID NO: 12840 - DNA, 4451 bp, Homo sapiens
ccgcgggcggggccggctggcgttcacgtgacccggcgtcattggctcgctcgcggaagtagtcctacattcgcggtcagcgcggggtctccgggcgccctgcagggcgggcaggctgtgccatcccgccggacgtcgggatggtgcagctgtacaacctgcacccgttcgggtcgcagcaggtggtgccctgcaagctggagccggaccggttctgtggcggggggcgtgacgcgcttttcgtggcggcgggctgcaaggtggaggcgttcgcggtggccggccaggagctgtgccagccgcggtgcgccttctccacgctgggccgggtgttgcgcctggcctacagcgaggctggagattatttggtagcaattgaagagaaaaacaaagctacatttctacgtgcttatgtgaactggagaaataaaaggactgaaaactctcgtgtgtgtatccgaatgattgggcataatgtggagggaccattcagcaaagccttcagagaccagatgtacattattgaaatgccgctttcggaggcccccttgtgcatttcctgttgccctgtgaaaggagaccttctcgttggctgcacaaataaattagtcttatttagtttgaagtaccagatcattaatgaggaattctcactattggactttgaacgttctttaattatacacatagataatatcactcctgttgaggtttctttttgtgttggatatgttgctgtcatgtcagacttagaagtcttaatcgtaaaactggagtcaggccctaaaaatggagagagagttcaccaccatccacataagaccaacaatcgaataagacggacagaagaaggcatcagtaatgaaatttcacagcttgagtcagatgattttgtcatctgccagaagcccctggaacttcttggtgaaaaaagtgaacagtctggattatctgttacactggagtctacgggattagctgatgaaaaaagaaaatattcccactttcagcacctgctctatagacgttttgctcctgatatttcgtcctatgtcttgtctgatgacatcaagctacattccctccagctgctacccatttaccagaccggttctcttacatctgatggaaaaaatttgtctcaggaaaaagaattgctgagtctcttttgctttttctccttacctcatgtgggctatctctacatggttgtcaaatctgttgaattgatgtcagtctaccagtatcctgaaaagtctcagcaggcagtactcacgccacaatttttgcacgtcattacaagtaacaacctgcagtgtttcactgtgcggtgcagtgcggcggcagctcgtgaggaggacccgtacatggacaccaccctgaaggcttgcccacctgtcagtatggatgtctgtgctttaagaatacagcttttcataggcttgaaagccatctgtcactttaaaaaccacatcatacttttgactaaagcagaacctgaagccattccagagagaagacagtcacccaagaggcttctttcgagaaaagataccagtgttaaaatcaaaatacctcctgtagctgaggctgggtggaatttgtatattgtgaatacgatctcaccagtgcagctgtacaaagagatggtagactatagcaatacctataagactgtcaaaacccagagctgcattcaccttctcagtgaggctcatctgttagtgcgagctgccctgatggatgccagtcagctggaacctggagagaaggcagagcttttggaagcatttaaggaaagctgtgggcaccttggggactgttacagcaggcttgactcccagcattctcatctcaccttgccatactataagatgtctggtttgtctatggctgaagttctggcccgcacggactggacagtagaggatggattacagaaatacgagagaggattaatcttttacattaatcattcactttatgaaaacctggatgaagaattaaatgaagaattagcagcaaaagtggttcagatgttttatgtggctgagccaaagcaagtgccccatattctctgtagtccttctatgaagaatattaatcctttaactgccatgagctatctaaggaagctggatacttctgggttttcatcgatcttagtgacattgaccaaggcagcagtggctctgaaaatgggagatcttgacatgcacagaaatgaaatgaaaagccattcagagatgaagttggtatgtggcttcattctggaacctcggctgttgattcaacagagaaagggacagattgttccaaccgagcttgcacttcacttgaaggaaactcagcctggattgcttgtggcttcagttctgggcttgcagaagaacaacaaaattggaattgaagaagcagattccttttttaaggtgctttgtgctaaggatgaagatacaattcctcagctcttggtagacttttgggaagctcagctagtggcatgtctcccagatgtggtacttcaggaactctttttcaaactcacatcacagtacatctggagattgtctaagaggcagcctcctgacaccacaccattgcgaacatcggaggatctgataaatgcctgtagtcattatggcttaatttatccatgggttcacgtcgtaatatcatctgattctttagctgataaaaattatacagaagatctttcaaaattacagtctcttatatgtggtccttcatttgacatagcttccattattccgttcttggagccactttcagaagacactattgccggcctcagtgtccatgttctgtgtcgtacacgcttgaaagagtatgaacagtgcatagacatactgttagagagatgcccggaggcagtcattccatatgctaatcatgaactgaaagaagagaaccggactctgtggtggaaaaaactgttgcctgaactttgtcagagaataaaatgtggtggagagaagtatcaactctacctgtcatcattaaaagaaacattgtcaattgttgctgtggaactagaactgaaggatttcatgaatgttctcccagaagatggtactgcaacatttttcttgccatatcttctctattgcagtcgaaagaaaccattgacttaaaggtatcatttgaaaaataccataatggcatttgagactgaatttctaaaaattgaatgccaaagtacaagtagaggagttttttattttatatatcacacacacacacacacacacacacacacacacacacatatatgatacaaatgctttcaggctgcttaccttaccgtgtagtggtaactattcacttcttaatttatgacctcaatcaatttaattgtctagaatgtaaaaagtctttaagacataagaattcctcaaagaagccatacattttttaaggtggggattgacttttattccaaggaacaacatcagttcactgttgttggagacatgacaatcattttcatcccaagaacactttaaggaaacattttacaagtatgcttgaaagaatgtcactaactggtccagaattttatcttcttgatttttccagatttctctatgtttttgagaaagatgttaatgttttgccatggtaaaagatttcaaacctcattttttttgttccttttcttgttacttttaagaaaactcatgctctgtttctctgaatcaaatgaagtagaagtttacaaagctaactttcttcttgtctagctattaacatgatttgtcaaatgcatgtttttttcagccaaagccttgtttccatttttgttgatgtgtactcttgctcttttagctagagtgtatgtgaaaataaagaaatacatcattgtattcacaaccatgtgtcttcatttataactttttgtttaaaaaatttttagttcaagtttagttcattgatattatcctctgaatgcagttaaggctgggcagaaattctactcatgtgacatctgccacaggtctattttgaagcttttcttctaatggcaatgtttgtccttaccaggatttaatctatagaattgtctctcaactctgcttttctccagttccagataacgtccttaagaccatctgttcaggggttcacaaaactcaaatttgtgtcattctattttatttattttattttttatttccttccctcataccttgcccattccctctgaatattaggtgtgatgtcaacagcatgttagaaggatcaatgggaaggcaatgattgaaaacatttcaatgaaccttaatagtgttcctttgaggagcacccaggagaatatctggtcatagatctttttttaaatgcagttttataaaaccctaacagcggtgatatcattagactgtatgaatcagttttattacctagtgtacaagtgtcagtcatgtatc

SEQ ID NO: 12841 - DNA, 5061 bp, Homo sapiens
atggctcagatatttagcaacagcggatttaaagaatgtccattttcacatccggaaccaacaagagcaaaagatgtggacaaagaagaagcattacagatggaagcagaggctttagcaaaactgcaaaaggatagacaagtgactgacaatcagagaggctttgagttgtcaagcagcaccagaaaaaaagcacaggtttataacaagcaggattatgatctcatggtgtttcctgaatcagattcccaaaaaagagcattagatattgatgtagaaaagctcacccaagctgaacttgagaaactattgctggatgacagtttcgagactaaaaaaacacctgtattaccagttactcctattctgagcccttccttttcagcacagctctattttagacctactattcagagaggacagtggccacctggattacctgggccttccacttatgctttaccttctatttatccttctacttacagtaaacaggctgcattccaaaatggcttcaatccaagaatgcccacttttccatctacagaacctatatatttaagtcttccgggacaatctccatatttctcatatcctttgacacctgccacaccctttcatccacaaggaagcttacctatctatcgtccagtagtcagtactgacatggcaaaactatttgacaaaatagctagtacatcagaatttttaaaaaatgggaaagcaaggactgatttggagataacagattcaaaagtcagcaatctacaggtatctccaaagtctgaggatatcagtaaatttgactggttagacttggatcctctaagtaagcctaaggtggataatgtggaggtattagaccatgaggaagagaaaaatgtttcaagtttgctagcaaaggatccttgggatgctgttcttcttgaagagagatcgacagcaaattgtcatcttgaaagaaaggtgaatggaaaatccctttctgtggcaactgttacaagaagccagtctttaaatattcgaacaactcagcttgcaaaagcccagggccatatatctcagaaagacccaaatgggaccagtagtttgccaactggaagttctcttcttcaagaagttgaagtacagaatgaggagatggcagctttttgtcgatccattacaaaattgaagaccaaatttccatataccaatcaccgcacaaacccaggctatttgttaagtccagtcacagcgcaaagaaacatatgcggagaaaatgctagtgtgaaggtctccattgacattgaaggatttcagctaccagttacttttacgtgtgatgtgagttctactgtagaaatcattataatgcaagccctttgctgggtacatgatgacttgaatcaagtagatgttggcagctatgttctaaaagtttgtggtcaagaggaagtgctgcagaataatcattgccttggaagtcatgagcatattcaaaactgtcgaaaatgggacacagaaattagactacaactcttgaccttcagtgcaatgtgtcaaaatctggcccgaacagcagaagatgatgaaacacccgtggatttaaacaaacacctgtatcaaatagaaaaaccttgcaaagaagccatgacgagacaccctgttgaagaactcttagattcttatcacaaccaagtagaactggctcttcaaattgaaaaccaacaccgagcagtagatcaagtaattaaagctgtaagaaaaatctgtagtgctttagatggtgtcgagactcttgccattacagaatcagtaaagaagctaaagagagcagttaatcttccaaggagtaaaactgctgatgtgacttctttgtttggaggagaagacactagcaggagttcaactaggggctcacttaatcctgaaaatcctgttcaagtaagcataaaccaattaactgcagcaatttatgatcttctcagactccatgcaaattctggtaggagtcctacagactgtgcccaaagtagcaagagtgtcaaggaagcatggactacaacagagcagctccagtttactatttttgctgctcatggaatttcaagtaattgggtatcaaattatgaaaaatactacttgatatgttcactgtctcacaatggaaaggatctttttaaacctattcaatcaaagaaggttggcacttacaagaatttcttctatcttattaaatgggatgaactaatcatttttcctatccagatatcacaattgccattagaatcagttcttcaccttactctttttggaattttaaatcagagcagtggaagttcccctgattctaataagcagagaaagggaccagaagctttgggcaaagtttctttacctctttgtgactttagacggtttttaacatgtggaactaaacttctatatctttggacttcatcacatacaaattctgttcctggaacagttaccaaaaaaggatatgtcatggaaagaatagtgctacaggttgattttccttctcctgcatttgatattatttatacaactcctcaagttgacagaagcattatacagcaacataacttagaaacactagagaatgatataaaagggaaacttcttgatattcttcataaagactcatcacttggactttctaaagaagataaagcttttttatgggagaaacgttattattgcttcaaacacccaaattgtcttcctaaaatattagcaagcgccccaaactggaaatggggtaatcttgccaaaacttactcattgcttcaccagtggcctgcattgtacccactaattgcattggaacttcttgattcaaaatttgctgatcaggaagtaagatccctagctgtgacctggattgaggccattagtgatgatgagctaacagatcttcttccacagtttgtacaagctttgaaatatgaaatttacttgaatagttcattagtgcaattccttttgtccagggcattgggaaatatccagatagcacacaatttatattggcttctcaaagatgccctgcatgatgtacagtttagtacccgatacgaacatgttttgggtgctctcctgtcagtaggaggaaaacgacttagagaagaacttctaaaacagacgaaacttgtacagcttttaggaggagtagcagaaaaagtaaggcaggctagtggatcagccagacaggttgttctccaaagaagtatggaacgagtacagtccttttttcagaaaaataaatgccgtctccctctcaagccaagtctagtggcaaaagaattaaatattaagtcgtgttccttcttcagttctaatgctgtccccctaaaagtcacaatggtgaatgctgaccctctgggagaagaaattaatgtcatgtttaaggttggtgaagatcttcggcaagatatgttagctttacagatgataaagattatggataagatctggcttaaagaaggactagatctgaggatggtaattttcaaatgtctctcaactggcagagatcgaggcatggtggagctggttcctgcttccgataccctcaggaaaatccaagtggaatatggtgtgacaggatcctttaaagataaaccacttgcagagtggctaaggaaatacaatccctctgaagaagaatatgaaaaggcttcagagaactttatctattcctgtgctggatgctgtgtagccacctatgttttaggcatctgtgatcgacacaatgacaatataatgcttcgaagcacgggacacatgtttcacattgactttggaaagtttttgggacatgcacagatgtttggcagcttcaaaagggatcgggctccttttgtgctgacctctgatatggcatatgtcattaatgggggtgaaaagcccaccattcgttttcagttgtttgtggacctctgctgtcaggcctacaacttgataagaaagcagacaaacctttttcttaacctcctttcactgatgattccttcagggttaccagaacttacaagtattcaagatttgaaatacgttagagatgcacttcaaccccaaactacagacgcagaagctacaattttctttactaggcttattgaatcaagtttgggaagcattgccacaaagtttaacttcttcattcacaaccttgctcagcttcgtttttctggtcttccttctaatgatgagcccatcctttcattttcacctaaaacatactcctttagacaagatggtcgaatcaaggaagtctctgtttttacatatcataagaaatacaacccagataaacattatatttatgtagtccgaattttgtgggaaggacagattgaaccatcatttgtcttccgaacatttgtcgaatttcaggaacttcacaataagctcagtattatttttccactttggaagttaccaggctttcctaataggatggttctaggaagaacacacataaaagatgtagcagccaaaaggaaaattgagttaaacagttacttacagagtttgatgaatgcttcaacggatgtagcagagtgtgatcttgtttgtactttcttccaccctttacttcgtgatgagaaagctgaagggatagctaggtctgcagatgcaggttccttcagtcctactccaggccaaataggaggagctgtgaaattatccatctcttaccgaaatggtactcttttcatcatggtgatgcatatcaaagatcttgttactgaagatggagctgacccaaatccatatgtcaaaacatacctacttccagataaccacaaaacatccaaacgtaaaaccaaaatttcacgaaaaacgaggaatccgacattcaatgaaatgcttgtatacagtggatatagcaaagaaaccctaagacagcgagaacttcaactaagtgtactcagtgcagaatctctgcgggagaattttttcttgggtggagtaaccctgcctttgaaagatttcaacttgagcaaagagacggttaaatggtatcagctgactgcggcaacatacttgtaa

SEQ ID NO: 12842 - DNA, 3028 bp, Homo sapiens
gaatgtgtggagatcaggtgatgcagaactctggtaaaggatgttagtcttcagagtaagactgttaaattcagcaaagtctactatcagaagacacgtttttctggttggtgtattactttattcagtgataatatgaaaattactatcttcactgaaggatctactgaataatcattttaactcaactatattgcattcttgaaagcaatcctttcaattgatctactgacttcacaatgtctgaaatcagattcaccaatctcacttgggatcaagttataacactggatcaagtgttagatgaagtaattccaattcatggaaaggggaatttccccacaatggaggtaaaaccaaaagacatcattcatgttgtgaaagatcaactcatagggcaaggaattattgttaaagatgccagattgaatggttccgtagcaagttacatacttgcaagccacaatggaatcagctataaggatctggacgttatttttggtgttgagcttccaggtaacgaagaatttcaggttgttaaagatgcagttctagactgtctacttgactttttaccaaaagatgtaaagaaggaaaagctctccccagatatcatgaaagacgcttacgtacagaaattggtcaaggtttgcaatgggcatgattgttggagtcttatctccctttcaaataacactgggaagaatttagaactaaaatttgtgagttcactcagacggcagtttgaatttagtgtagattcctttcaaattgttttggatcccatgttagacttctacagtgacaaaaatgccaagctaaccaaagaatcctatcctgttgtggtagctgaaagcatgtatggagacttccaggaagcaatgacacatttgcaacacaagctcatatgtaccaggaaacctgaagagattagaggtggtggccttctgaagtactgcagcttgctggttcatggcttcaagccagcctgtatgtcagaaatcaaaaacctagaacgttatatgtgctctagattctttattgattttcctcatatagaagaacagcaaaagaaaattgaatcatacctccacaaccatttcataggtgaaggaatgaccaagtatgactaccttatgaccttgcatggagttgtgaatgaaagcactgtttgcctcatgagttatgaaagaagacagattctccacctgatcaccatgatggctttgaaagtacttggagaactaaatattctacccaatacacaaaaggtaacttgcttttatcagcctgctccgtactttgcagctgaggcaaggtaccctatttatgtaatacctgagccaccccccgttagcttccagccataccacccactgcactttcgtggatcaaatggtatgagttaaaaaatacacatgcaaccatagaaactttgatttaattaaacaccatttaaaagcaagtttccaaatgtaaaattcaagatctgtttttatttttgtacagttaccaattattttcaattacagttgatggaatagtagttaccaactatttttgatcaattaagccatcatagtaaatacaatatctataaaccaaccactttaaatgtttttcaaacgttattgactagctataataactttcaaatgttgtgttccccttgaagtgattttcaaatcttttgactacttgtgactttcaaatttactgtgacaaatatattagagatgcctgcatctttgactataacataaaaggacagattcatgttttaaaattaagatgtacagtgaagtatcaaattttttatattcagtcagttcctttgttacatttagttctttttttctattgaacaataccatcaataaatgttcagtacttaacagaaatgcctaatttcaaaagcaacagattcagaagacattaaaaccctggacttttcaagcatttttttttgacaattaaattgggttggatacaaaaatcctactatagtttaaaggaatactggaaaaaaatggttctggaaagccctggacattagtaatttgtcatctatataataaaacatttagttaatttgtggatttgaataacaataccatacagctgtgcaactactactgagatcagatacagggttttttgcccctcaaaataagttaaaacgaatgaaaatgaccagctctgaatgtgaaagctttctatcatcatctactacaaagagactctaaatggcaaacaggaaaaaaacaggcagaggtttatagccatagcatttaccattttatggcttatttgaaaaacatctttatgttgagaaacattccatttcagtaagttaaaatattttcattgtaactaaatgaagcaggtttttcattttgcctttaccaaagatcattttctaacatgccactcaagtgcctcttcgtgtgaatttttgcgtaacactataatttattcaacaactgtatacctttacagtatatctaaatatatacttactacatcgagtatactgctagaaaaatctaccagtgggattaaaaatgtattttcttcccataatgaaaataattcatgaccaatattacctgaagtgtcagaagaggagctgtcttaaattaatatggatcaggccattggaaaacttcagtatttccacttggttatgattttttgtgagtttccatttcagtttttattgaccatcacgttttctatcacaacatgacctgacagttgtatcccgataatttgccagttatagactgtgcttatcttcactgtattacaatattggacagaagtacaccaaatacggcattttcaaataaccaatatttctgagatgttttataccacagcacaagtggccatcagtatatttttaaagaattatatatcacagaaccctgaggctttaaaacactatggacttaccactttcttgacaaagaatttgtaattacaataaaatatttagaaatgaaaggcaaaaaaaaaaaaaaaa

SEQ ID NO: 12843 - DNA, 2407 bp, Homo sapiens
ccagtgcccccaattcgcgctcgggagtgaggagccgccaacaccccagctccgctgctgccgccaccgcagtgctctctagtcgccattggttacctaaactttccagtacccgcgacctttccgggactccgcggcggcggggcagaggcggcccaggggcggcacgcggctgctccggtgcgccgggctcttttcggccgccgcacggccgggcctcacaggctgccctcctgagagaggctcagaacacggccaggtacgcgccgccgccacagttgcgctgctagcgacgaggtgttttcctctgctggcacgccagaatccctggttcagcctggaaggcgaggggcaggactccccagacagtggcctcagtgtggcattgatgtcctaggttgtaaggtgctaaggggaatgccagctgttctcttaacagaagggcagtttttgaagaaatgaagcaggacttgatgtggattgtcataaactgtttctccctaaagaggctggtccccacagacggcttgccatttctatgactggatgctgagaagcctgctggttcagaggtccacacatgaagttaccataaagagggtggttccaacttcatcaatacctcatcgccatgaggtgaggctaagatgagcataaccagtgacgaggtgaactttctggtttatcggtatctccaggagtcaggtttttctcactcggctttcacgtttgggatcgagagccacatcagccagtccaacatcaatgggacactagtgccaccgtctgccctcatctccattctccagaagggactgcagtatgtagaggctgagataagcatcaacaaggatggcacagtgttcgacagccgccctatagagtccctgtccctgatagttgctgtgattcctgatgtggtgcagatgcggcagcaggcatttggagagaagctcactcagcagcaagccagtgcagcagccacagaggcatcagcaatggcaaaggcggcaaccatgaccccagctgctatttcccagcaaaatcctccaaagaaccgagaggccacagtgaacggggaagagaatggagcacatgaaatcaataatcactcaaagccaatggaaatagatggggatgttgagattccacccaacaaagccacagtccttcggggccacgagtctgaggtgttcatttgtgcctggaaccctgtcagtgatttgctagcctctggatctggagactcaactgcaaggatatggaacctgaatgagaatagcaacgggggctccacccagctcgtgttgagacattgtatacgagaaggggggcacgacgtcccaagtaataaagatgtcacctcactggactggaacagtgatggaacactattggctatgggttcatatgatggtttcgcaagaatatggacagaaaatggtaacctggccagcaccttaggccaacataaaggccccatcttcgctctgaaatggaacaaaaaggggaattatgttttgagtgctggtgtagacaaaacaacaataatttgggatgctcacacaggagaagccaaacagcagtttccttttcattcagcccccgcccttgatgtggactggcagaacaacatgacctttgcctcctgtagcacagacatgtgtatccatgtgtgcaggctcggctgtgaccacccagtcaaaaccttccagggacacacaaacgaggtcaatgccatcaaatgggatccttctggaatgttgctggcgtcctgctcggatgacatgacattgaagatctggagtatgaagcaggatgcatgcgtccacgatcttcaggctcacagcaaagagatctacaccatcaagtggagccccaccgggcctgccaccagcaacccaaactccagcatcatgttggcaagtgcttcatttgattctacagtgcgactgtgggatgtggagcaaggtgtctgcacccacacactcatgaagcatcaagagcctgtctacagtgtagctttcagccccgatggaaagtacttggctagtggatcctttgacaagtatgttcatatctggaatactcagagtggaagtctcgtccacagctaccaaggcactggcggtatcttcgaggtgtgctggaacgcccgaggagataaagtgggcgccagcgcgtctgatggctctgtgtgtgttctggatctgtgaaagtaaacacaaaatatagaaaaaaagaaaagaattctaatgacctgccttgaatgcatggggttgcagctctgttcaaacacaattctatcagctccaaaatgtgtgaacttgacttgtgttagagtatattctgaaaccaacttgtcccaggccacaggagtgtatatgtttcataatctttatcaaga

SEQ ID NO: 12844 - DNA, 2376 bp, Homo sapiens
ccagtgcccccaattcgcgctcgggagtgaggagccgccaacaccccagctccgctgctgccgccaccgcagtgctctctagtcgccattggttacctaaactttccagtacccgcgacctttccgggactccgcggcggcggggcagaggcggcccaggggcggcacgcggctgctccggtgcgccgggctcttttcggccgccgcacggccgggcctcacaggctgccctcctgagagaggctcagaacacggccaggtacgcgccgccgccacagttgcgctgctagcgacgaggtgttttcctctgctggcacgccagaatccctggttcagcctggaaggcgaggggcaggactccccagacagtggcctcagtgtggggaatgccagctgttctcttaacagaagggcagtttttgaagaaatgaagcaggacttgatgtggattgtcataaactgtttctccctaaagaggctggtccccacagacggcttgccatttctatgactggatgctgagaagcctgctggttcagaggtccacacatgaagttaccataaagagggtggttccaacttcatcaatacctcatcgccatgaggtgaggctaagatgagcataaccagtgacgaggtgaactttctggtttatcggtatctccaggagtcaggtttttctcactcggctttcacgtttgggatcgagagccacatcagccagtccaacatcaatgggacactagtgccaccgtctgccctcatctccattctccagaagggactgcagtatgtagaggctgagataagcatcaacaaggatggcacagtgttcgacagccgccctatagagtccctgtccctgatagttgctgtgattcctgatgtggtgcagatgcggcagcaggcatttggagagaagctcactcagcagcaagccagtgcagcagccacagaggcatcagcaatggcaaaggcggcaaccatgaccccagctgctatttcccagcaaaatcctccaaagaaccgagaggccacagtgaacggggaagagaatggagcacatgaaatcaataatcactcaaagccaatggaaatagatggggatgttgagattccacccaacaaagccacagtccttcggggccacgagtctgaggtgttcatttgtgcctggaaccctgtcagtgatttgctagcctctggatctggagactcaactgcaaggatatggaacctgaatgagaatagcaacgggggctccacccagctcgtgttgagacattgtatacgagaaggggggcacgacgtcccaagtaataaagatgtcacctcactggactggaacagtgatggaacactattggctatgggttcatatgatggtttcgcaagaatatggacagaaaatggtaacctggccagcaccttaggccaacataaaggccccatcttcgctctgaaatggaacaaaaaggggaattatgttttgagtgctggtgtagacaaaacaacaataatttgggatgctcacacaggagaagccaaacagcagtttccttttcattcagcccccgcccttgatgtggactggcagaacaacatgacctttgcctcctgtagcacagacatgtgtatccatgtgtgcaggctcggctgtgaccacccagtcaaaaccttccagggacacacaaacgaggtcaatgccatcaaatgggatccttctggaatgttgctggcgtcctgctcggatgacatgacattgaagatctggagtatgaagcaggatgcatgcgtccacgatcttcaggctcacagcaaagagatctacaccatcaagtggagccccaccgggcctgccaccagcaacccaaactccagcatcatgttggcaagtgcttcatttgattctacagtgcgactgtgggatgtggagcaaggtgtctgcacccacacactcatgaagcatcaagagcctgtctacagtgtagctttcagccccgatggaaagtacttggctagtggatcctttgacaagtatgttcatatctggaatactcagagtggaagtctcgtccacagctaccaaggcactggcggtatcttcgaggtgtgctggaacgcccgaggagataaagtgggcgccagcgcgtctgatggctctgtgtgtgttctggatctgtgaaagtaaacacaaaatatagaaaaaaagaaaagaattctaatgacctgccttgaatgcatggggttgcagctctgttcaaacacaattctatcagctccaaaatgtgtgaacttgacttgtgttagagtatattctgaaaccaacttgtcccaggccacaggagtgtatatgtttcataatctttatcaaga

SEQ ID NO: 12845 - DNA, 2312 bp, Homo sapiens
ccagtgcccccaattcgcgctcgggagtgaggagccgccaacaccccagctccgctgctgccgccaccgcagtgctctctagtcgccattggttacctaaactttccagtacccgcgacctttccgggactccgcggcggcggggcagaggcggcccaggggcggcacgcggctgctccggtgcgccgggctcttttcggccgccgcacggccgggcctcacaggctgccctcctgagagaggctcagaacacggccaggtacgcgccgccgccacagttgcgctgctagcgacgaggtgttttcctctgctggcacgccagaatccctggttcagcctggaaggcgaggggcaggactccccagacagtggcctcagtgtggcattgatgtcctaggttgtaaggtgctaaggctggtccccacagacggcttgccatttctatgactggatgctgagaagcctgctggttcagaggtccacacatgaagttaccataaagagggtggttccaacttcatcaatacctcatcgccatgaggtgaggctaagatgagcataaccagtgacgaggtgaactttctggtttatcggtatctccaggagtcaggtttttctcactcggctttcacgtttgggatcgagagccacatcagccagtccaacatcaatgggacactagtgccaccgtctgccctcatctccattctccagaagggactgcagtatgtagaggctgagataagcatcaacaaggatggcacagtgttcgacagccgccctatagagtccctgtccctgatagttgctgtgattcctgatgtggtgcagatgcggcagcaggcatttggagagaagctcactcagcagcaagccagtgcagcagccacagaggcatcagcaatggcaaaggcggcaaccatgaccccagctgctatttcccagcaaaatcctccaaagaaccgagaggccacagtgaacggggaagagaatggagcacatgaaatcaataatcactcaaagccaatggaaatagatggggatgttgagattccacccaacaaagccacagtccttcggggccacgagtctgaggtgttcatttgtgcctggaaccctgtcagtgatttgctagcctctggatctggagactcaactgcaaggatatggaacctgaatgagaatagcaacgggggctccacccagctcgtgttgagacattgtatacgagaaggggggcacgacgtcccaagtaataaagatgtcacctcactggactggaacagtgatggaacactattggctatgggttcatatgatggtttcgcaagaatatggacagaaaatggtaacctggccagcaccttaggccaacataaaggccccatcttcgctctgaaatggaacaaaaaggggaattatgttttgagtgctggtgtagacaaaacaacaataatttgggatgctcacacaggagaagccaaacagcagtttccttttcattcagcccccgcccttgatgtggactggcagaacaacatgacctttgcctcctgtagcacagacatgtgtatccatgtgtgcaggctcggctgtgaccacccagtcaaaaccttccagggacacacaaacgaggtcaatgccatcaaatgggatccttctggaatgttgctggcgtcctgctcggatgacatgacattgaagatctggagtatgaagcaggatgcatgcgtccacgatcttcaggctcacagcaaagagatctacaccatcaagtggagccccaccgggcctgccaccagcaacccaaactccagcatcatgttggcaagtgcttcatttgattctacagtgcgactgtgggatgtggagcaaggtgtctgcacccacacactcatgaagcatcaagagcctgtctacagtgtagctttcagccccgatggaaagtacttggctagtggatcctttgacaagtatgttcatatctggaatactcagagtggaagtctcgtccacagctaccaaggcactggcggtatcttcgaggtgtgctggaacgcccgaggagataaagtgggcgccagcgcgtctgatggctctgtgtgtgttctggatctgtgaaagtaaacacaaaatatagaaaaaaagaaaagaattctaatgacctgccttgaatgcatggggttgcagctctgttcaaacacaattctatcagctccaaaatgtgtgaacttgacttgtgttagagtatattctgaaaccaacttgtcccaggccacaggagtgtatatgtttcataatctttatcaaga

SEQ ID NO: 12846 - DNA, 4265 bp, Homo sapiens
agggcagaggacacccagttggtggccgggagggcctcggctttccagggacagaggcccaactccaggacgccccagctggcccagcccctcctctttccctcaaggctgcaggaggtcgggaaaggcagtcctggtagaggcctgtcctgggctccaggttggcccctgagggtggccctcctcatgccggcttcaagactgagggacagggcagccagttcagcctcgggatccacctgtggctccatgtcccagacgcaccctgtgctggagagcggcctcctggcatctgccggctgctccgcaccccggggtcccaggaagggcggcccagccccagtggacaggaaagctaaggcctcagcgatgccggactccccagcggaggtgaagacgcagccccggtccacaccccccagcatgccgcccccaccgcctgccgcatcccagggggccacacgccccccctccttcacgccacacacacatcgagaggacgggcctgcgacgctgccccacggccgttttcatggctgcttaaaatggtctatggtctgtctcttgatgaacggcagcagccactcaccaacagccatcaatggtgcaccgtgcacacccaacggcttcagcaatggcccggccacctcgtccacagcctccttgtccacacagcacctgcccccagcctgcggggcccggcagctcagcaagctcaagcgcttcctcaccacactgcagcagtttggcagcgacatctccccagagattggggagcgcgtgcgcacactggtgctgggcctggtgaactcgacattgacgatcgaggagtttcattccaagcttcaggaggccaccaacttccctctgcggccgtttgtcattcccttcctgaaggcaaacctgcccttgctgcagcgggagctcctgcactgtgcacgcctggccaagcagacgcccgcccagtacttggcccagcatgagcagctcctgctggacgccagcgcctcctcccccatcgactcctcagagctgctactggaagtcaacgagaacggcaagaggaggacgcccgacaggaccaaagagaacgggtcagaccgcgacccgctgcaccccgagcacctcagcaaacggccatgcaccctgaaccctgcccagcgctacagccccagcaacgggccaccgcagcccacaccgccgccgcactaccgcctggaggacatagccatggcccaccacttccgagatgcctaccgccacccagacccccgggagctacgagagcgccatcggccgcttgtggtgcctgggtcccggcaggaagaagtgatcgaccacaagctcacagagcgtgagtgggcagaagagtggaagcacctcaacaacctcctgaactgcatcatggacatggtggagaagacgcggcgctcgctcacggtgctgcgcaggtgccaggaggccgaccgcgaggagctcaaccactgggcgcggcgctacagcgacgccgaggacacaaagaagggccccgctcccgccgcggcccggccccgcagcagctccgccggtcccgaagggcctcagctagacgtgcctcgcgagttcctgccgaggaccctcaccggctacgtgcctgaggacatctggaggaaggctgaagaggccgtgaatgaggtgaagcggcaggccatgtcggagctgcagaaagccgtgtcggacgcggagcgcaaagcgcacgagctcatcaccacggagcgtgccaagatggagcgggccctggccgaggcgaagcggcaggcctccgaggacgccctgacggtcatcaaccagcaggaggactccagcgagagctgctggaactgcgggcggaaagccagtgagacgtgcagcggctgcaacgcggcacgctactgcgggtccttctgccagcatcgggactgggagaagcatcaccacgtgtgtggccagagcctgcagggccccacagccgtggtggccgacccggtgcctggaccgcccgaagccgcccacagcctgggcccctccctgcctgtgggtgctgccagccccagcgaagccggctctgcggggccttctcgccccggctcccccagcccacctggcccactggacaccgtgccccgctgaccccactggcccctggcctgccggacacagcaccgtgccaaccccacccagctccaggcccaccggatgctgtgcctggcctccgatgcctggcctgccagacactgcgccccgcctgacctgggggagccgaccaattagtcactgctgctactgcccctctccgaaagaagacacagaaccaacaaaaccgcattcagtgcacctgcctcagctacctaatgattccgcgcggagacctcctgacaacgtctcttcaagcatcctcagaagcctcgactgagctttagacagcagagcagatgccgcaggcgcggcggctctgcccacctctcttttcctctctgtctgtctctccccctctgtcttctctatcctctctctctctatgactatcacacactttctcttcaatgaaaaaatcgaattggtggcttatattttcagcaaagaattttggggggttttgtgtgttggcaaaagagctactcagaaatggacaaagaaaacgggggggttctccccctcctgattaaaaagggagaaagaaaactgcgattttatagctggagatctgaacccagctgtgcccctcccccaggggcgtgaggctgatcagcgaagacgggaggaaagatttcgatttctgactcaagatgcatttttggtttcagatttttttttcctgtaatgttaaactctttggctttaagtaaaaatccaaaaagtttttttaaaaaagcaaaggaagcatacttgtgaactaccttgctagctagccagccaaggataccggacacacctctgctccaaaggaaatccaaaaaagcaaacacaagaaatcaaaatccaaaatttgtttgtcactgccaaagtatttttttcactgtttcacttgctcttgggtttgtttggatgtgggtctttttctcttctgttctgattttgtttgtgggtgtcgggatatttgggtgcagagggtttgtgcccagttagaagcgacttttgttctcttctgcgtaggcgttggtgcgtccgccgcgtgtgcgtggtccgtgtgccgttgctccggcctgcgtctccatatgtgtaggaaaggacacgccgtctgtcctcacgccccctgtgacttttcatatttccgttttccacttgtggaaaaaaagtgctaaagttttcttcccagagagagcataattccgaaacaaaactgtgacaatcttttgggttgattctcgactgcttttcgagcatgcggagccagcaggcctccctgaaacactgcttctcggccagcccgtcctcctctacctctctcctctccgcgccctccgacctctctcggccccctcaccccagctccgacctctctcagccccatcgccccaactccaacctctcggccccatcgccccaccgcagctactcccctttcttccaaacttttgcagaaaaaacaaaaaaactacaaacaaaagcagccctctgcctcctccccagggaagaccctgaccgtgtacatagccctggtgctcctgcccagccacccctcagatgcgttcgcctctggccctggggtgtgtctcggtgacgttttctatcagacgtgctccctcccatcctccagccctgcccaccctccctccactcctctcaactgcctcagcgatttcaagaaggaaataaagggataaagaaattcatgcttgcaccgagtacaaggacagacagcaggcacggcccgcagcctggcatctgtgcgtgtggcgtggcccgtggcttggcatctgtgtgcgtggtgtggcccgtggcctggcatctgtgtgcgtggcgtggcccgtggcctggcatctgtgtgtgtggcgtggcccgtggcctggcatctgtgcgcgtggcgtggcccgtggcctggcatctgtgtgcgtggctatcaggagttctaggaactcagtgcaatacgggagtgacccagctactgaaccagccacgaacagcccgccagaggcctgaagctgagcgtgtacgttaatgtgaatgtatatagtctttgcagaggtccaaatgatattcatgatggtaataaacgagatgtttgccaaataaaaaacagaaaccgc

SEQ ID NO: 12847 - DNA, 5560 bp, Homo sapiens
ctagatcgaaagtcctttggtaatgatgtgtcatacattctagtcatcaaagacaccattttctgggcctgaagtgttctgctggtttttggaggaatgagaatccaatctctcataagccggattcagaaaataggtcatcgatgaaacatctgtatggattatttcactataatcctatgatgcttggacttgaatcacttccagatcccacagacacctgggaaattatagagaccattggtaaaggcacctatggcaaagtctacaaggtaactaacaagagagatgggagcctggctgcagtgaaaattctggatccagtcagtgatatggatgaagaaattgaggcagaatacaacattttgcagttccttcctaatcatcccaatgttgtaaagttttatgggatgttttacaaagcggatcactgtgtagggggacagctgtggctggtcctggagctgtgtaatgggggctcagtcactgagcttgtcaaaggtctactcagatgtggccagcggttggatgaagcaatgatctcatacatcttgtacggggccctcttgggccttcagcatttgcacaacaaccgaatcatccaccgtgatgtgaaggggaataacattcttctgacaacagaaggaggagttaagctcgttgactttggtgtttcagctcaactcaccagtacacgtctgcggagaaacacatctgttggcaccccattctggatggcccctgaggtcattgcctgtgagcagcagtatgactcttcctatgacgctcgctgtgacgtctggtccttggggatcacagctattgaactgggggatggagaccctcccctctttgacatgcatcctgtgaaaacactctttaagattccaagaaatcctccacctactttacttcatccagaaaaatggtgtgaagaattcaaccactttatttcacagtgtcttattaaggattttgaaaggcgaccttccgtcacacatctccttgaccacccatttattaaaggagtacatggaaaagttctgtttctgcaaaaacagctggccaaggttctccaagaccagaagcatcaaaatcctgttgctaaaaccaggcatgagaggatgcataccagaagaccttatcatgtggaagatgctgaaaaatactgccttgaggatgatttggtcaacctagaggttctggatgaggatacaattatccatcagttgcagaaacgttatgcagacttgctaatttacacatatgttggagacatcttaattgccttaaaccccttccagaatctaagcatatactctccacagttttccagactttatcatggggtgaaacgcgcctccaatcccccccacatatttgcatcagcagatgctgcttaccagtgcatggttactctcagcaaagaccagtgcattgtcatcagcggagagagtggctctgggaagacagaaagcgcccacctgattgttcaacatttgactttcttgggaaaggccaataatcagaccttgagagagaaaattctacaagtcaactccctggtggaagcctttgggaactcatgcactgccatcaatgacaactcgagccgttttggaaaatatctggaaatgatgtttacaccaactggagttgtgatgggggcaagaatctctgaatatctcctggaaaaatccagagttataaaacaggcagcgagagagaaaaattttcatatattttactatatttatgctggtcttcatcaccaaaagaagctttctgatttcagacttcctgaggaaaaacctcctaggtacatagctgatgaaactggaagggtgatgcacgacataacttccaaggagtcttacagaagacaattcgaagcaattcagcattgcttcaggattatagggttcacggacaaagaggtgcactcagtgtacagaattttggctgggattttgaatattgggaacattgagttcgcagctatttcctctcaacatcagactgataaaagtgaggtgcccaatgctgaagctttgcaaaatgctgcctctgttctgtgcattagccctgaagagctccaggaggccctcacctcccactgtgtggtcacccggggcgagaccatcatccgtgccaacactgtagacagggctgcggacgttcgagacgccatgtccaaagccctgtatgggaggctcttcagctggattgtgaatcgcattaatacactcctgcagccagacgaaaacatatgtagtgcaggaggtggaatgaatgtggggatcttggatatctttggattcgagaattttcagagaaattcatttgagcagctctgcataaacatcgccaatgagcaaatccagtactatttcaatcagcatgtttttgctcttgagcagatggaatatcagaatgaaggcattgatgctgtacccgtggaatatgaggacaaccgcccgctcttggacatgttcctccagaaacccctgggactgcttgcacttttggatgaggaaagtcggtttccccaagcaactgaccagaccctggttgataaatttgaagataatctacgatgcaaatacttctggaggcccaaaggagtggaactgtgctttggcattcagcattatgctggaaaggtattatatgatgcttctggggttcttgagaaaaatagagacactctccctgccgatgtggttgtggtcctgagaacgtcagaaaacatgcttcttcagcagctcttctcaatccctctgaccaaaacaggtaatttggcccagacaagagctaggataacagtggcctcaagttctttgcctccacatttcagtgctgggaaagccaaggtggacactctggaggtgatacggcatccggaagaaaccaccaacatgaagaggcaaactgtggcttcttacttccggtattctctgatggacctgctctccaaaatggtggttggacagccccactttgtgcgctgcattaaacccaatgatgaccgagaggccctgcagttctctcgagagagggtgctggcccagctccgctccacagggattctggagacagtcagcatccgccgccagggctattcccaccgcatcctttttgaagaatttgtgaaaaggtattattacttggcattcacagcacatcaaacacctcttgctagcaaagagagctgtgtggctatcttggaaaagtccagattagatcactgggtgctgggaaaaacaaaggtttttctcaaatattaccatgttgagcaattaaatttgctgcttcgagaagtcataggcagagtggttgtgctgcaggcatataccaaggggtggcttggagccaggagatacaaaaaggtcagagagaagagagagaagggagccattgccatccagtcagcctggagaggatatgatgctcggaggaaatttaagaaaataagcaacagaaggaatgagtctgctgctcataatcaagcaggggacacttcaaaccaaagcagtgggccacattcccccgtcgcagcaggtacgaggggaagtgccgaggttcaagactgcagcgagcctggtgaccataaagttctcaggggctctgtacatcgtaggagccattcacaagcagaatccaacaatggccgtacacagacttcaagcaactctcctgctgtcacagagaaaaatgggcattcacaagcccagagttctccaaaagggtgcgatatcttcgcaggacatgcaaacaagcactcggtttctgggactgatttgctgtcttctcggatatgccatcctgctccagatcagcaaggattgagtctctggggagcccctcaaaagcctgcctttccacattacggatgtaacttttatgggttcagaaaatggtcttgcacagaagcatcgaacacctcgccgacgatgtcagcagcccaaaatgctgagtagccctgaggacaccatgtactataaccagttaaatggaactctagaatatcaagggagcaagaggaagccaagaaaacttggccaaatcaaagtacttgatggggaagatgaatattacaaatctctgtcaccagtggactgtatccctgaggagaacaactcagcccacccttcctttttttcttcatcctcaaaaggagactcttttgctcaacattaaattgtgcttcctaaccctaaatctgtccagagtaggaacattcatggtaatcgactgtctgtcattgcgtaagaaagcactgatatggggtcagcttctttggacatatggtccatgcctgaaccttactgaaccacttgcagattccaaaacatcttatcctatcctctaccactctcccacatgtgttgtgcagcctgagctgggcgctgccttcctttctcatcccatggggccctgtgggacactgagaacacctttacaatagtttaaacagtcattcatgcccccagtgtctaggaagataacagccagtctcaccccagtctaatcatggaccctgataatattgcttgatttttcctatcaagttacttttcaatccattcagaatctgccccagtggagacccaggagttcctttcctgcactcttctccatcctcccacctttgctgggcttttctatcactcccacctcccccagagtcagggctccattgctgagtgccccatcctggaggattggccccaagatctcctagaacaggataattgcctgtgtttaggcagataggcctaaatctttcagattctttctacaaggcaaataacccctctcttgttaattatgatgctgagaaagcctctgtctctttatttcaccttgccaagacacccacactactttggtgatgaaaagaaaggaatgagagggaaagtttggacctgtcactttggtgacagggaaagtccaggtcactttattctgtaactctccattcactggtcaaataactccatgaggctatcagtggctacagtggaaggacctgatcttgtccatctttgtgtgcacagagcctagcacagggcttggtagagggtatatctagtgaatggagaatacatggagaaacttaactaagttacacaagcatatctgacaggaatgttaccttcaattgtatgttacatatgattagtcacttttcatacactataacctctgatttttcactcaagtttgggctgattatattgtaatgatgttagataatactcaacatgattcagtatgacaaacttttttgagcacctactttatataaaacatgacaaattgcagtgtgatgtaatcaaaaacaaagaagccctataagaccatttctctagaacagatgttcttaatatttttcttactctaaaatatgtggtagatagtatgcaagaaaagccgggtgcggtggctcaggcctgtaatcccagcactttgggaggccaagatgggcggatcatgaagtcaggagttcgagaccagcctgaccaacatggtgaaaccccgtctctactaaaaaaaa

SEQ ID NO: 12848 - DNA, 6762 bp, Homo sapiens
gaatggaaaatggcggcctagacgcggagtttcctgcccgacccgcggcggctccggcggcgccatgacgcgctgggtgcccaccaagcgcgaggagaagtacggcgtggctttttataactatgatgccagaggagcggatgaactttctttacagatcggagacactgtgcacatcttagaaacatatgaagggtggtaccgaggttacacgttacgaaaaaagtctaagaagggtatatttcctgcttcatatattcatcttaaagaagcgatagttgaaggaaaagggcaacatgaaacagtcatcccgggtgacctccccctcatccaggaagtcaccacgacactccgagagtggtccaccatctggaggcagctctacgtgcaagataacagggagatgtttcgaagtgtgcggcacatgatctatgaccttattgaatggcgatcacaaattctttctggaactctgcctcaggatgaactcaaagaactgaagaagaaggtcacagccaaaattgattatggaaacagaattctagatttggacctggtggttagagatgaagatgggaatattttggatccagaattaactagcacgattagtctcttcagagctcatgaaatagcttctaaacaagtggaggaaaggttacaagaggaaaaatctcaaaagcagaacatagatattaacagacaagccaagtttgctgcaaccccttctctggccttgtttgtgaacctcaaaaatgtggtttgtaaaataggagaagatgctgaagtcctcatgtctctatatgaccctgtggagtccaaattcatcagtgagaactacctggttcgctggtccagttcaggattacctaaagacatagacagattacataatttgcgagccgtgtttactgacctcggaagcaaagacctgaaaagggagaaaatcagttttgtctgtcagattgttcgcgtgggtcgcatggagctgagggacaacaacaccaggaaactgacctcggggttgcggcgaccttttggagtggctgtgatggatgtaacagatataataaatggaaaagtagatgatgaagataagcagcatttcattccctttcagccggtggcaggggagaatgacttccttcagactgttataaacaaagtcatcgctgccaaagaagtcaaccacaaggggcagggtttgtgggtaacattgaaattacttcctggagatatccatcagatccgaaaagagtttccgcatttagtggacaggaccacagctgtggctcgaaaaacagggtttccggagataatcatgcctggtgatgttcgaaatgatatctatgtaacattagttcaaggagattttgataaaggaagcaaaacaacagcgaagaacgtggaggtcacggtgtctgtgtacgatgaggatgggaaacgattagagcatgtgattttcccgggtgctggtgatgaagcgatttcagagtacaaatctgtgatttactaccaagtaaagcagccacgctggtttgagactgttaaggtggccattcccatcgaggacgttaaccgcagtcaccttcggtttaccttccgccacaggtcatcacaggactctaaggataaatctgagaaaatatttgcactagcatttgtcaagctgatgagatacgatggtaccaccctgcgagacggagagcacgatcttatcgtctataaggccgaagcgaagaagctggaagatgctgccacgtacttgagtctgccctccacgaaggcagagttggaagaaaagggccactcggccaccggcaagagcatgcagagccttgggagctgcaccattagcaaggactccttccagatctccacgctcgtgtgctccaccaaactgactcagaacgtggaccttctggggctcttgaaatggcgctccaacaccagcctgctgcagcagaacttgaggcagctgatgaaagtcgatggtggtgaagtagtgaagtttcttcaggacacgttggatgccctcttcaacatcatgatggagaactcagagagtgagacttttgacacgttagtctttgatgctctggtatttatcattggactgattgctgatagaaaatttcagcattttaatcctgttttggaaacttacattaagaaacactttagtgcaacgttagcctacacgaagttgacaaaagtgttgaagaactacgtggacggtgctgagaagccgggagtaaatgagcagctgtacaaagccatgaaagcgctagaatccatcttcaagttcatcgtgcgctccaggatcctgttcaatcaactgtatgaaaacaagggagaggctgacttcgtggaatctttgctgcagctcttcaggtccatcaatgacatgatgagcagcatgtcagaccagaccgtccgggtgaagggggcagcactgaaatacttaccaacgatcgtcaacgatgtgaaattggtgtttgatcccaaagagctcagcaaaatgtttactgaattcatcctcaatgttcccatgggcttgctgaccatccagaaactctactgcttgatcgaaatcgtccacagtgacctcttcacacagcatgactgcagagagatcctgcttcccatgatgaccgatcagctcaagtaccatctggagagacaggaggacctggaggcctgctgtcagctgctcagccacatcctggaggtgctgtacaggaaggacgtggggccaacccagaggcacgtccagattatcatggagaaacttctccggaccgtgaaccgaaccgtcatttccatgggacgagattctgaactcattggaaacttcgtggcttgcatgacagctattttacgacaaatggaagattaccattatgcccacttgatcaagacttttgggaaaatgaggactgatgtggtagatttcctaatggaaacattcatcatgtttaagaacctcattggaaagaacgtttaccccttcgactgggtgatcatgaacatggtgcaaaataaagtcttcctgcgagcaattaatcagtatgcagatatgctgaacaaaaaatttctggatcaagccaactttgagctacagctgtggaacaactactttcacctggctgttgctttccttactcaagagtccctgcaactggagaatttttcaagtgccaagagagccaaaatccttaacaagtacggagatatgaggagacagattggctttgaaatcagagacatgtggtacaaccttggtcaacacaagataaagttcattccagaaatggtgggcccaatattagaaatgacattaattcccgagacggagctgcgcaaagccaccatccccatcttctttgatatgatgcagtgtgaattccattcgacccgaagcttccaaatgtttgaaaatgagatcatcaccaagctggatcatgaagtcgaaggaggcagaggagacgaacagtacaaagtgttatttgataaaatccttctggaacactgcaggaagcacaaatacctcgccaaaacaggagaaacttttgtaaaactcgttgtgcgcttaatggaaaggcttttggattatagaaccatcatgcacgacgagaacaaagaaaaccgcatgagctgcaccgtcaatgtgctgaatttctacaaagaaattgaaagagaagaaatgtatataaggtatttgtacaagctctgtgacctgcacaaggagtgtgataactacaccgaagcggcttacaccttgcttctccatgcaaagcttcttaagtggtcggaggatgtgtgtgtggcccacctcacccagcgggacgggtaccaggccaccacgcagggacagctgaaggagcagctctaccaggaaatcatccactacttcgacaaaggcaagatgtgggaggaggccattgccttgggcaaggagctagccgagcagtatgagaacgaaatgtttgattatgagcaactcagcgaattgctgaaaaaacaggctcagttttatgaaaacatcgtcaaagtgatcaggcccaagcctgactattttgctgttggctactacggacaagggttccccacattcctgcggggaaaagttttcatttaccgagggaaagagtatgagcgccgggaagattttgaggctcggctcttaactcagtttccaaacgccgagaaaatgaagacaacatctccaccaggcgacgatattaaaaactctcctggccagtatattcagtgcttcacagtgaagcccaaactcgatctgcctcctaagtttcacaggccagtgtcagagcagattgtaagtttttacagggtgaacgaggtccagcgatttgaatattctcggccaatccggaagggagagaaaaacccagacaatgaatttgcgaatatgtggatcgagagaaccatatatacaactgcatataaattacctggaattttaaggtggtttgaggtcaagtctgttttcatggtggaaatcagccccctggagaatgccattgagaccatgcagctgacgaacgacaagatcaacagcatggtgcagcagcacctggatgaccccagcctgcccatcaacccgctctccatgctcctgaacggcatcgtggacccagctgtcatggggggcttcgcaaactacgaaaaggccttctttacagaccggtacctgcaggagcaccctgaggcccatgaaaagatcgagaagctcaaggacctgattgcttggcagattccttttctggccgaagggatcagaatccatggagacaaagtcacggaggcactgaggccgttccacgagaggatggaggcctgtttcaaacagctgaaggaaaaggtggagaaagagtacggcgtccgaatcatgccctcaagtctggatgatagaagaggcagccgcccccggtccatggtgcggtccttcacgatgccttcctcatcccgccctctgtctgtggcctctgtctcttccctctcatcggacagcaccccttccagaccaggctccgacgggtttgccctggagcctctcctgccaaagaaaatgcactccaggtcccaggacaagctggacaaggatgacctggagaaggagaagaaggacaagaagaaggaaaaaaggaacagcaaacatcaagagatatttgagaaagaatttaaacccaccgacatttccctgcagcagtctgaggctgtgatcctttcggaaacgataagtcccctgcggccccagagaccgaagagccaggtgatgaacgtcattggaagcgaaaggcgcttctcggtgtccccctcgtcaccgtcctcccagcaaacaccccctccagttacaccaagggccaagctcagcttcagcatgcagtcgagcttggagctgaacggcatgacgggggcggacgtggccgatgtcccaccccctctgcctctcaaaggcagcgtggcagattacgggaatttgatggaaaaccaggacttgctgggctcgccaacacctccacctccccctccacaccagaggcatctgccacctccactgcccagcaaaactccgcctcctccccctccaaagacaactcgcaagcagacatcggtggactccgggatcgtgcagtgacgtcgcaaggctctctggaaagagtgtgctgcccctccccatctccatgccctctccttctgtgtcccctgagtctgctgtttacctcattgggcctgtgatgttaacatttcgtgcgactgctttttcttcaaaggagttcagttctcaccatggagtgagtggcctttagcgtcatggagcaaggtgggtctgggaggtagatatgggtccgggatgtgctatcgtagttatcagagttgggggcctctgagtgtgtctggctctgagagagtctgagtcttgcccaaacattctttctttttgtgccaaatgacttgcatttgcaaagagctcaattgctctgagctcagccaagtaggagaggctaggccatcactcttaggaagctgtgtagtgatgatgtataagaatcctcctcactgtcatgggatgttgtatccagcccctccttgttccagccggtggtgtgacttcgttggttgaggtgtgtctccaacctacatcagaccatgaagttcaacccctccagggaagctcctgatttcccctgcataattgaaaataggatatttctcagctattgaacagttactaatttatggggtggaaacagcattaagaatactgaatcaaatggaaaaacaaatgaatacaggaagataagtgttcgttcttttctgaaaaagagtatgtgtaccacaagagctggttttaattgggtgaattgtttttgtcctcattctgtacagaaatttgtatatatgatggttcttagaacttgttttaatttttgtggtccttctgtttattataataggcgtccaccaatgattatccatatgtgttcttaatttttaactgctggaagtgttaaaacacacacacacacacacacacattttttttttgagaactccaaagtcctgaaaattttggtggacaatgatttttaaaaaactaactttgtataacctaatatttgtattctctcatctatatttttttattcactataatcatgatactcttctaatagacttaaaagttaatcattgacaacgaaaaataaaatgttattttaaaagaaaaaaaaaaaa

SEQ ID NO: 12849 - DNA, 7477 bp, Homo sapiens
atgtggccggccggcgcgggcaccaagctgccctgtccccgagactctgcgctccggcgggcggctttctctgggaacctcacggccctgccctctcacctcgtgcccgccggccgcagcgtccgggtcttcatcagcgccaaccctgaagatacgggagcagaaagacaggcgctaagagaaaatgtatatcctaaactgagagaattctgcagagaaaactatggattggaatttcaggtcatagatctgtactggggagtggaagaagatgagtgggacagcccagagctccagaagacccgcatgaagctgctggagaattgcttgaaaacttctgcaggtccatgttttgttggactattaggtgaaaaatatgggaatatccgaatccctggagaagttgaagcctcagagtttgaaatgattttggatgccgccatagaggcaaagctggagaccaagttgctggaggagtggtactgtcgagatgagaactcggtgccagcagcctattacctcagacccaagtcagaaatgctgagaagcaatagaaatgcaatgcagccttctaccaatgctgaaaacgagaagacatggcaagagatatcagatgagatcaagaagatatttaaggctgctgtaaagctgttacacgaaaagggtaaaatgaaacacagccaggctaagaggtacctgttctcagctatagaggatgagtttgactttgctctgggaaaacaaactccagcatttctaaagaagtgtgtttgctacattaggaaaattgctaacattgagcgctttgtgaaaatcccagagatgggaaaatacatggatataactggaacagaaccgaggattattcgggacccagaagcccaagagaagctgataaaactcagggatgaatttattcctactattgttgcatcatctaatctgagagtgtacacatctgttactcattgtgacatgaaactaggctactcccaagaaatagaaaatcattacatcgaaggacttggtaaacaattttatgaggacatgattgatataattcaggcaacgatacaacagaattttgacactgaaactgatacactctatgatgaaatccttcaacattcatcattatgtaaaacatacgcctccttctatgagtacaaatgtgaatctctaaacatagtgcataactacattcttccaagcaaagctggacacatcaaccctcttattatatatggtgggccatgcactgggaagacccttctgctagctgaagtagcaaagaaggcttatggctggctacatgaggacacaggaccagaatctgacccagtagtcatcgtgagatttctaggaacgacagacatgagctctgaccttaggactctccttctaagtgtttgtgaacaattggcagttaactaccggtgtctggttcaaagctaccctaagaagatccatgacctctgtgacttatttataaatcttttgaatgagtcttcactgcagagacctctagtcataatattcgatgcactagagcagctctcagagaatgatgatgccaggaagctttggtggctcccagctcacctgccccgctttgtccggatagtcctttccacgctgcccaacaaacatgggatcttgcagaaactaaggtgccttatccatgaagaagacaactacatcgagctgattccccgagacaggaagatgtgcagccaggtcctcaaacaccagctgctgcgcgtcaaaaggaaggtcacatcaggccagcagatttatgtgaacaatgcattatccaagtgcacactgccaatgtttgtgaacctgaccttcagggaggtgaggcactggagatctcacaaagacgtcgatgaatcctccctctctgtcaccgttcatgaaagtatagagcagttattctggtccttggagaagaagtgtggtcagaaactggtctctagggctcttggttacatcaccatggccaaaatgggtctgagtgaaatggaactggaggatgtgttagccctagacaacagtgtaatgagtgagctcaaagaaaacaccagacccagcaatcccctgagagtaccttacttgtacattgcaaggctcaaggagggtctcagtggatacctaatagaaagacatgtgaaaaatgtcacactcctagtctgggccaacagacacctgcagctcatagcccagaagctatatctgcaggatgacaatgacctgcgtgaaatgcacaccatcttagcagattattttctgggggtttggtcagggggcaggaggaaagccttctgccttgaggacccctacttgaatggctgccttgacttggagaacagaagtttgctggaggaagaaaagcacttcatggaacaggcttcctttgacaggcaggctccagaccagccctgggttttccagtgtaatcccctggaacctgacatctttttcgttaatcatcggaaaatgtctgagctgttgtaccacttgacgaggtgtggaaaaaccgatgacctgctttacggcatcatcatgaacttcagctggctttataccatgatcaaaattggccagtttgacaaagtgctttcagacattgagctggcttacaactactcgcaagagaaggagctgaagttcctggccaacaccctccgcagcatcaaaaacaaggtcactgcatttcccggctccctttcagcagagcttcagcaaagactgctgcctgttgtaagctccctgcccaaacttagacatcttcttttagagtgtgataaagatgggcccaaatattgctccattgtaccactgcattcatccatggatgtgacatacagcccagagcgtcttcccttatcatccagtcacctgcatgtcacagagatcctgcctacctgtaaccccagcactgtcctcacagctttagaaaatggttccatcagcacctgggatgtagagactcgacagctactcaggcaaatcaccacagcccagtctgtcatcctgggcatgaaactcaccagtgatgaaaagtaccttgtggtggctacaacaaataacaccttgttgatttatgacaatgtcaattcttgcctcctgtctgaagtagaaatcaaggggaccaagcatggaagcagcgccacctacatcaatggatttacactgtccgccaaccacgcccttgcatggctcgaagccagcaaagatgtcactgtcatcgatctgctgtacggatggccgctttaccagttccactgctggtatgaagtgacgtgcgtccagtgctccctggatggtctgtatgctttctgtggccaatacctgaacacaaccaccatatttcatttagggagtggagaaaagttatgtacagtgacatcagaattttcaggtggatttgtgaagtttcttcttatcttggacacagctcaggaaatggtcatggtagacagtgaaggaagtctttctgtttggaatactgaggacatttccagcccccagctgactgatgactttgattgccgaagagaagacagtgaggtggtcagcattgagctttcagaagaccaaagtgcagttctgatctgtaaagccctcagcattgagctcttagatactggtctgtggaaggtggctgaaaagttcagagccaagcacaacgaacgctttatatctgccgtgctgtctaaaaatggagattgtatcatcgccaccatggaaaatacctcagctgtgtttttttggaggcgggacacaggacagtgtatggcaagcttgcaggaaatctcaggttccattgttaagttagtgaaatccagtcaccacaatatgctactgtctttatcaaccagtggtgttctttccatttgggacatagatataatcacagctatgtccaacatagataagactggaaaacccatccaaagtctgttgttgcctgctagaggggaaatcatttactccctggatggatccgattgtgttcataagtggaacttcagcagtggcttcatcgaagcagtattcaagcatgaaggaatagttgaacactgtgtgttaacatccaccggagatataatggtgacatcagatgacaaaagcagccagtatgtctggcacaccagcagtggtgaaaacctttttcgaattaacgggcagagaatatctcagctgctgattacacacaatgaccagtttgtggtctcgctctgtgaggaaaatgcctccagggtttggaggctcgccacaggccacagggtctgcaacattctgaccactttgcagaatgcctttattacctccgcaaataccttcgtggtgggaatgactaaaagcaaagtgttggcagtcagtctttggacaggaagtatcaccaagaaattttgctgtgaagatgggaccaccatcgtgaattttaaattaatccctgactgtcctgatatcatcgtgtttatcacatcggccgagactgtgaacatctggagtctgacagatgaagtgatctgtcggcgcgtgcaacttccaaacaacttcttgaaaaatctggaggactttgaaatttctcccaatggaaagctaggcattatagccaggggagatgaaaacatcaatgtgctagatttatacagtggtaaattgcgggtggttcacgcctctgggatcatctggcggcagaggttgtctcgggatggtcgctacctggtatacatttgtttccgaaatggggaggaggaggatgaaaatggtgcaatattcagtttaattgtaatgagactggcagatggcaaaaatatcggtgcttgttccctttacaaaacaccaactttccttgcactctcccagaggcacctgaacatcattgtgggctttgatgatgggagtatagggatctacacggtagtagaccgtgtagatgctgcactgaaaatcaaaattgccacttcaaatagcagacaaattttcaacaatgcaacacacacctccaggccaaagtgtaacagttattgttttaaaatatctgtggattgcttatggagagagtccactgaggtctttgcaagagacagccccatcacagttagtgactctactgagtccaatgaagcaacaccctccaagaaacacaactcttgttatgagcgggtatgctcggccctagaagccaggggccacagctatgcccctgataactgacaaaatgttttccagctaagcagaaatatgtgatccacgtacagaagggaaaaaaatgtgccccaaatgataaactattcatttattaaaaggcaggagcgatgctggaattccagtgttttattaagatgttcatgaaatggacaaataggttagtcttgggtgtggtctttttgtcaaagtgtatccagaatgtcagaatttctagtagtaatatttaaatggttacttcatctgaaaggcagaggctaaaagtttttaaattagctgtgtggtgaggcagcataatacatcccactggttaagatgagagaggctagagttatatacagatcatttggatgggaattagttctacaaaaatcagctgaaatcatgaagacaaagagctgcttgacttcaaatgattgtgtgataagtaaacacagccttaatctctctttacattttacagtcctgacaactgtgtacacctagtctgcagtgaacggtctaaaggtgcaaaatatgtaacaaaaatacccaagtgtattcccagtttcccgagagatatgacctgaaacatgagactgtggactggactgggacaagaactaactaccactatcatagggctactgaacatggagagtcagtctttattaaaagacagttgcaacaattgcatgcgagggtttctgtataacagaatatatgatttttaaactatttcctgggttgcaaaagaacacatttagtaagaaacaacaatcttttcgcatctttttgaaatgcatatttgtgctgggtgtaaagaagattacaggaagggcattacaaatctggtcaaaacacctgtccatttccatcattgtactaacagaagtctgtactatttggtcagtttgtatggaagcataaatattccctaaattcctgcagttagtcttcatagaaagcaagctttctcaacatgccatctctgagatactgatgacgtttgccttactcacattccttctctttcctgtgtaaaatgcagatagatgaccaaatactctgggataaactgaatatgcctgtctttgtgctaaaatattccataaatcttaagggtgtccaaaagttctttattgtccttgtttgtaatcactttcttacttctacacaccatctgtatgcttctttatctgttactcttcctgattgaggactcttctgagccttttatagtcctatccatttcaaagcagaagctgtggaatggtattaaatattttttaaaattaattcacctgtttaaaagaaaacattgcatctcaaaaggtgaagatgattgttctttcttccatatcctccttacggcatgtccttggataacttttcaaaaggtatccacacttttggttgagtttagttttcttagaaagtagagaagtaacactttactagaataatgaacaaggaattgatttgctctaggcccagctctgccataaactcattgtgtattcctagacaggtctttaacttcatcagtgtgttgtttttgtgaagtgcaaaataaagatagtgatagtttctgctgtagccctcatagggacattgggaagcagtataagaaaaacttcagcaacatcatgattattgatgctaataggaaaaataaattcatgtaacccatagagaatccaggtcaattgtatttcctcttggaaagcagtttaacatgtaagcgttcaaagatgtgattcagataaaaatacccaggtccatagtgaaagatgtttttcagtatgttacttatggtttagctactagccagggaggtggtagcccagagaaggcaaaccacatacagatcacctggagttgattatatgagtctatgcttttgagctctttaggcaacacattctcattcctgtcattatcagttgaacctccatgccacacatttctaagaattaaatgcctagatggattaaatgtagtatgtgaatgttctatgtaaaagccaatagagtatacaagtgacttgaatgatttttcctaacttgtttgcaactgatagctcatattgaatgtttttatgtaaactttgtatcgttgggaagaattacccaatcagagatttatattttcataaatgttacatttagttaaattttgttacagagttgttacactagaaaattatttcagtcttcaaacaatatacagtcttgtgtatgtattatttgtatgaataaaagataaactacttaga

SEQ ID NO: 12850 - DNA, 1710 bp, Homo sapiens
gtcggcgtgtcgagtggctcttcctggctgctgaggcgggttaaggtctgagggtcttgtggggccacggcgctgatcaccaggtgtttggcttggtcggttcttatttctcgcctggcaatggcgacgtacacctgcataacttgccgggtggcgttccgcgacgcggacatgcagcgggcccactataagacggactggcaccgctacaacctgcggcggaaggtggccagcatggccccagtgaccgccgagggcttccaggagcgagtgcgggcgcagcgggccgtcgcggaggaggagagcaagggctcggccacctactgcaccgtttgcagtaagaagtttgcctctttcaacgcctacgagaaccacctcaagtcccggcgtcacgttgagctggagaagaaggccgtgcaggcagtgaatcggaaagtggagatgatgaatgaaaagaacttggagaaaggactgggcgtggacagtgtggacaaggatgccatgaacgcggccatccagcaggccatcaaggcccagccgtccatgtctcccaagaaggcgcccccagcgcctgcaaaggaggccaggaatgtcgtggccgtgggtactggtggccgtgggacccacgaccgagacccgagtgagaaaccaccccggctccagtggtttgaacagcaggcgaagaagttggcaaagcagcaggaggaggacagcgaggaggaggaagaggacctggatggagacgattgggaagatattgattctgatgaagaattggaatgtgaggatactgaagcaatggacgatgtggtggagcaggatgcagaggaggaagaggctgaggaaggcccaccccttggtgccatccctatcacggactgcttattttgttcccatcattccagctcgctgatgaagaatgtggctcacatgaccaaagaccacagtttctttattcctgatatagaatatctttcagatattaagggactgattaaatacttgggagagaaagttggtgttggcaagatttgcttgtggtgcaacgagaaagggaagtccttctactccacagaagctgtacaggcacatatgaatgacaaaagccactgtaagctcttcacagatggcgatgctgctttggaatttgcagacttctatgattttaggagtagctatccagatcacaaggaaggggaggaccccaataaggctgaggagttgccctcagaaaagaacttggaatatgatgatgaaaccatggaattgattctgccttctggtgccagagtgggtcatcgctccttgatgagatactacaaacagcgatttggcttgtcaagagctgtggcagttgccaaaaatcggaaggccgtgggccgagtacttcagcagtacagagccctgggatggactggcagcacaggagcggctcttatgcgagagcgagacatgcagtatgtccaaaggatgaaatcaaaatggatgctgaagacaggaatgaagaacaatgccaccaagcagatgcactttcgggtccaagtgagattctgagagtctgctgggattgagcaatcatctcctgcccaagtttcctccttgccctgaggaccagtgaaagacagatcataggagagacccttttgctgctacttcattcgttctgacctaataataaaagttagaaccataaaaaaaaaaaaaaaaaaa

SEQ ID NO: 12851 - DNA, 4156 bp, Homo sapiens
gagaatgtgagaaaagggggaaaatgcccaggaggaagcaggagcagcccaagcgccttccctcacatgttagtaggcaggaagaggcggagggggagctcagtgaaggagaacactggtatggaaactcttcagaggctccgtcagaagcatcctatggggaagtccaggagaactataagttgtctctggaggaccggatccaggagcagtccacgtccccggacacctccttgggaagcacgactcccagcagccacacgttggagctggtggcactggacagtgaggtcctgcgagactcactgcagtgtcaagatcacctttccccgggagtgtcttctttgtgtgacgatgacccaggctccaacaagcccctgagcagcaatttgaggcggctgctggaggctggttccctcaaactcgatgctgcagccacggctaatggcagagtggagtcccccgtaaacgttggctcgaacctctccttttccccgccttcccaccacgcccggcagctcagtgttctggccaggaagttggccgagaagcaggaacagaatgaccaatacactccaagtaaccgttttatatggaatcaaggtaagtggttgccaaactcaaccaccacctgcagcttgtctccggattcagccatcctaaaactgaaagctgcagccaatgccgttctgcaggacaaatctctcaccaggactgaggagaccatgcgatttgagtccctttcctccccttttagctcccagtctgccagttctaccttggccgctttgtccaagaaggtcagtgaaagaagtttgactcctggtcaggagcaccctccaccggccagctccttcctttccctggcttctatgacctcctcagcggcccttctgaaggaggtggccgcaagggctgcgggcagtcttctggctgagaaatcatcgctgctgcctgaggaccctctaccgcccccgccttcagagaagaaaccagaaaaagtcactccgccacctccaccgccacctccaccacctccaccaccaccaccacaatccctggaattattattactcccagttcctaagggaagagtttctaaaccctccaattcagcctcagaagaggaaagtggaaagcctttccagtgtccaatatgtggtttggttattaaaaggaagagttactggaagcggcacatggtgattcacacaggtttaaaaagtcatcagtgtccgctctgtccattccggtgtgctcgcaaggacaatctcaaatcccacatgaaggttcatcagcaccaggatcggggagagacctttcagtgccagctgtgcccttttacttcctcacgccacttcagcctgaaactccacatgcgttgccatcagcacttcctgaggacagaagccaaggtgaaggaggagatcccagacccagatgtcaagggatctccccacctcagtgacagtgcctgcctggggcagcaaagggaaggaggagggacagagctagtggggaccatgatgacgtctaacactccagagaggactagccagggaggggctggcgtctcgcctttgctggtgaaggaggaacccaaggaagataacggcctgcccacctcctttactttgaatgctgccgacaggcccgccaaccacacaaagctgaaagacccctccgagtatgtggccaacagtgcgtcagcattgttcagccaggacatctctgttaagatggcgtctgattttctcatgaagctgtcagctgcaaatcagaaggagcccatgaatcttaattttaaagtgaaagaggagcctaaggaaggggagtccctaagcacgactttgcctcggtccagctatgtgttcagcccggaatctgaagtgtcagccccaggcgtctctgaggacgcactaaagccccaggaagggaagggaagtgtgctaaggcgggatgtgtcagtcaaagcagcctctgaacttctcatgaaactctcagcggaaagctacaaggaaacacagatggtgaagattaaagaggaacccatggaggttgacatccaggactcccatgtctcgatatcacccagccggaatgttggctacagcactttaatcgggcgagagaaaaccgaacccttacagaagatgccagagggcagagtacccccagagagaaacctcttcagtcaggatatctctgtgaaaatggcttccgagctcctctttcaactgtcagaaaaagtgagcaaagagcacaatcatacaaaagaaaacaccatccggaccacgaccagccctttcttttcagaagacacatttagacaatcaccattcacctccaattcaaaagaactgctgcccagtgactccgtgctgcacggaagaatatcagctccagaaacagaaaagatagtcctagaggcaggaaatggattaccatcctggaaattcaatgaccagctttttccctgtgacgtgtgtgggaaagtgtttggccgacagcagacattgtcccgacacctctcgctgcacacagaggaaagaaaatacaaatgccacttgtgcccctatgctgctaagtgccgtgcaaatctgaaccagcacttgaccgtccattccgtgaagctggtgagtacagacaccgaggacattgtcagcgccgtcacctctgaaggcagtgatgggaagaaacatccttattattacagttgtcacgtgtgtggatttgggaccgagctcaatgtccagtttgtcagccacatgtcactccacgtggacaaggagcagtggatgttttcgatctgctgcactgcctgcgacttcgtcaccatggaggaagcagagataaagactcacattggcaccaagcacacaggggaagacaggaagacccccagcgaatcaaatagcccctcttcatcctccctctcagctctgagtgattcagccaacagcaaagatgattcagatggctcccagaaaaacaagggcgggaacaatctgctggtcatctctgtcatgcctgggagccagccctcactgaacagtgaggaaaagccagagaaagggttcgaatgtgttttttgcaactttgtctgcaagacgaagaacatgtttgagcgtcatctgcagatacacctcatcacccggatgtttgagtgtgatgtgtgccacaagttcatgaagacccccgaacagctgctggagcataagaaatgccacactgtccccaccggtgggctcaagtaaggaaactcaggacagtggtgagtttcagactcctctaggtgcccattctgcatttattccaccaaccgccccgctgccatggagtgccacctcaagacccactacaagatggagtacaagtgccggatctgccagacggtgaaggccaaccagctggagctggagacgcacacccgggagcaccgcctgggcaaccactacaagtgcgaccagtgcggctacctgtccaagaccgccaacaagctcatcgagcacgtgcgcgtccacaccggggagcggcccttccactgtgaccagtgcagctacagctgcaagcgcaaggacaatctcaacctgcacaagaagctgaagcacgccccacgccagaccttcagctgcgaagagtgcctgttcaagaccacacaccctttcgtcttcagccgccacgtcaagaagcaccagagtggggactgccccgaggaggacaagaagggcctgtgtccagcccccaaggaaccggccggcccgggggccccgctcctggtggtcgggagctcccggaatctcctgtctcccctgtcagttatgtctgcctcccaggctctgcagaccgtggccctgtcggcagcccacggcagcagctcagagcccaacctggcactcaaggctttggccttcaacggctcccctttgcgctttgacaagtaccggaactcagattttgcccatctcattcccttgacaatgttataccccaagaaccacttggatctcacattccaccctccccgacctcagactgcgcctcccagcatcccctcacccaaacactccttcctggcctatctcggactgagagaaagagcagagactgtctgagggcagccatgttctgtaccaaaaacagagagacaaaagac

SEQ ID NO: 12852 - DNA, 2120 bp, Homo sapiens
gctgggaaagcgcgtccccgccgcggctccgccagtttgaacttggcgggccagatgtgggcggcggggcgctgggggcctacttttccctcttcctacgccggtttctctgctgactgcagacccaggtctcggccctcctcggactcctgctcagtccctatgacgggcgcacgtgggcaggggctggaggtggtgcgctcgccgtcgccgccgctgccgctgagctgcagcaattccaccaggtcgctgttgtctccccttggccaccagagcttccagtttgacgaggacgacggtgacggggaggatgaggaagacgtggatgatgaggaagacgtggatgaagatgcccatgattcagaggccaaagtggcgagcctgagaggaatggagttacaggggtgcgccagcactcaggttgaatcagaaaataaccaagaagaacagaaacaggtgcgcttaccagaaagccgcctgacaccatgggaggtgtggtttattggcaaagaaaaagaagaacgtgaccggctgcaactgaaagctctagaggaattaaatcaacaactagaaaaaagaaaagaaatggaagaacgtgaaaaaagaaagataattgctgaagaaaagcacaaggaatgggttcagaaaaagaatgagcaagtaaggaggggaaaatggatacacacattgacatctcttttgcaaaatatttcttcctattatacttcattacctaggttttaaaaaatacttctcttagagtctttcttctttggcttgttttgtttttctatcctggtggacatttatcaagtctctatcttctgccctttgccctctacttttctcctttttccctcctgtggcttgcactaatatttgcctgcaggcagtcaccaagtctgtatttctaggcctgaccttttggatccttatggcaagtgcctccaagtctgcaaatctaaaacaacccattttgcccatttctccttcgtaaatccatcctcccatttctctgtttcattcagctgtcttctcggtcatcaaggcttaattagaattcttctgttgttcctaatcatctcctccttttctttacaattactactcccctgtttgtgatctctttccattatatctttcaacttgttgtttacttcttatactggattgtaagctacataagggcagggatttttgcctcttttgttcagttttccaggagctagatgaatacctgcgcatgatatatgtccaaaaatagtttaattgagtgaagatgttcattgaatggctgcattttttccttttaattttaatatattcttctatggatcacacacattcgaaattttaaaaatacttattctgtggtcaatttgtcttctgttgtgatttttacatatttagagtggtactgcttttattattataatccagttttacaaatgtggaaaaatgtttaaattgtaggacaatattttaaattttaattctaactttttatctttattgttgaatctaatgcctaatggtattaataagagtactaagtaaataatttcagtaaattgaagatgatataaccttcttcatccaagtattataagaaggaaattggttagatgtatgtgtgttataaccatatttgtttagaagtcaattactttgtttttttaaaaaagtttacttcatcccatgatataacatgaaagagatctttgtgaataaattcaaaaatcaaaataaatctctgtgactgttataaaactttgggtaatatctttttgaaatttgtaactataaaacaaaattattttacacatgcagaatagtttgctctttcctctaaaagtccttcttatcttctaactccattaagctaattttaccatgccaatcaaacctagttgttgtttgtctaggaatgtaagatacttctgggagacaatatattcactgttttaattagtggcagtagacctaatccaattatttgaagaaaaaaaaaattatttcttttggagggaagtggcttgccctgacataaatcactagttattgaaggcaaaattccgtaatgttgagaattatttaaaaataaaactgagacgttatat

SEQ ID NO: 12853 - DNA, 17303 bp, Homo sapiens
agcagtcgtgcattcccagcctcgcctcgggtgtagggattgcatagaaaagcaaaactacacagtcttgactgtgtagttttgtttttaggattagaggctcaccgattcatgtcggagatggtcagaaaaaccaactctccataggacgtcgtttcagaagcaaccttgggcttagtcccaccctttttaggcactcttgagaaatcaagtgcctagaaagatgacaactcaagcaccgacgtttacgcagccgttacaaagcgttgtggtactggagggtagtaccgcaacctttgaggctcacattagtggttttccagttcctgaggtgagctggtttagggatggccaggtgatttccacttccactctgcccggcgtgcagatctcctttagcgatggccgcgctaaactgacgatccccgccgtgactaaagccaacagtggacgatattccctgaaagccaccaatggatctggacaagcgactagtactgctgagcttctcgtgaaagctgagacagcaccacccaacttcgttcaacgactgcagagcatgaccgtgagacaaggaagccaagtgagactccaagtgagagtgactggaatccctacacctgtggtgaagttctaccgggatggagccgaaatccagagctcccttgatttccaaatttcacaagaaggcgacctctacagcttactgattgcagaagcataccctgaggactcagggacctattcagtaaatgccaccaatagcgttggaagagctacttcgactgctgaattactggttcaaggtgaagaagaagtacctgctaaaaagacaaagacaattgtttcgactgctcagatctcagaatcaagacaaacccgaattgaaaagaagattgaagcccactttgatgccagatcaattgcaacagttgagatggtcatagatggtgccgctgggcaacagctgccacataaaacacctcccaggattcctccgaagccaaagtcaagatccccaacaccaccgtctattgctgccaaagcacagctggctcggcagcagtccccatcgcccataagacactccccttccccggtcagacacgtgcgggcaccgaccccatctccggtcaggtccgtgtctccagcagcaagaatctccacatcccccatcaggtctgttaggtctccattgctcatgcgtaagactcaggcatccaccgtggccacaggtcctgaagtgcctcccccttggaagcaagagggctacgtggcctcctcatctgaggctgagatgagagagacaacgctgacaacctctactcagatcaggacagaagagagatgggaagggagatacggtgtccaggagcaagtgaccatcagtggtgctgcgggtgctgccgccagtgtgtcggccagtgctagctacgcagcagaggctgttgccactggtgctaaagaggtgaaacaagatgctgacaaaagtgcagctgttgcgactgttgttgctgccgttgatatggccagagtgagagaaccagtgatcagcgctgtagagcagactgctcagaggacaaccacgactgctgtgcacatccaacctgctcaagaacaggtaagaaaggaagcggagaagactgctgtaactaaggtagtagtggccgccgataaagccaaggaacaagaattaaaatcaagaaccaaagaagtaattaccacaaagcaagagcagatgcacgtaactcatgagcagataagaaaagaaactgaaaaaacatttgtaccaaaggtagtaatttccgcagctaaagccaaagaacaagaaactagaatttctgaagaaattactaagaaacagaaacaagtaactcaagaagcaataagacaggaaactgagataactgctgcatccatggtggtagttgccactgcaaagtccacaaaactagaaacagtcccgggagctcaagaagaaactaccacacaacaagatcaaatgcacctaagttatgaaaagataatgaaggaaactaggaaaacagttgtacctaaagtcatagttgccacacccaaagtcaaagaacaagatttagtatcaagaggtagagaaggcattactaccaaaagagaacaagtgcaaataactcaggagaagatgagaaaggaagccgagaaaactgccttgtctacaatagcagttgctactgctaaagccaaagaacaagaaacaatactgagaactagagaaactatggctactagacaagaacaaatccaagttacccatggaaaggtggacgttggaaaaaaggctgaagctgtagcaacagttgttgctgcagtagaccaggcccgagtcagagagcccagagagcctgggcatcttgaagaatcctatgctcagcagaccactttggagtacggatataaggaacgcatttccgccgcaaaggtagctgagcctccccaacgtccagcctcagaaccccacgttgtccctaaagcagtcaagcctagagtaatccaggctccttctgagactcatatcaaaactactgatcaaaagggaatgcacatatcatcacagatcaagaaaactacagatctaacaacggaaagattagtccatgtggataaacgcccccgcacagctagccctcactttactgtttcaaaaatttctgttcctaagacagaacatggatatgaggcatcaatagccggtagtgctattgccacattacaaaaagagttgtcagccacatcttctgctcagaagatcaccaaatcggtgaaggctcctactgtgaagcccagtgagactagagtaagggcagagcccacacccttgccacagttccccttcgctgacacaccagatacttacaagagtgaagctggcgttgaggtgaaaaaggaagtaggggtgagcatcactggcaccaccgtccgtgaagagcgctttgaagtactgcacggacgcgaagccaaggtaacagaaacagcaagagtaccagcacctgttgaaattcctgttactccaccaactttggtctcgggcttaaaaaatgtgactgtcatagaaggtgaatctgtcaccttggagtgccacatctctggatacccatccccgacagtgacatggtacagggaagactaccaaatcgaaagttccattgacttccagataaccttccagagtggaattgctcgtcttatgattcgcgaagcatttgcggaagacagcgggcgatttacttgcagtgctgtaaatgaggctggaaccgtcagcacatcctgctatctggctgtgcaggtgtcagaagaatttgaaaaggaaaccacagccgtgactgagaaatttactacagaagagaaacgctttgttgagtcaagagatgtggttatgactgatactagcctcacagaggaacaagcagggcctggagaacctgccgcgccttactttattacaaaaccagtggtccagaaactggtggaaggtgggagcgtggtgtttggatgccaagttggcggcaacccaaagccccatgtatactggaaaaaatctggtgttcctctaaccactggatacagatacaaagtgagttacaacaaacaaaccggtgaatgcaagctggtgatttctatgacttttgctgatgatgctggagaatacactattgttgttcgcaataagcatggagaaacttctgcatctgcttccttgcttgaagaagctgattatgagttactgatgaagtcccagcaagaaatgctttatcagacacaagtgactgcatttgttcaagaacctaaagttggagaaacagcacctggatttgtatactctgagtatgaaaaagagtatgaaaaagaacaagccttaattaggaagaaaatggccaaagatactgtagtggtcagaacttatgtagaagatcaggaattccatatttcttcctttgaagagagacttattaaagaaattgaatatagaataataaagactacattagaagaacttcttgaagaagatggagaagaaaagatggcagttgacatttctgaatctgaagctgttgaatcaggatttgatttaagaatcaagaattatagaattcttgaggggatgggtgtcacttttcattgcaagatgtctggatatccattaccaaagattgcttggtacaaagatggcaagcgcatcaaacatggagaaagataccaaatggactttctacaagatggcagagctagtctgcgtatacctgttgttcttccagaagatgaaggaatctacactgcatttgccagcaatattaaaggaaatgcaatttgctcagggaaattgtatgtggagcctgctgcaccacttggagctccgacttacattcccacactagagccagtgagcagaatcagatctctctctccacgttcagtgagcaggtctcctatacgcatgtctcctgcacggatgtcacctgcaaggatgtctcctgcacggatgtcccctgcaagaatgtcccctggacgtaggctggaggagacagatgagtcacaacttgagagactatataaaccagtctttgtgttaaaacctgtttctttcaaatgtttagaagggcaaactgccagatttgacttaaaggttgttggtagacctatgccagagacgttctggtttcatgatggccagcaaattgtcaatgactatacccataaagtagtcattaaagaagatggtactcaatcactaattattgtccctgccacacccagtgattctggggaatggactgtggttgcccaaaacagggcaggcagatcttcaatttcagtgattttaactgtggaagctgtggaacatcaggtaaaaccgatgtttgtagaaaaactgaaaaatgtcaatataaaggaaggttcccgacttgaaatgaaagtcagagctacgggtaaccccaaccctgacattgtatggttgaaaaacagtgacatcattgtgcctcataaatatcccaaaatcagaattgaaggaaccaagggagaagctgcccttaaaatcgattccactgtcagccaagattctgcctggtatactgcgactgctattaataaagctggcagagacactacaagatgcaaagtaaatgttgaagttgagtttgcagagcctgagccagagagaaagttaatcatcccacgggggacatatagagcaaaggagattgcagccccagaactggagcccctccatttgcgatatggccaagagcaatgggaagaaggtgatctctatgacaaagagaaacaacagaaaccatttttcaagaaaaaactcacttccttaagacttaagcgctttgggcctgcccactttgaatgcaggctaacacccattggtgacccaacgatggtggtggagtggctccatgatggaaagccacttgaagcagccaacaggctccgtatgatcaatgaatttgggtactgcagccttgattatggcgttgcatattctagagacagtggtatcattacttgcagagccactaacaaatatggaacagatcacacatctgctacccttattgttaaagatgagaaaagtcttgtggaagaatcccaattgcctgaggggaggaaaggcttacagagaattgaagaattagagagaatggctcatgaaggtgcacttacaggtgtaacaacagatcagaaagaaaagcaaaagccagacattgtcttgtacccagagccagttagagtacttgaaggggagactgcaaggttccgctgcagggtaacaggctaccctcagcccaaagtcaactggtacctcaatggacagctcatccgcaaaagcaaaaggttcagagttcgctatgatggtatccattacctggacatcgtggactgcaaatcatatgacacaggtgaagtgaaggtcaccgcggaaaatcctgaaggtgtgatagagcataaagtgaagcttgagattcaacagagggaagattttaggtctgtccttaggagagctcctgaaccaaggcctgagtttcacgtacatgaaccaggaaagcttcagtttgaagtacaaaaagtggatagacctgttgacaccactgaaaccaaagaagttgtgaagttgaaaagggctgaaagaattacccatgaaaaagtgcctgaagagtcggaagagctgcgcagtaaattcaagcgcagaacagaagagggctattatgaagccattaccgctgtggagctcaagtctcgaaagaaggatgaatcctatgaggaactcctcaggaagacaaaagatgaacttctccactggaccaaagagttaactgaagaggaaaagaaagctcttgccgaagaaggcaaaatcacgattccaacttttaaacctgacaagattgaactaagtcctagtatggaggctccaaaaatcttcgaaagaatccagagccaaacagtgggccaaggatctgatgcacacttccgggtcagagtcgtggggaaaccagaccccgaatgtgaatggtacaaaaatggtgtcaaaattgaacggtctgaccggatctactggtactggcccgaagacaatgtttgtgaattggtcataagagatgtgactgctgaggactctgccagcatcatggtaaaagccatcaacatagctggagaaacctccagtcacgcattcttacttgtccaagccaagcaattgatcactttcacacaggaattacaagatgttgttgctaaggaaaaagacactatggcaacctttgaatgtgaaacttcagaaccatttgtcaaagtgaaatggtataaagatggtatggaggttcatgagggagataaatacaggatgcactctgacagaaaggttcacttcctctccatactgaccattgatacgtctgatgctgaagattacagctgtgtacttgtggaagatgaaaatgtcaaaacgactgctaaacttattgttgaaggtgcagttgttgagtttgtgaaagaacttcaggacatagaagttccagaatcatattcaggagaattagagtgcattgtatccccagaaaatatagaaggaaaatggtatcataatgatgtggagcttaaatccaatggcaaatatacaattacatctcgtcgtggacgtcagaacctcacggtcaaggatgtaaccaaggaggaccagggagaatacagctttgtcatcgacgggaaaaagacaacctgtaaattaaagatgaaaccccgccccattgctatcctacaaggacttagtgaccaaaaagtctgtgagggtgacattgttcagcttgaagttaaagtctccttggaaagtgtggaaggcgtctggatgaaagacggccaagaagtgcagcccagtgacagggttcacattgtgatagacaaacaatctcatatgctgctcattgaagacatgactaaggaagatgctggaaattactctttcaccattccagcccttggcctctccaccagtgggcgtgtctctgtctatagtgtggacgtgataacacctctaaaagatgttaatgtgattgaaggcaccaaggctgtgcttgaatgtaaggtgtcagtccctgatgtgacttctgttaagtggtacttaaatgatgaacaaatcaagcctgatgaccgtgtacaggccattgtgaaaggtactaaacagcgactagtcattaaccgaactcatgcttcagacgaaggaccttacaagctgatagttggcagagttgaaaccaactgtaatctctctgtagaaaaaattaaaattatcagaggtcttcgtgaccttacctgtacagaaactcaaaatgtggtgtttgaggttgagctgtcccactctggaattgatgtcctgtggaattttaaggacaaggaaatcaagcccagttctaaatataaaattgaagcacatggaaaaatatataaattgacagttctaaatatgatgaaagatgatgaaggaaaatacacattttacgcgggagaaaatatcacatctggaaaacttactgtggcaggtggggccatctccaagccactcacagatcagaccgtagctgaatcccaggaagctgtgtttgaatgtgaagttgccaacccagattccaaaggcgaatggttgagggatggcaaacacctaccactgactaacaacatcagaagtgagtctgatggccacaaaaggagacttatcattgctgccaccaaattagatgacattggagaatatacctacaaggtggccacctccaaaacatctgccaaactcaaagttgaagctgtcaaaattaagaagactctgaagaacctcacagtgacagaaacacaggatgctgttttcactgtcgagcttacacaccctaatgtcaaaggtgtccagtggatcaaaaatggagttgtgctggaatccaatgaaaagtatgctatctctgtcaaaggaacaatttactctctgaggattaaaaactgtgccatcgtggatgagtctgtttatggcttcaggcttggaaggcttggagccagtgccagactgcacgtggagactgtcaagatcattaaaaagccaaaggatgtgacagccttggaaaatgccactgttgcctttgaagttagtgtttcccatgacactgttccagtaaaatggttccataagagtgtggaaattaagccaagtgacaaacacagactggtctcagaaaggaaagtccacaagctgatgctgcagaacatctccccctcagatgctggggaatacacagctgtggtcgggcaattggaatgcaaagcaaaactgtttgtggagacattacatattacaaaaaccatgaaaaatatcgaggtgcctgagaccaaaactgcctcttttgagtgtgaggtgtcccacttcaatgtcccttccatgtggctgaagaatggtgtggaaattgagatgagtgaaaagttcaagatagttgtgcagggaaaactccatcagctgatcatcatgaacaccagcacagaggactcggcagaatacacatttgtctgtggcaatgaccaagtcagtgccaccctgacagtcaccccaatcatgattacttccatgctgaaagacatcaacgctgaagaaaaagacactattacttttgaggtgacagtgaactatgaaggcatctcttacaaatggttaaagaatggtgtggaaatcaaatcaactgacaagtgccagatgagaaccaaaaagctcacacactcactgaacatcaggaatgttcactttggggatgctgctgactacacctttgtggctggaaaagcaacatcaacagccacactttatgtggaagctcgtcatatagaatttaggaaacacattaaggacattaaggtactggagaagaagcgagccatgtttgaatgtgaagtttctgaacctgacatcactgtacagtggatgaaagatgaccaggaactgcagatcacagacagaataaagattcagaaggagaaatatgtccaccgccttctgatcccatccacccggatgtctgatgctgggaagtacacagtggtggcaggaggcaacgtgtcaactgcaaaactctttgtagaaggcagagatgttcgcatccgaagtattaaaaaggaggttcaggtcattgagaaacagcgtgctgttgttgaatttgaggtcaatgaagacgatgttgatgcccactggtataaagatggcattgaaatcaatttccaagttcaagaacgacacaaatatgtagtggaaagaagaatccaccgaatgtttatctctgagaccagacagagcgatgcaggagaatacacctttgtggcaggaaggaacaggagttctgtcactctctatgtcaatgctcctgaaccgccccaagttctgcaggagctccagcctgtcactgtgcagtctggcaagcctgcccgcttctgtgccgtgatatccggaagaccacagcccaaaatttcctggtacaaggaagagcagctgctttccactggcttcaagtgcaaatttcttcatgatgggcaagagtacacgcttttgctaattgaagccttcccagaggatgcggcagtctatacctgtgaagccaagaatgactatggtgttgccacaacatcagcttcactctcagtggaagttccagaagttgtgtctcctgatcaggaaatgcctgtttatccacctgccatcatcaccccgcttcaggacactgtcacttctgaagggcagccagcccgttttcaatgccgggtttctggaacagatctaaaagtgtcgtggtacagcaaagacaagaaaatcaagccatctcggttctttagaatgactcaatttgaagacacttatcaactggaaattgccgaagcttatccagaagatgaaggaacttacacgtttgttgctagtaatgctgtaggccaagtatcaagcacagccaacctgagtctggaagctcctgaatcaattttgcatgagaggattgaacaagagattgagatggaaatgaaagaattattctctgagggggaatctgaacattcagaaagggatacacgtgacgccttttcagattctgaagacatagaccacaaatccatggctgctaaaagatatgcaagtagaatatcatctacaagctcctggcctgaatattttaagccttcttttacccagaaacttacatttaaatatgttttagagggtgaaccggttgtttttacatgtagattaattgcctgtccaactccagaaatgacttggtttcataacaatcggcccatcccaacaggtcttcgtcggattataaaagctgagagtgatttacaccatcactcttccagcttagagattaaaagggtccaagacagagattctggaagttataggttactagcaattaatagtgaagggtctgcagaatcaactgcatcattgcttgttatccaaaaagggcaagatgagaaatatttagaatttctgaaaagagcagaacggacacatgaaaatgtggaggctttagttgaaaggggagaagataggataaaggttgacctgaggtttactggctctccctttaacaaaaaacaagatgtggaacaaaagggaatgatgagaactatacattttaagacaatgagttctgccaagaaaacagattacatgtatgatgaagaatatttagaaagtaaatctgacataagaggttggcttaatgtaggtgaaagtttcctggacaaggagaccaaagtgaagttgcaacgtttaagggaggctagaaaaacgttaatggagaaaaagaaattatctcttttagatacgtcttctgaaataagctcaagaactttcagaagtgaagctagtgataaagatattctgttctctagagaggacatgaaaatcagatctatgtctgatctagctgaaagttataaggtagatcattcagctgagagtattgtgcaaaatccacatgccctttctaatcaaatggatcaaaatatagaatctgaggaacttcccacaagctttcaaactattgttgatgaagaaattttccagactgaaataagaatgagccaagaagcactggtaaaggaaagtctaccaaaagaccatttatatggtgaaattctagtaaatgaaaatacccaagcaagaggacagctggaagaaattatggccaatactacaattggagagtcatccacatatatcactaatgtatgtgagaaggaggaagtatatgagactcctgaaaatgtgtctcaagctattacaccacatgccagcgaatcttttggtacacttgtaaatgttgaagaaagtgaagaaatagctagtgaaagaataaaaaaggatgatttgagagaattacaactctctgcttctacacgaattgatgaattcaaaaccgaacagaaggaagaaaacatgagattttttgaaaattcttttcgaaaacgcccacaacgttgcccaccttcatttcttcaagaaattgaatctcaagaagtttatgaaggtgacagttgtaattttgtgtgtcattttcaaggatatcctcaacctatagtgacgtggtataacaatgacatgccaatcccacgtaatcaaaactttatcattcattcgttggaaaactattcaatattaactctttcatctgttcatcatcagaatgaaggttctattacttgtgtgctatttaaccaatatggaacagtaaaaacaaccagtatgcttaaagtgaaagcaaaacaaaaacatgatgtcaaagcacataaagtcccagtgttccatgactacttggatgaggaagaagagctagcattggtgtttgaccaagcaaaaggcgcccatccatctatgagtcaagagggccaaacaaatcttcatttgttaaaaactaacccaccagttcctccctctggagacacagaattgctttcctttcctgtagaaattcaggtaacagcagctactcctatcccagaacaggataaagagtctaaagaagtgtttcaaactgaggagctggaacctaaagcaatgcctcaagatcaagttactcaatcaccaaaacacagatttgtatttttgtctgatattactaatgaaccaccaaaaatgttacaagaaatgccaaagcatgccaggtgtagagaaggggattccatcattcttgaatgtttaatatctggtgagccccagccagttgtaacatggtttcaaaatggagtccttttaaagcagaaccagaagtttcagtttgaagaagttaattgtagccaccaattatatattaaggatgttaattctcaagattctggaaaatataaatgtgttgctgaaaacaattcaggggcagttgaaagtgtttcagatctaacagtggagcctgtcacttatagagaaaatagtcaattcgaaaatattggtgaaatttatggaaaatattccagagatcagcaactgcaagaccagggagaatctgtaagggcacatttttatgattatccagctggtccctttactccctggacaaatgtaaaagaatattcagtaagggactattttcaaagccttgagactattgagcaaatagaccagaaagagcaggtgcgttgcataccttctagagaaaaaattcccagatttgtgcatggtgcttcaagaaccataaaaatcagcaagcccatcagggctgaattcatacaatgtcaggctgaagggaaagagagacatgtaagtgaaaaatcaaagctgcaccaagcagagggtactgtttatccatttgttgatgatttcagtgatgtcactattaagaaagaaataagaaataattttggaaaacttggtagatcagaaaaggaaaatgtacaagaatgtgcccaaagtgactatttaccaaatattcactctgagagaatttctgacagttacaatacaaaagattcatctgccattgtatatgaagaatcccttggtgaagagatacactacccggggaaaaaggtgaagcatagaattatcgaatttgaaaaattacatgtagaaaaaggagttctagaaaaaagacctaccagaacatcaattgttaatcctcctcaaaagaagattgatgacaaagccttttcattaaagcaaagagaatcaagatcaagcaatctaaatgcaaatatgtatcaggcagagaaaatgtctccaaatactgaatcagattcatctaacattgcaataaatttaaagctgctttcctctcaaactcataaagaatttgacgcacaagaaagggaacaacaggaaaaaataagtcttatagataaacctgcaatttctaaaagagctgaacatgaatcacctattacatttgacttaaagcagtttcacactcaaataaaacacacagatgtgaaattccaagaattagatagtggtcaaccagaagaagcttattttaaaatccaacatcctgctgacactgagaacattgtatttgatctaaaacaaatgtattctcatataggagatccagctctggagttccaagggcaagaaactagggaacagcaggaaatacattataaagaaaaaattcctagccctgaaacgttacaacctgacacacacaatatctctaaaagtgtgcaaaataatgtatttgccagtcaagaaatttcttccagtcaagagctttcaaatagaactatggtggagaaaagtagtattgatgaaaattccatttctttagaaaaagaagtccgacatgtacaggaacaaaacttagacattttaaaaactgatctttctcttaaatccttttctgaagaaatctatagtgaatcatgtgccctacttccaacctcatctgcagatatagaagaaactgatctttctgagaaaagttgtcctctagaaaatggaggcagaagttccatctcacatttgaaaaaagcagcaagtgaggaaaagcctttaggggttggtgaaatggaagaagaatgcactctagaaccagagttggcagcatttccaaagcaggatggtgggacacaggaatatacagatgccactttggaagaccacagaggtgatgttcaggaagctgacacactccatagacagctctccctgagtcagtgcttcccactcttgatgactgaagaacaacagaatccaggtgaacaaataagtacaaacattcatgcctctggagaagaaaaatgttatgaagaagttcaagttcagaatgaagcttctttctccactttagaaggagaaatgatagaaactagtttttctcaaaatattcctaaattagatgaggcacataccactgaggcagcagaatctgagacctccctaacacaatatttacttgctgctggaaagcgtgaggttcctgaaactaaagacaccagagaccaggcaaagcttgtccagagtgaatcaatcacttcaatggaggtggaagaagtaactttcaacactgtgtatgaatactacaaccagaaacaggaatcactaggtcgtccactttctcctgagtctgacatttccattggtgtgggaagtacaaccagtgaagaaatatctgagttagatcagttttataccccaccatcatctgttgaatattttgaatctccaaagtcccctgacttatattttaatccttcagatataactaaacaatcctcaatacattcaggaggtgagacagttgaaagatattccacacctttaggggaagttgctgaaagatattcaacaccttccgaaggtgaggtaggagaaagatactccacacccccaggggagacactagagagatactccacacctccaggagagactctagagagatactccacacccccaggagagactctagagagatattccacacccccaggagagactctggagagatactccacacccccaggagagactctagagcgatattccacacccccaggggaggcactagagagatattctattcctactggaggaccaaaccccactggtacttttaaaacatatccatcaaaaatagaaatggaagacggtacaccaaatgagcatttctacacacctacagaagagaggggttcagcttatgaaatatggcgttccgattcatttggtacacccaatgaagccattgagccaaaagacaatgaaatgcctccatcttttattgaacctctgaccaaaaggaaggtatatgaaaacacaacactaggcttcattgttgaagttgaaggtcttccagttcctggtgtgaaatggtatcgaaataaatctttactagagccagatgaaagaatcaaaatggaaagagtgggtaatgtgtgttcactggaaatttctaacattcaaaaaggagaagggggagagtacatgtgtcatgctgtaaacatcataggggaagcaaagagctttgcaaatgtagacataatgccccaggaagaaagagtggtggcactaccacctccagtaacacatcagcatgtcatggagtttgatttggaacacaccacatcatcaagaacaccttctcctcaagaaattgtcctggaagttgaattaagtgaaaaagacgttaaagaatttgagaagcaggtgaaaatagtgacagttcccgaatttactcctgaccataaaagtatgattgtgagtctagatgttcttccatttaattttgtagatccaaatatggattcaagggagggagaagacaaagaactaaaaattgatttagaagtatttgaaatgcctcctcgctttataatgcctatttgtgattttaaaattccagaaaattcagatgctgtattcaaatgttcagtcatagggatcccgactcccgaagttaagtggtataaagaatatatgtgtattgagccagataatattaaatacgtgattagcgaggagaagggaagtcacactcttaaaattcgaaatgtctgtctttctgatagtgcaacatacaggtgcagagctgtgaattgtgtaggagaggctatctgtcggggattcctcaccatgggagattctgaaatatttgctgtgatagcaaagaaaagcaaagtgactttaagcagtttaatggaagaattggtcttaaagagcaactacacagacagtttttttgaatttcaggtggtggaagggcctcccaggtttatcaaaggtatttctgactgttatgcaccaataggtacagcagcatattttcagtgcttagttcgtggctctccaagacccacggtttactggtacaaagatggaaaattagtccaaggaagaaggttcactgttgaggaaagtggcacagggttccataacctgtttataacaagcttagtaaagagtgatgaaggagagtataggtgtgtagctacaaacaaatcaggaatggctgagagctttgcagcactcaccttaacttaaaatgtaatgttttagtgcctcagtaattattagcattgatctgagtgctttcatattttccaaattatgtggatctaataaacttccaaacaggtccaccatatttgaattcattaccttggagacccctaaagaaataatctctatgtagaaatctcatctttgtaatacatgtaaatattttgttatctgaactgtggaatcatcacttgtgtcaatcatgctgtgtaatatcaaacacaattaaatctctccttggctacct

SEQ ID NO: 12854 - DNA, 1991 bp, Homo sapiens
tggccaacttctgaacaggaagcagttcgctcgcgcctaggttggcgcgggctgggaggtgttccagccctttaagatgttgcgcgtggtgagctggaacatcaatgggattcggagacccctgcaaggggtggcaaatcaggaacccagcaactgtgccgccgtggccgtggggcgcattttggacgagctggatgcggatatcgtctgtctccaggaaaccaaagtgaccagggatgcactgacagagcccctggctatcgttgagggttataactcctatttcagcttcagccgcaaccgtagcggctattctggtgtagccaccttctgtaaggacaatgctaccccagtggctgctgaagaaggcctgagtggcctgtttgccacccagaatggggatgttggttgctatggaaacatggatgagtttacccaagaggaactccgggctctggatagtgagggcagggccctcctcacacagcataagatccgcacatgggaaggtaaggagaagaccttgaccctaatcaacgtgtactgcccccatgcggaccctgggaggcctgagcggctagtctttaagatgcgcttctatcgtttgctgcaaatccgagcagaagccctcctggcggcaggcagccatgtgatcattctgggtgacctgaatacagcccaccgccccattgaccactgggatgcagtcaacctggaatgctttgaagaggacccagggcgcaagtggatggacagcttgctcagtaacttggggtgccagtctgcctctcatgtagggcccttcatcgatagctaccgctgcttccaaccaaagcaggagggggccttcacctgctggtcagcagtcactggcgcccgccatctcaactatggctcccggcttgactatgtgctgggggacaggaccctggtcatagacacctttcaggcctctttcctgctgcctgaggtgatgggctctgaccactgccctgtgggtgcagtcttgagtgtgtcctctgtgcctgcaaaacagtgcccacctctgtgcacccgcttcctccctgagtttgcaggcacccagctcaagatccttcgcttcctagttcctctcgaacaaagtcctgtgttggagcagtcgacgctgcagcacaacaatcaaacccgggtacagacatgccaaaacaaagcccaagtgcgctcaaccaggcctcagcccagtcaggttggctctagcagaggccagaaaaacctgaagagctactttcagccctcccctagctgtccccaagcctctcctgacatagagctgcctagcctaccactgatgagcgccctcatgaccccgaagactccagaagagaaggcagtggccaaagtggtgaaggggcaggccaagacttcagaagccaaagatgagaaggagttacggacctcattctggaagtctgtgctggcggggcccttgcgcacacccctctgtgggggccacagggagccatgtgtgatgcgtactgtgaagaagccaggacccaacttgggccgccgcttctacatgtgtgccaggccccggggtcctcccactgacccctcctcccggtgcaacttcttcctctggagcaggcccagctgaaccaatggaggcctggggacatctggcatggtcacccctgcacatgatctgaggccagctccccttccctgagctgcctcctgcttctccctcaaagtctcctacccttctcttcctcttttaagccctctcttcctcgctttccttcctacctagctccttgttggtgagcttcttgtgccttaatcctgtgacccagccccttacaccactttccaccttcctgtccgaagtacacggacactagctgccccaggaagttgtgtgattttaaatcacttctgtctttgctggaaagtgtatttgtgcataaataaagtctgtgtatttgtttcagggttgcaaaaaaaaaaaaaaa

SEQ ID NO: 12855 - DNA, 956 bp, Homo sapiens
gcggaaatggctgggagggggatggggatgttgaatttggaaattggaggggacgctggtggacggattgggtgcaaggagttggtgttgatggaggagcaggacgccagagtcccagccctggaaccgttcagagtggagcaggcaccacctgtaatctactatgtccctgacttcatctccaaagaagaggaggagtatttgcttcgacaggtttttaatgccccaaagccaaagtggacccagctctctgggagaaagttacagaactggggtgggcttcctcatccccgagggatggttcctgagcggctgcccccatggctccagcgctacgtggacaaagtgtcaaacctcagcctctttggaggcctcccagctaaccatgtcctcgtgaaccagtatctgcctggggagggcatcatgcaccatcagcctgggctcccacaccgtgctggacttctacgagccgcggcggccagaggacgatgaccctacagaacagcctcggcctccgccccggcccaccacctcgctactgctggaaccgcgcagcctgctggtgctccgcggccccgcctacacgcgtcttctccacggcatcgccgccgcccgcgtagacgcgctggacgccgcctcctcgccgcccaatgcggcagcctgcccgtcggcgcggccgggagcctgcctggtgcgcggcacccgggtctcgctgaccatccgccgcgtgccccgcgtgctgcgcgccggcctcctgctgggcaagtgaccgccagggccgggacccctcggattcccaggttcctgcccctttggggctgctgtgactccgcgacctaggaaccgtgggcaaagggggctcccctgggttatttattttcccaataattttgtgtgagctacagaagaccccataccaaataaacaaaaaaatctttaaaaaaaaaaaaaaaaaa

SEQ ID NO: 12856 - DNA, 4317 bp, Homo sapiens
agcgggtatctatggccgggctcaggcggctgctggggagccaggagaccgcgcgggacggcggatgaggcgcggcggctgcggcccagggcacctcccctctggcttcccgaacccggccaggtccgacccgagggggaggatggaaacacctgccgcgctctgagccccccagaagagaacacccttcccgccatatcaccccacggtcctgcggaggccaccgcctggtccccccaagtctccatcgcgcagcgtggggccgagaggaatagtgagcgatggcggaaaacctgaaaagactggtctcaaacgaaactttacgaacgttgcaggaaaagctagacttctggctgaaggagtacaacacaaacacgtgtgatcaaaatctaaaccattgccttgaactcattgagcaagttgccaaggtgcagggacaactctttgggatcctcacagcagcagcccaagaaggaggacgtaatgatggtgtggaaacaatcaagtcacgccttttgccttggctggaggcttcctttactgctgcttccctgggaaaatctgttgacagcaaggtcccctctctgcaggacacgtttgatagggagagacataaagatcccagtcctcgggatcgggatatgcaacagttagactctaatttgaactcaacccggagtcaatgcaaccaggttcaagacgatctggttgaaactgaaaagaatcttgaagaaagcaagaacagatcggccatatcccttttggctgcagaggaggaaataaatcagctgaaaaagcagcttaaatctcttcaagctcaggaggatgcccgccacagaaacacagatcagaggagctcagagaataggcggtcagagccttggagcttggaggagcggaagcgtgagcagtggaactcactcaagcagaatgcagaccagcaggacacagaagccatgtccgattataagaaacagctccgaaacctgaaggaggagatagctgttctgtctgctgagaaaagtgcactccaaggaaggtcctccaggagccggtctcccagccctgcccctcgcagccgtagctgcagccgcagcagatctgccagcccctccaccgctgtcaaggtcaggagaccgtccccaaaccgctccaagctgtccaatgtggcgcgcaaggctgccctcttgtcccggttcagcgattcctattcccaggcccgcctggacgcgcagtgcctgctgcggcgctgcatcgacaaggctgagaccgttcagcggatcatctacatcgccacagtggaggcattccatgtagcaaaaatggcattcagacacttcaagatccatgtgagaaaatcgttgacaccatcttatgtggggtcgaatgactttgagaatgctgtcttggattatgtcatttgtcatcttgatctatatgattctcaaagcagtgtcaatgatgtgatccgagccatgaatgtcaatcccaagatttcattccctcctgtcgttgacttttgccttctcagtgacttcatccaggagatatgttgcattgcctttgcaatgcaggccttagaaccacccctagatattgcatatggagcagatggagaagtttttaatgattgcaaataccgccgcagctacgactcggatttcactgctcccttagtcctctatcacgtgtggcctgctctcatggagaatgactgtgtcattatgaagggagaagctgtcaccaggagaggggctttttggaattcggtgcgatctgtaagtcgttgtcgaagcaggagtttaagtcccatttgcccccgtagccaaattggtttaaacacgatgtctcgaagtcggagtccttctccaataagatgtggattgccaagattttaaaagcaccagacctgctcctttgacccagtgcgtggaaacagctgctttctccagtgccgccatctgtcttctgtgtctgcctcagacctcacttaagataatgtcaaaaggcaattctgtgtatcaccccacacagagagttaaatgttttggcttggcgcatttgtaactttagatatattgcattctattttattttatagatactaattccattaatttcataaaaatgattgtataggcatttaggatcatattcattcgaagcaaagtccgttacaaaggttcaagatttccatctcaaaacactacgctcttttatgggaactgtgtgaactgaagtggaaagcatctaccatgctgaggctaaaagaaaagatgaatcattttagtttgcagatggatcgtaaatataattgttggtatcagctttagctcaaaaccaatattaggtgttttaatttccttttaaggtttggaagacagccctaatctcaggttggggagctcatgttagtagcagtgacttaaggctaagtgtagaagataatttaagatacattttctttatatattagccaacaaattatatttattggttggcttgcttttccgttctgattttgagagtgcccagtttggtttagttgaccaatgaatgtcaaagctacttagttgagagaatttccttgttcataaatgtagagcagtgatttgattagaagccagctttgagataaatgttaattacctcatgcatatctcctgggaatatttcaaactgttttaatgcatgtgttatatataaaagtttcttgggacatgctcttcacctgttctacctagttatttgcaaattcagacctcctattgaactctgtctgaccaaaactacttaaactcaaggcccaaaactaggggcaccatttactgattttaaattgagtatatatcccttgacttcttcactgtcaaatacttttgaaacttcacgttcaagataagaatggaatgttgctttcttgcaataagtaatgttctttctgcctttttttcacttttaagtcagccttaaacacatgcctcacaaacatctactttctccacatacctttgagagagacactgaattggcctcagctcagttttgcataagcttagtgccagaaccagcacctgatgcttttcaggtgaaaataaaacaaacagcttctctaaagcatcttacccctgtgctggaggtttgagggacctcttcagtgcctgccccttgagtctaatggtcaccacctcattctgaagtatgagttgaattttttgccctctttgcatatttacattagtcatcactttgaagcaatgcagtgtgctggaaggagcactatctgcctaggtaactgctagtcatgacctggtcatcagcttgctttgtggcactgagcaagttacttcacttctctgagccttggttttatcatagggtgaggaggttggatacaattagtgccccccttaaccctgcagactcaatgttcccttttataacaagtattttattctgaatatgaaatgaaaattaaagttaatataatcatctatgtgcatgtataattttaagcagtgaacatagtaccctaactataatataaagcagaaaaaaaggcaacttttaataaaataaaatgtatttcaataaaaaagcttgggtataaccaccctagaagataaaattaagtcattagatggctgaacctgcatgtagagccaccagctacaaatgaaaatcaatgtgtgtattggcaacagaaaatcacggtgttgtcattggatgtgactttctgaagtggtgggcaattcttgttaatgttttaaacaaaaaaaaaaacaccttacagtcttgccctgatttacacagcagtcacattcctggaaaattcaagtgtttattaaaactatgcaacagttactgtgtgttatacgttgaaaggtcttcactaatatctcactaagtaatgagaatgcctacatatcagaattttttttttcaggagccaagcacatatactgatttggaaaaaggcacaggtagctcagtttatttgctttctaccctgcctggccacttgctgtttcttcagtttctaatttgagctgtaactacacaaggaaagctaaatagtctggaaaatttttggaaagaatccacaaagccaaaggagactggcctatactcattttatctggggatgtaccttacccttagagactttgaaaaatgtgaagctcttattttgtaacctgggtaaatgttagtttctagattttcggcttaacatctaataataacatttaaaaagtgcttttgtaactattagttatttgcaataaaatgctttccttctacaaaaaaaaaaaaaaa

SEQ ID NO: 12857 - DNA, 16384 bp, Homo sapiens
cagctgccacttttcaccgttagaagtagagctttttccagacctcctaccttttagtctactttgaaaggtgaaagaaagaacatcgtttcaggaataaaaatgcacagtagtagttatagttaccgtagcagtgattctgtgtttagtaacactaccagcactcgaaccagtcttgattcaaatgaaaatcttctcttggttcattgtggtccaacactgatcaactcttgcattagcttcggcagtgaatcctttgatggacacaggttagaaatgttgcaacagattgccaacagagttcagagggacagtgtcatctgtgaagacaaactgattcttgctggaaatgctcttcagtctgattctaaaagattagaatcaggagtgcagtttcagaatgaagcagaaattgctgggtatatacttgaatgtgagaaccttttacgccagcatgtaattgatgtacagattcttattgatggaaaatactaccaggcagatcaattggtacagagggttgcaaaactgcgtgacgaaattatggccttaaggaacgaatgttcttctgtgtacagcaaaggacgcatactgacaacagaacagacaaagctcatgatatcaggaatcactcaaagtttaaactcaggatttgcacagaccttacaccctagtctgacctcagggctgacccagagtttaacaccttccctaacctcttctagtatgacttctggcctgtcatcagggatgacttcccgcctgactccatctgtcactccagcttatacacctggtttcccatcaggattagttccaaatttcagttcaggagtagagccaaattcattgcaaactttgaagttgatgcagatccgaaaaccccttctaaagtcttctttgctggatcaaaatttaacagaagaagaaatcaatatgaaatttgttcaggatcttttgaattgggttgatgagatgcaggtacaactggaccgcactgagtggggctcagatttgccaagtgttgaaagccatttagaaaatcataaaaatgttcatagagctattgaagaatttgaatctagtctcaaagaagctaaaatcagtgagattcaaatgacagcacctcttaaactgacttatgcagaaaagttgcacagattagagagtcagtatgcaaaactcttgaatacatccaggaatcaagaacggcaccttgatacactccataattttgtaagtcgtgcgactaatgaacttatttggttgaatgaaaaagaagaggaggaagttgcttatgactggagtgagagaaacaccaacatagctaggaaaaaagattatcatgctgaattaatgagagaacttgatcaaaaggaagaaaatattaaatcagttcaggagatagcagagcagctacttctagaaaatcatccagcccggttaactattgaggcctacagagcggcaatgcagacgcagtggagctggatcttacagctctgccagtgtgtggagcagcacataaaggagaacacagcgtatttcgagtttttcaatgatgccaaagaagctactgattacttaaggaatctaaaagatgccattcagcggaagtacagctgtgatagatcaagcagcattcacaagctagaagaccttgttcaggaatcaatggaagagaaagaagaacttctgcagtacaaaagcactatagcaaacctaatgggaaaagcaaaaacaataattcaactgaagccaaggaattctgactgtccactcaaaacttctattccgatcaaagctatctgtgactacagacaaattgagataaccatttacaaagacgatgaatgtgttttggcgaataactctcatcgtgctaaatggaaggtcattagtcctactgggaatgaggctatggtcccatctgtgtgcttcaccgttcctccaccaaacaaagaagcggtggaccttgccaacagaattgagcaacagtatcagaatgtcctgactctttggcatgagtctcacataaacatgaagagtgtagtatcctggcattatctcatcaatgaaattgatagaattcgagctagcaatgtggcttcaataaagacaatgctacctggtgaacatcagcaagttctaagtaatctacaatctcgttttgaagattttctggaagatagccaggaatcccaagtcttttcaggctcagatataacacaactggaaaaggaggttaatgtatgtaagcagtattatcaagaacttcttaaatctgcagaaagagaggagcaagaggaatcagtttataatctctacatctctgaagttcgaaacattagacttcggttagagaactgtgaagatcggctgattagacagattcgaactcccctggaaagagatgatttgcatgaaagtgtgttcagaatcacagaacaggagaaactaaagaaagagctggaacgacttaaagatgatttgggaacaatcacaaataagtgtgaggagtttttcagtcaagcagcagcctcttcatcagtccctaccctacgatcagagcttaatgtggtccttcagaacatgaaccaagtctattctatgtcttccacttacatagataagttgaaaactgttaacttggtgttaaaaaacactcaagctgcagaagccctcgtaaaactctatgaaactaaactgtgtgaagaagaagcagttatagctgacaagaataatattgagaatctaataagtactttaaagcaatggagatctgaagtagatgaaaagagacaggtattccatgccttagaggatgagttgcagaaagctaaagccatcagtgatgaaatgtttaaaacgtataaagaacgggaccttgattttgactggcacaaagaaaaagcagatcaattagttgaaaggtggcaaaatgttcatgtgcagattgacaacaggttacgggacttagagggcattggcaaatcactgaagtactacagagacacttaccatcctttagatgattggatccagcaggttgaaactactcagagaaagattcaggaaaatcagcctgaaaatagtaaaaccctagccacacagttgaatcaacagaagatgctggtgtccgaaatagaaatgaaacagagcaaaatggacgagtgtcaaaaatatgcagaacagtactcagctacagtgaaggactatgaattacaaacaatgacctaccgggccatggtagattcacaacaaaaatctccagtgaaacgccgaagaatgcagagttcagcagatctcattattcaagagttcatggacctaaggactcgatatactgccctggtcactctcatgacacaatatattaaatttgctggtgattcattgaagaggctggaagaggaggagaagtcactggaagaagaaaagaaagaacatgttgaaaaagccaaagaattgcaaaaatgggtatcaaatatcagcaagacattgaaagatgcagagaaggctggaaaacctcccttctctaagcaaaagatttccagtgaggaaatatcaaccaagaaggaacaattatcggaagcacttcaaactatacagctttttttggcaaaacatggagacaaaatgacagatgaagaaagaaatgaattggaaaaacaagtgaaaactcttcaggaaagttataatttattattcagtgaatctctgaaacagctacaagaatcacaaacctcaggagatgtaaaggtagaggagaagattgtagcagagcgtcagcaggagtataaagagaaactccaagggatatgtgatcttcttacccaaactgaaaaccgcctaattggtcaccaagaagccttcatgattggagatggcacagttgagttaaagaaatatcagtccaagcaagaggaattacagaaagatatgcaaggaagtgcacaggcattggctgaagtagtgaaaaacacagagaacttcttaaaagagaatggtgaaaagctgtcacaggaagataaggctttgattgaacagaaacttaatgaagctaagataaagtgtgaacagcttaatttaaaagcagaacagtctaaaaaggagctggataaagttgtgacaacagcaatcaaggaagaaactgaaaaggtagcagcagtgaagcagctggaagagagcaaaaccaaaatagaaaaccttttggactggttgtcaaatgttgacaaagactcagaaagggcagggacaaaacacaaacaggtaatcgaacagaacgggacccattttcaagaaggtgatggcaagtcagcaattggagaagaggatgaagttaatggtaacctgttggagactgatgttgatgggcaagttggaaccactcaggagaatctgaatcagcaatatcagaaagttaaggcccaacacgagaagatcatctctcagcaccaagcagtgatcatagccactcagtctgcacaagtgttgcttgagaaacagggtcagtatctctctcctgaagaaaaagagaaactgcaaaagaacatgaaggaactgaaagtgcattatgaaactgcactggctgagtcagagaagaaaatgaagttaactcactctctgcaggaagaattagaaaagtttgatgctgactataccgagtttgagcactggctacagcagtcagaacaagaacttgaaaacctggaggcaggtgcagatgacatcaatggtttaatgaccaaattgaagaggcagaagagtttctcagaagacgttatttctcacaaaggtgacttgagatacatcacaatttctggaaacagagtgttggaagctgccaaatcttgcagcaagagagacggtggcaaggttgatacttctgcaacccacagagaagtgcagcgcaagttggatcatgctactgatcggttcaggtctctctactctaagtgcaatgttcttggaaataatcttaaagatctggtggataaatatcaacactatgaagatgcttcatgtggacttcttgctggactccaggcctgtgaggccacagcgagcaaacacttatctgaacctattgcggtggaccccaaaaatcttcaaaggcaattagaagagaccaaggctttgcaaggacagatatcaagtcagcaggttgctgtagagaaactgaagaaaacggctgaagtgcttttagatgccaggggatctttacttccagccaagaatgatatccagaaaacacttgatgacattgttgggagatatgaggatctgtccaagtctgttaatgaacgaaatgaaaaactccagataaccttgacccgttcactgagtgtgcaggatggcttggatgaaatgctggactggatgggaaatgtggaaagttctctgaaagaacaaggtcaagtgcctttaaactctactgctcttcaggatattatcagtaaaaacattatgttggaacaggatattgcaggtcgtcagagcagtataaatgccatgaatgaaaaagtgaagaaatttatggaaacaacagatccatccactgcatcctcactgcaagccaaaatgaaagacttgtctgctcggttttcagaagcaagtcataaacacaaagaaactcttgccaaaatggaggagctaaaaaccaaagtagaactgtttgagaacctctcagaaaagctccagacatttttagaaacaaaaactcaggctcttactgaagtagatgtgccaggaaaagatgttactgaattgtctcagtatatgcaggaatcaacttctgaatttttagaacacaagaaacatcttgaagttttgcatagtctcttgaaggagatatccagccatggcttaccaagtgataaggctttggtccttgaaaaaacaaataatttgtcaaagaaattcaaggaaatggaggataccatcaaagaaaaaaaagaagctgtaacttcttgtcaagaacagttggatgctttccaagttcttgttaaatcattgaagtcatggataaaagaaacaacaaaaaaagttcccattgtacagccttcttttggtgcagaggatttaggaaaatctttggaagacactaagaaattacaagaaaagtggagtttaaaaacaccagagattcagaaagtaaacaacagtgggatctcactatgtaacttaataagtgctgtgaccacccctgcaaaggcaatagcagcagttaaatcaggtggagcagtattaaatggtgaaggaacagccacaaatactgaggaattttgggcaaataaaggtttaacatccattaaaaaggacatgactgacataagtcatggttatgaagatcttggcctcttactcaaggacaaaatagcggaactgaacactaaactctccaaattgcaaaaggctcaggaagaatcaagtgcaatgatgcagtggttacagaaaatgaacaaaactgcaacaaaatggcagcagacacctgcacctacagatactgaagctgtgaagactcaagttgagcagaataagtcgtttgaggcagaactgaagcagaatgtaaacaaagtacaggagttgaaagacaaattgacagagctgttggaggagaacccagatactcctgaggcccccagatggaaacagatgttgacagaaatagattctaagtggcaagaactcaatcaattaacaattgatagacaacaaaaactggaagaatcctccaataatctaacccagttccagactgtagaggcccaattgaaacagtggcttgtggaaaaagaacttatggtcagtgttcttgggcccttgtcaattgacccaaatatgctaaacacacaaaggcagcaggtgcagattttgctgcaagaattcgccactcggaaacctcaatatgaacagctgacagcagctggtcagggcattctgagcaggcctggagaagacccttctttacgtgggattgtgaaagagcaactggcagctgtgacccaaaaatgggatagcctaacagggcaattgagtgacagatgtgactggattgaccaagccattgttaaaagcacacagtatcaaagcctgctgagaagcctttctgataaactgagtgacttggataataaactcagcagcagtctggctgtgagcacgcaccctgatgctatgaaccaacagttggaaacagcccaaaaaatgaagcaggagatacagcaggaaaagaagcagataaaagtggcccaggcactctgtgaggatttgtcagcactggttaaagaagagtacttgaaagcagaacttagtaggcaactagaaggcatcttaaaatcatttaaggatgttgaacagaaagcagagaatcatgtccagcaccttcagtcggcctgtgcaagctctcatcaatttcagcaaatgtctagagattttcaggcttggctggatacaaagaaagaagagcaaaacaaatctcatccaatatctgccaaactcgatgtcttggagtcattaattaaagatcataaagactttagtaaaactttgaccgctcagtctcatatgtatgaaaaaaccattgcagaaggtgaaaatctgttattaaaaacacaagggtctgagaaggcagccttacagttacagcttaatacaattaaaaccaattgggatacatttaataagcaggtgaaagaaagagaaaacaagttaaaagagtcattggaaaaagcccttaagtataaagagcaagtagagactctctggccatggatagacaaatgccaaaacaacctggaggaaataaaattttgcttggatcctgctgaaggagagaattctattgccaagttaaagtctctgcagaaggaaatggaccaacactttggtatggtagaattactgaacaacacagccaatagcttgctcagtgtctgtgagatagataaagaagttgttacagatgagaataagtcactgatccagaaggtggacatggtcactgaacaacttcacagtaagaaattctgtctggagaacatgactcagaagtttaaagaatttcaagaagtttccaaagaatctaaaaggcagcttcagtgtgcaaaggagcagctagatatccatgattcgctgggatcccaggcttacagtaacaaatacctgaccatgttgcaaactcagcagaaatcacttcaggccttgaagcatcaggtagatttggctaaaagacttgcacaggaccttgtggtagaggcctcagactcaaagggaacctctgatgttttattacaagtggaaaccatagctcaagagcatagtacactaagtcagcaggttgatgaaaagtgttctttcttagaaaccaagcttcagggcattgggcatttccagaataccattcgagaaatgttttctcagttcgcagagtttgatgatgaactggatagcatggctccagtggggagagatgcagaaacattgcaaaagcaaaaggaaactataaaagcctttctaaagaaactagaagccctcatggcaagcaatgacaatgccaataaaacctgcaagatgatgttagccacagaagaaacctctcctgaccttgttggaatcaaaagggacttggaggccttaagcaaacaatgcaacaagttactggaccgagcccaagccagagaagagcaggttgaagggacaattaagcgccttgaagaattttacagcaaattgaaagaattttctattctgctccagaaagccgaagaacatgaagagtcacaaggtcctgttggtatggaaacggagacaattaatcagcagcttaacatgttcaaggtattccagaaagaagagattgaacccttgcaaggtaaacagcaagatgtaaactggttaggtcaaggccttattcagagtgctgccaaaagcactagcactcagggcttggagcatgacctggatgatgtcaatgcacggtggaagactctcaataagaaggtggctcagcgagcagcccagctgcaggaggccttgctgcactgtgggaggttccaggatgccctggagtccctgctcagctggatggtggacactgaggagcttgtggccaatcagaagcccccgtcggctgagttcaaagtggtaaaggcccagatacaagaacaaaagcttctccagagattgttggatgaccgaaaatctacggtggaggtaatcaaacgagaaggagaaaaaattgctacaacagcagagcccgcagataaagtgaagattttgaaacagctcagtctcttggatagcagatgggaggcattgcttaataaagctgaaacaaggaatcgtcagttggaaggtatctcggtggtagcacagcaatttcatgaaaccttagaaccactgaacgagtggcttacaaccatagaaaagaggctggtgaattgtgaacccataggaacccaagcatctaaacttgaggaacaaattgcacagcacaaagccttagaagatgacatcatcaatcacaataaacatttacaccaggctgttagcattggccagtccttaaaggttttgagctccagggaggataaagatatggtgcagagtaaattagacttctctcaagtatggtacattgagattcaagagaaaagtcacagcaggtctgagctcctccagcaggccttatgtaatgctaagatttttggggaagatgaagttgaactgatgaactggctgaatgaagtgcatgacaaactgagcaagctctcagtccaggattacagcactgaggggctatggaagcagcagtctgaacttcgggttctgcaagaggacatcttactcaggaaacaaaatgtagatcaggctttactaaatggtttagaactacttaaacaaaccacaggtgatgaagttttaataattcaagataaattggaagccattaaagcaaggtacaaagacattactaaactgagcactgatgtggccaagactctggaacaggcgctgcagcttgcaaggcggctgcactccacacacgaagagctgtgtacctggctggacaaagtggaggtggaattactttcatatgaaactcaggttctgaaaggagaagaagcaagtcaagcacaaatgagaccaaaggaactgaaaaaggaagctaagaacaacaaagccttactggactcccttaatgaagtgagcagtgctttgctggaactggtaccatggagggcaagagaaggacttgagaaaatggtagctgaggacaatgagcgctaccgattagtgagcgacaccatcactcagaaggtggaggagatcgatgcagccattctgcgatcacagcagtttgaccaagcagctgatgctgagttatcctggattactgaaacagaaaaaaaattgatgtctctgggtgacatcaggcttgagcaagaccagacttctgctcagcttcaagttcaaaagacattcaccatggagattttgagacacaaggatattattgatgaccttgttaaatctgggcataaaatcatgaccgcatgcagtgaagaggaaaagcaatcaatgaagaaaaaactggacaaggtactgaagaactatgataccatctgccagattaattcagaaaggtatctgcagctggaacgggcacagtccctggttaaccaattctgggaaacatatgaagaactttggccatggctgacagaaacacaatcaatcatctctcagcttcccgccccagcccttgaatatgaaactctaaggcagcagcaggaagaacatcggcaactgcgtgagttgatagctgaacacaagcctcatatagataagatgaacaaaactgggccacagttactggaattgagccctggggaaggcttttctatccaagagaagtatgtggcagccgacaccctttacagtcaaattaaagaagatgtcaaaaagcgtgctgtggcactggatgaagccatttctcaatcaactcagttccatgacaagatagatcagatccttgagagcctggaacgcatcgtggaacgtctgaggcagccaccctctatctctgcagaggttgagaagatcaaggaacagatcagtgaaaataagaatgtgtcagtagacatggaaaagctacagccgttgtatgaaactcttaaacagaggggagaggaaatgattgctagatctggggggactgataaagacatatctgccaaagctgttcaggataagcttgaccaaatggttttcatttgggagaacatacacacactggtggaagagagggaagccaaactactggatgtgatggagctagcagaaaagttctggtgtgatcacatgtcattgatagttaccattaaagatactcaagatttcatccgggacctggaagatcctggaattgatccttcagtagtaaaacaacagcaagaagcagcagagaccataagggaagaaatagatggactacaggaggagctggatatagttattaacctaggttctgaactcattgcggcatgtggggagcctgataaacccattgtcaagaagagtatagatgagttaaattcagcatgggattctctaaataaagcttggaaagaccggattgacaaacttgaggaggcaatgcaggctgccgttcagtaccaggatggactgcaggcggtatttgactgggtagatattgcaggtggtaaattagcttcaatgtctccaattggaacagatctcgaaactgtcaagcagcagattgaagagctaaagcaatttaagtctgaggcctatcaacagcagatagaaatggaaagactgaatcatcaagcagagcttttgctaaagaaagtaacagaagagagtgacaaacacactgttcaagacccattaatggaactgaaattgatatgggatagcctggaggagagaatcatcaacagacagcataaactggagggtgctctattagccttgggtcagttccaacatgccctggatgagctcctggcatggctgacacacaccgagggcttgctaagtgagcagaaacctgttggaggagaccctaaagccattgaaattgaacttgccaagcatcatgtgctccaaaatgatgtattagcccatcagtccacagtggaagccgttaataaagcaggaaatgatctaattgaatcaagtgcaggagaagaagcaagcaaccttcagaacaagctagaggttttaaatcaacgctggcaaaatgttttggaaaaaacagaacaaaggaagcagcagctggatggtgccttgcgccaggccaaagggttccatggcgaaattgaggatttgcagcagtggctgactgacacggagcgtcatctgttggcatctaaaccgctgggaggtttaccggaaacagccaaggagcagcttaatgtccatatggaagtctgtgctgcctttgaagctaaagaagaaacatataagagtctgatgcagaaaggccagcagatgcttgcaagatgcccaaaatctgcagagacaaatattgaccaagacataaataacttgaaagaaaaatgggaatcggtggaaaccaaactcaatgaaaggaaaactaaactggaagaggctctcaacttggcaatggagttccacaattctctccaagacttcatcaactggcttactcaggctgaacagaccctaaatgtagcttctcggccaagtctcatcttggacacagtcttatttcaaattgacgaacacaaggtttttgccaatgaagtaaattctcatcgtgagcagataatagagctggacaaaactggaacccacctaaaatattttagtcagaaacaagatgttgttctaatcaagaatctacttatcagtgtacaaagtcgatgggaaaaagtggttcaacggttggtagagagaggaagatctttggatgatgcaaggaagagagccaagcagttccatgaagcttggagtaaacttatggagtggctagaagagtcagaaaagtctttggattctgaactggaaatcgcaaatgatccagacaaaataaaaacacaacttgcacaacataaggagtttcagaaatcactcggagccaagcattctgtctacgacaccaccaacaggactggacgttctctgaaggagaaaacctccctggctgatgacaacctgaaactggatgacatgctgagtgaactcagagacaaatgggataccatatgtggaaaatctgtggaaagacaaaacaaattggaggaagccctgttattttctggacaattcacagatgccctacaggctctcattgattggttatatagagttgaaccccagctggcagaagaccagcctgttcatggagacattgatttggtgatgaatctgatcgataatcacaaggccttccaaaaagagttggggaagaggaccagcagtgtgcaggccctgaagcgctcagcccgagaactcatagaaggcagtcgggatgactcctcctgggtcaaggtccagatgcaggaattaagcacacgctgggagaccgtgtgtgcactttctatatcaaagcaaacacggttagaagcagccctgcgtcaggcagaggaattccactcggtggtacatgccctcttggagtggctggctgaggcggagcaaaccctgcgtttccatggtgtcctcccagatgatgaggatgctctccggactctcattgatcagcataaagaattcatgaagaaactggaagaaaagagagctgaactaaataaagccaccactatgggcgacaccgttttggctatctgccaccccgactccatcactaccattaagcactggataacaatcatccgggcgaggtttgaggaggtgctggcctgggcaaagcaacatcagcagagattagcaagtgctctggctgggcttattgccaaacaggaattgttggaagctttgctggcttggttgcaatgggctgaaactacacttactgataaggataaagaagtcatcccccaggagatcgaagaggtgaaagcactcattgcagaacaccagaccttcatggaggaaatgaccagaaaacagcctgatgttgataaagtaacgaagacctataagaggagagctgctgatccttcctcattacaatcccatattccagtcttggataagggacgagcaggaagaaaacgctttccagcatcaagcttgtatccctctgggtcacagacacaaattgaaaccaaaaatcctagggtaaacttactggtgagcaaatggcagcaagtctggctcctggcgttggaaagaaggaggaaactcaatgatgccttggacagactagaggagctgagggaatttgctaactttgattttgatatctggcgcaaaaaatacatgcgatggatgaatcacaagaaatctcgagtgatggacttcttcaggagaattgataaagaccaggatgggaaaataacgcggcaggaatttattgatggaattctttcctcaaagtttccaaccagtcgcttggagatgagcgcagttgcagacatctttgacagagatggcgatggatatattgactactatgaatttgtagcagcccttcacccaaataaagatgcatataaacctatcacagatgccgacaaaatcgaagatgaggtgacaaggcaggtagctaagtgtaaatgtgcaaagcgatttcaagttgagcagattggtgataataaatacaggttcttcctgggaaatcagtttggagactcccagcaactgcgactggtccggatcctgcggagtactgtgatggttcgtgttggaggtggatggatggcacttgatgagttcttagtgaaaaatgatccttgcagggccaaaggaaggacaaacatggaactgcgtgagaagttcattttagcagatggtgccagccagggtatggctgctttccgaccccgaggccgaagatcccggccatcatcacgaggcgcttcacccaacagatccacttctgtgtccagtcaggctgcgcaggcggcctccccacaggtccctgccaccaccacacccaagattctccatcctttaacacgcaattatggtaaaccatggttgacaaacagcaaaatgtcaactccttgtaaagcagcagagtgctcagactttcccgtgccatctgcagagggaacgccaatacaaggaagcaagcttcgacttccaggatatttatcagggaaaggcttccactctggggaggacagtggcttgataacaactgcagctgccagagtccgaacacagtttgctgattccaagaagactcccagccgaccaggaagtcgagctggaagcaaagctggcagcagggccagcagccgccgaggcagtgatgcatcagactttgacatttcagaaatccagtccgtgtgctcagatgtggaaactgtcccccagacacacagacctacaccccgagcaggttctcggccatccacagcgaagccttcaaaaatccccacgccccagaggaaatcacctgccagcaaattggacaagtcctcaaagagatagtgcaattggttctaccaaggcccttccttgagcatttattatttaagtttgaacgatgtaaaatatggtgtagaaattcttgtgaaatattgcaagaggcgagtttaaaattctgcagatggccttatttgtgtatttgtctttttattttatctgtataattttttttgtcagatattctggggttaaagtcacatcatatgtgaggaggaaaagtttaacatgaactaacatttctgcactgtaacgtgccgggcacacactaaactcagttactgtacctacaggtaagtctacatcctctctgacagccacagcactacatcaatccctgacgttagggatacctcatgacattttcctgtttttatggaaactctgagaagctgaatgatacatgcaggggatattttttgagatgatttaaatgtaaaccaaaagatggaagacaaaaagacaaacacacccacacgcagtctttgcagtatctgacagagaactcacaggaagttacttcaagcacttgccagtactatgatattcaagtaccttgcagcatttctctgccattgctttcaatgaggccagaggcatcctggatattagacctattatactgtaagaatataagtataaagtgcgttcatatacatgtgaggttttcttttgcttgagtggacagtagcacctgtatcattgaactcattttgtatcagagcaattttgcttgcagaaagctatgaaataaaacacgtcccttaactgc

SEQ ID NO: 12858 - DNA, 18036 bp, Homo sapiens
cggcggccaggaaatgccgcagatgcgccgcgcagcatccccggtgaaggcagcgcgccggtcctcccgcaccgctgccgcggcctcggcccggcccgaagcacgcgcctcgtgcagggccagcagagcggtcagcgcggccgcagagggtccgggcgcccgccggcccccgcccgccctcgccgcacgccccgctcctccgcttggcgtggcgctgctcgtcgccgcccctgggctcgctgagatttgccgctgctgaaacccgagagggactcgggctcccggagccgggcggcccaccatcggcctgcccggaggcctgggcgtttcctttgccggccctggcgccggcagccccctgcgcccccgctctgcgtcttcggcttccgtgcttctccccagcgtgctgctccttcctcttttccagttcccaaggctgtgtcttgctgactgcgatactgtccgggggttacgagggggagaggggaatttgtcagtcatcgcttagataaacttcggcatggcgggttacctctcccctgctgcttacctgtacgtggaggagcaggagtatctccaggcctacgaggatgtcctggagaggtacaaagatgaacgggacaaagttcagaagaaaacatttacaaaatggataaatcagcatctcatgaaggttcgaaaacatgtgaatgatctctatgaagacttaagggatggacacaatttgatttctcttttagaggttctttcaggagataccttgcccagagaaaaaggtcggatgcgttttcacagactacagaatgtacaaattgcacttgactatttgaaaagacgccaggtgaaattagtgaatattagaaatgatgacataacagatggaaatcccaaattgactttgggattaatctggacaataattttgcactttcagatatctgatatccatgttactggagagtcagaggatatgtctgcaaaagagagattgctactctggacgcagcaggcaacagagggttatgctggaattcggtgtgaaaatttcactacctgctggagagatggaaaattatttaatgccatcattcataaatacaggccggacctgatagatatgaatactgttgctgttcaaagcaaccttgcaaatttagagcatgctttttacgtagcagaaaaaattggtgttataagacttctggaccctgaagatgtcgatgtctcctcacctgatgaaaaatcagtaataacttacgtgtcatctctctatgatgcatttcctaaagtccctgaaggtggggaaggcattggtgcaaatgatgttgaagtcaaatggattgaataccagaatatggtgaactacctcatccaatggattagacaccatgtgaccacaatgtctgagagaacatttcctaataatcctgtagaactgaaggcactttataatcagtatttacagtttaaagaaacagaaattccaccaaaggagacagaaaaatcaaaaattaaacgtctatataaattattagagatttggatagaatttggacgcatcaagctccttcaaggttatcatccaaatgacatagaaaaagagtgggggaaactcattattgccatgctagagagagagaaggcccttcgtccagaagtagaaaggttagaaatgttgcaacagattgccaacagagttcagagggacagtgtcatctgtgaagacaaactgattcttgctggaaatgctcttcagtctgattctaaaagattagaatcaggagtgcagtttcagaatgaagcagaaattgctgggtatatacttgaatgtgagaaccttttacgccagcatgtaattgatgtacagattcttattgatggaaaatactaccaggcagatcaattggtacagagggttgcaaaactgcgtgacgaaattatggccttaaggaacgaatgttcttctgtgtacagcaaaggacgcatactgacaacagaacagacaaagctcatgatatcaggaatcactcaaagtttaaactcaggatttgcacagaccttacaccctagtctgacctcagggctgacccagagtttaacaccttccctaacctcttctagtatgacttctggcctgtcatcagggatgacttcccgcctgactccatctgtcactccagcttatacacctggtttcccatcaggattagttccaaatttcagttcaggagtagagccaaattcattgcaaactttgaagttgatgcagatccgaaaaccccttctaaagtcttctttgctggatcaaaatttaacagaagaagaaatcaatatgaaatttgttcaggatcttttgaattgggttgatgagatgcaggtacaactggaccgcactgagtggggctcagatttgccaagtgttgaaagccatttagaaaatcataaaaatgttcatagagctattgaagaatttgaatctagtctcaaagaagctaaaatcagtgagattcaaatgacagcacctcttaaactgacttatgcagaaaagttgcacagattagagagtcagtatgcaaaactcttgaatacatccaggaatcaagaacggcaccttgatacactccataattttgtaagtcgtgcgactaatgaacttatttggttgaatgaaaaagaagaggaggaagttgcttatgactggagtgagagaaacaccaacatagctaggaaaaaagattatcatgctgaattaatgagagaacttgatcaaaaggaagaaaatattaaatcagttcaggagatagcagagcagctacttctagaaaatcatccagcccggttaactattgaggcctacagagcggcaatgcagacgcagtggagctggatcttacagctctgccagtgtgtggagcagcacataaaggagaacacagcgtatttcgagtttttcaatgatgccaaagaagctactgattacttaaggaatctaaaagatgccattcagcggaagtacagctgtgatagatcaagcagcattcacaagctagaagaccttgttcaggaatcaatggaagagaaagaagaacttctgcagtacaaaagcactatagcaaacctaatgggaaaagcaaaaacaataattcaactgaagccaaggaattctgactgtccactcaaaacttctattccgatcaaagctatctgtgactacagacaaattgagataaccatttacaaagacgatgaatgtgttttggcgaataactctcatcgtgctaaatggaaggtcattagtcctactgggaatgaggctatggtcccatctgtgtgcttcaccgttcctccaccaaacaaagaagcggtggaccttgccaacagaattgagcaacagtatcagaatgtcctgactctttggcatgagtctcacataaacatgaagagtgtagtatcctggcattatctcatcaatgaaattgatagaattcgagctagcaatgtggcttcaataaagacaatgctacctggtgaacatcagcaagttctaagtaatctacaatctcgttttgaagattttctggaagatagccaggaatcccaagtcttttcaggctcagatataacacaactggaaaaggaggttaatgtatgtaagcagtattatcaagaacttcttaaatctgcagaaagagaggagcaagaggaatcagtttataatctctacatctctgaagttcgaaacattagacttcggttagagaactgtgaagatcggctgattagacagattcgaactcccctggaaagagatgatttgcatgaaagtgtgttcagaatcacagaacaggagaaactaaagaaagagctggaacgacttaaagatgatttgggaacaatcacaaataagtgtgaggagtttttcagtcaagcagcagcctcttcatcagtccctaccctacgatcagagcttaatgtggtccttcagaacatgaaccaagtctattctatgtcttccacttacatagataagttgaaaactgttaacttggtgttaaaaaacactcaagctgcagaagccctcgtaaaactctatgaaactaaactgtgtgaagaagaagcagttatagctgacaagaataatattgagaatctaataagtactttaaagcaatggagatctgaagtagatgaaaagagacaggtattccatgccttagaggatgagttgcagaaagctaaagccatcagtgatgaaatgtttaaaacgtataaagaacgggaccttgattttgactggcacaaagaaaaagcagatcaattagttgaaaggtggcaaaatgttcatgtgcagattgacaacaggttacgggacttagagggcattggcaaatcactgaagtactacagagacacttaccatcctttagatgattggatccagcaggttgaaactactcagagaaagattcaggaaaatcagcctgaaaatagtaaaaccctagccacacagttgaatcaacagaagatgctggtgtccgaaatagaaatgaaacagagcaaaatggacgagtgtcaaaaatatgcagaacagtactcagctacagtgaaggactatgaattacaaacaatgacctaccgggccatggtagattcacaacaaaaatctccagtgaaacgccgaagaatgcagagttcagcagatctcattattcaagagttcatggacctaaggactcgatatactgccctggtcactctcatgacacaatatattaaatttgctggtgattcattgaagaggctggaagaggaggagaagtcactggaagaagaaaagaaagaacatgttgaaaaagccaaagaattgcaaaaatgggtatcaaatatcagcaagacattgaaagatgcagagaaggctggaaaacctcccttctctaagcaaaagatttccagtgaggaaatatcaaccaagaaggaacaattatcggaagcacttcaaactatacagctttttttggcaaaacatggagacaaaatgacagatgaagaaagaaatgaattggaaaaacaagtgaaaactcttcaggaaagttataatttattattcagtgaatctctgaaacagctacaagaatcacaaacctcaggagatgtaaaggtagaggagaagattgtagcagagcgtcagcaggagtataaagagaaactccaagggatatgtgatcttcttacccaaactgaaaaccgcctaattggtcaccaagaagccttcatgattggagatggcacagttgagttaaagaaatatcagtccaagcaagaggaattacagaaagatatgcaaggaagtgcacaggcattggctgaagtagtgaaaaacacagagaacttcttaaaagagaatggtgaaaagctgtcacaggaagataaggctttgattgaacagaaacttaatgaagctaagataaagtgtgaacagcttaatttaaaagcagaacagtctaaaaaggagctggataaagttgtgacaacagcaatcaaggaagaaactgaaaaggtagcagcagtgaagcagctggaagagagcaaaaccaaaatagaaaaccttttggactggttgtcaaatgttgacaaagactcagaaagggcagggacaaaacacaaacaggtaatcgaacagaacgggacccattttcaagaaggtgatggcaagtcagcaattggagaagaggatgaagttaatggtaacctgttggagactgatgttgatgggcaagttggaaccactcaggagaatctgaatcagcaatatcagaaagttaaggcccaacacgagaagatcatctctcagcaccaagcagtgatcatagccactcagtctgcacaagtgttgcttgagaaacagggtcagtatctctctcctgaagaaaaagagaaactgcaaaagaacatgaaggaactgaaagtgcattatgaaactgcactggctgagtcagagaagaaaatgaagttaactcactctctgcaggaagaattagaaaagtttgatgctgactataccgagtttgagcactggctacagcagtcagaacaagaacttgaaaacctggaggcaggtgcagatgacatcaatggtttaatgaccaaattgaagaggcagaagagtttctcagaagacgttatttctcacaaaggtgacttgagatacatcacaatttctggaaacagagtgttggaagctgccaaatcttgcagcaagagagacggtggcaaggttgatacttctgcaacccacagagaagtgcagcgcaagttggatcatgctactgatcggttcaggtctctctactctaagtgcaatgttcttggaaataatcttaaagatctggtggataaatatcaacactatgaagatgcttcatgtggacttcttgctggactccaggcctgtgaggccacagcgagcaaacacttatctgaacctattgcggtggaccccaaaaatcttcaaaggcaattagaagagaccaaggctttgcaaggacagatatcaagtcagcaggttgctgtagagaaactgaagaaaacggctgaagtgcttttagatgccaggggatctttacttccagccaagaatgatatccagaaaacacttgatgacattgttgggagatatgaggatctgtccaagtctgttaatgaacgaaatgaaaaactccagataaccttgacccgttcactgagtgtgcaggatggcttggatgaaatgctggactggatgggaaatgtggaaagttctctgaaagaacaaggtcaagtgcctttaaactctactgctcttcaggatattatcagtaaaaacattatgttggaacaggatattgcaggtcgtcagagcagtataaatgccatgaatgaaaaagtgaagaaatttatggaaacaacagatccatccactgcatcctcactgcaagccaaaatgaaagacttgtctgctcggttttcagaagcaagtcataaacacaaagaaactcttgccaaaatggaggagctaaaaaccaaagtagaactgtttgagaacctctcagaaaagctccagacatttttagaaacaaaaactcaggctcttactgaagtagatgtgccaggaaaagatgttactgaattgtctcagtatatgcaggaatcaacttctgaatttttagaacacaagaaacatcttgaagttttgcatagtctcttgaaggagatatccagccatggcttaccaagtgataaggctttggtccttgaaaaaacaaataatttgtcaaagaaattcaaggaaatggaggataccatcaaagaaaaaaaagaagctgtaacttcttgtcaagaacagttggatgctttccaagttcttgttaaatcattgaagtcatggataaaagaaacaacaaaaaaagttcccattgtacagccttcttttggtgcagaggatttaggaaaatctttggaagacactaagaaattacaagaaaagtggagtttaaaaacaccagagattcagaaagtaaacaacagtgggatctcactatgtaacttaataagtgctgtgaccacccctgcaaaggcaatagcagcagttaaatcaggtggagcagtattaaatggtgaaggaacagccacaaatactgaggaattttgggcaaataaaggtttaacatccattaaaaaggacatgactgacataagtcatggttatgaagatcttggcctcttactcaaggacaaaatagcggaactgaacactaaactctccaaattgcaaaaggctcaggaagaatcaagtgcaatgatgcagtggttacagaaaatgaacaaaactgcaacaaaatggcagcagacacctgcacctacagatactgaagctgtgaagactcaagttgagcagaataagtcgtttgaggcagaactgaagcagaatgtaaacaaagtacaggagttgaaagacaaattgacagagctgttggaggagaacccagatactcctgaggcccccagatggaaacagatgttgacagaaatagattctaagtggcaagaactcaatcaattaacaattgatagacaacaaaaactggaagaatcctccaataatctaacccagttccagactgtagaggcccaattgaaacagtggcttgtggaaaaagaacttatggtcagtgttcttgggcccttgtcaattgacccaaatatgctaaacacacaaaggcagcaggtgcagattttgctgcaagaattcgccactcggaaacctcaatatgaacagctgacagcagctggtcagggcattctgagcaggcctggagaagacccttctttacgtgggattgtgaaagagcaactggcagctgtgacccaaaaatgggatagcctaacagggcaattgagtgacagatgtgactggattgaccaagccattgttaaaagcacacagtatcaaagcctgctgagaagcctttctgataaactgagtgacttggataataaactcagcagcagtctggctgtgagcacgcaccctgatgctatgaaccaacagttggaaacagcccaaaaaatgaagcaggagatacagcaggaaaagaagcagataaaagtggcccaggcactctgtgaggatttgtcagcactggttaaagaagagtacttgaaagcagaacttagtaggcaactagaaggcatcttaaaatcatttaaggatgttgaacagaaagcagagaatcatgtccagcaccttcagtcggcctgtgcaagctctcatcaatttcagcaaatgtctagagattttcaggcttggctggatacaaagaaagaagagcaaaacaaatctcatccaatatctgccaaactcgatgtcttggagtcattaattaaagatcataaagactttagtaaaactttgaccgctcagtctcatatgtatgaaaaaaccattgcagaaggtgaaaatctgttattaaaaacacaagggtctgagaaggcagccttacagttacagcttaatacaattaaaaccaattgggatacatttaataagcaggtgaaagaaagagaaaacaagttaaaagagtcattggaaaaagcccttaagtataaagagcaagtagagactctctggccatggatagacaaatgccaaaacaacctggaggaaataaaattttgcttggatcctgctgaaggagagaattctattgccaagttaaagtctctgcagaaggaaatggaccaacactttggtatggtagaattactgaacaacacagccaatagcttgctcagtgtctgtgagatagataaagaagttgttacagatgagaataagtcactgatccagaaggtggacatggtcactgaacaacttcacagtaagaaattctgtctggagaacatgactcagaagtttaaagaatttcaagaagtttccaaagaatctaaaaggcagcttcagtgtgcaaaggagcagctagatatccatgattcgctgggatcccaggcttacagtaacaaatacctgaccatgttgcaaactcagcagaaatcacttcaggccttgaagcatcaggtagatttggctaaaagacttgcacaggaccttgtggtagaggcctcagactcaaagggaacctctgatgttttattacaagtggaaaccatagctcaagagcatagtacactaagtcagcaggttgatgaaaagtgttctttcttagaaaccaagcttcagggcattgggcatttccagaataccattcgagaaatgttttctcagttcgcagagtttgatgatgaactggatagcatggctccagtggggagagatgcagaaacattgcaaaagcaaaaggaaactataaaagcctttctaaagaaactagaagccctcatggcaagcaatgacaatgccaataaaacctgcaagatgatgttagccacagaagaaacctctcctgaccttgttggaatcaaaagggacttggaggccttaagcaaacaatgcaacaagttactggaccgagcccaagccagagaagagcaggttgaagggacaattaagcgccttgaagaattttacagcaaattgaaagaattttctattctgctccagaaagccgaagaacatgaagagtcacaaggtcctgttggtatggaaacggagacaattaatcagcagcttaacatgttcaaggtattccagaaagaagagattgaacccttgcaaggtaaacagcaagatgtaaactggttaggtcaaggccttattcagagtgctgccaaaagcactagcactcagggcttggagcatgacctggatgatgtcaatgcacggtggaagactctcaataagaaggtggctcagcgagcagcccagctgcaggaggccttgctgcactgtgggaggttccaggatgccctggagtccctgctcagctggatggtggacactgaggagcttgtggccaatcagaagcccccgtcggctgagttcaaagtggtaaaggcccagatacaagaacaaaagcttctccagagattgttggatgaccgaaaatctacggtggaggtaatcaaacgagaaggagaaaaaattgctacaacagcagagcccgcagataaagtgaagattttgaaacagctcagtctcttggatagcagatgggaggcattgcttaataaagctgaaacaaggaatcgtcagttggaaggtatctcggtggtagcacagcaatttcatgaaaccttagaaccactgaacgagtggcttacaaccatagaaaagaggctggtgaattgtgaacccataggaacccaagcatctaaacttgaggaacaaattgcacagcacaaagccttagaagatgacatcatcaatcacaataaacatttacaccaggctgttagcattggccagtccttaaaggttttgagctccagggaggataaagatatggtgcagagtaaattagacttctctcaagtatggtacattgagattcaagagaaaagtcacagcaggtctgagctcctccagcaggccttatgtaatgctaagatttttggggaagatgaagttgaactgatgaactggctgaatgaagtgcatgacaaactgagcaagctctcagtccaggattacagcactgaggggctatggaagcagcagtctgaacttcgggttctgcaagaggacatcttactcaggaaacaaaatgtagatcaggctttactaaatggtttagaactacttaaacaaaccacaggtgatgaagttttaataattcaagataaattggaagccattaaagcaaggtacaaagacattactaaactgagcactgatgtggccaagactctggaacaggcgctgcagcttgcaaggcggctgcactccacacacgaagagctgtgtacctggctggacaaagtggaggtggaattactttcatatgaaactcaggttctgaaaggagaagaagcaagtcaagcacaaatgagaccaaaggaactgaaaaaggaagctaagaacaacaaagccttactggactcccttaatgaagtgagcagtgctttgctggaactggtaccatggagggcaagagaaggacttgagaaaatggtagctgaggacaatgagcgctaccgattagtgagcgacaccatcactcagaaggtggaggagatcgatgcagccattctgcgatcacagcagtttgaccaagcagctgatgctgagttatcctggattactgaaacagaaaaaaaattgatgtctctgggtgacatcaggcttgagcaagaccagacttctgctcagcttcaagttcaaaagacattcaccatggagattttgagacacaaggatattattgatgaccttgttaaatctgggcataaaatcatgaccgcatgcagtgaagaggaaaagcaatcaatgaagaaaaaactggacaaggtactgaagaactatgataccatctgccagattaattcagaaaggtatctgcagctggaacgggcacagtccctggttaaccaattctgggaaacatatgaagaactttggccatggctgacagaaacacaatcaatcatctctcagcttcccgccccagcccttgaatatgaaactctaaggcagcagcaggaagaacatcggcaactgcgtgagttgatagctgaacacaagcctcatatagataagatgaacaaaactgggccacagttactggaattgagccctggggaaggcttttctatccaagagaagtatgtggcagccgacaccctttacagtcaaattaaagaagatgtcaaaaagcgtgctgtggcactggatgaagccatttctcaatcaactcagttccatgacaagatagatcagatccttgagagcctggaacgcatcgtggaacgtctgaggcagccaccctctatctctgcagaggttgagaagatcaaggaacagatcagtgaaaataagaatgtgtcagtagacatggaaaagctacagccgttgtatgaaactcttaaacagaggggagaggaaatgattgctagatctggggggactgataaagacatatctgccaaagctgttcaggataagcttgaccaaatggttttcatttgggagaacatacacacactggtggaagagagggaagccaaactactggatgtgatggagctagcagaaaagttctggtgtgatcacatgtcattgatagttaccattaaagatactcaagatttcatccgggacctggaagatcctggaattgatccttcagtagtaaaacaacagcaagaagcagcagagaccataagggaagaaatagatggactacaggaggagctggatatagttattaacctaggttctgaactcattgcggcatgtggggagcctgataaacccattgtcaagaagagtatagatgagttaaattcagcatgggattctctaaataaagcttggaaagaccggattgacaaacttgaggaggcaatgcaggctgccgttcagtaccaggatggactgcaggcggtatttgactgggtagatattgcaggtggtaaattagcttcaatgtctccaattggaacagatctcgaaactgtcaagcagcagattgaagagctaaagcaatttaagtctgaggcctatcaacagcagatagaaatggaaagactgaatcatcaagcagagcttttgctaaagaaagtaacagaagagagtgacaaacacactgttcaagacccattaatggaactgaaattgatatgggatagcctggaggagagaatcatcaacagacagcataaactggagggtgctctattagccttgggtcagttccaacatgccctggatgagctcctggcatggctgacacacaccgagggcttgctaagtgagcagaaacctgttggaggagaccctaaagccattgaaattgaacttgccaagcatcatgtgctccaaaatgatgtattagcccatcagtccacagtggaagccgttaataaagcaggaaatgatctaattgaatcaagtgcaggagaagaagcaagcaaccttcagaacaagctagaggttttaaatcaacgctggcaaaatgttttggaaaaaacagaacaaaggaagcagcagctggatggtgccttgcgccaggccaaagggttccatggcgaaattgaggatttgcagcagtggctgactgacacggagcgtcatctgttggcatctaaaccgctgggaggtttaccggaaacagccaaggagcagcttaatgtccatatggaagtctgtgctgcctttgaagctaaagaagaaacatataagagtctgatgcagaaaggccagcagatgcttgcaagatgcccaaaatctgcagagacaaatattgaccaagacataaataacttgaaagaaaaatgggaatcggtggaaaccaaactcaatgaaaggaaaactaaactggaagaggctctcaacttggcaatggagttccacaattctctccaagacttcatcaactggcttactcaggctgaacagaccctaaatgtagcttctcggccaagtctcatcttggacacagtcttatttcaaattgacgaacacaaggtttttgccaatgaagtaaattctcatcgtgagcagataatagagctggacaaaactggaacccacctaaaatattttagtcagaaacaagatgttgttctaatcaagaatctacttatcagtgtacaaagtcgatgggaaaaagtggttcaacggttggtagagagaggaagatctttggatgatgcaaggaagagagccaagcagttccatgaagcttggagtaaacttatggagtggctagaagagtcagaaaagtctttggattctgaactggaaatcgcaaatgatccagacaaaataaaaacacaacttgcacaacataaggagtttcagaaatcactcggagccaagcattctgtctacgacaccaccaacaggactggacgttctctgaaggagaaaacctccctggctgatgacaacctgaaactggatgacatgctgagtgaactcagagacaaatgggataccatatgtggaaaatctgtggaaagacaaaacaaattggaggaagccctgttattttctggacaattcacagatgccctacaggctctcattgattggttatatagagttgaaccccagctggcagaagaccagcctgttcatggagacattgatttggtgatgaatctgatcgataatcacaaggccttccaaaaagagttggggaagaggaccagcagtgtgcaggccctgaagcgctcagcccgagaactcatagaaggcagtcgggatgactcctcctgggtcaaggtccagatgcaggaattaagcacacgctgggagaccgtgtgtgcactttctatatcaaagcaaacacggttagaagcagccctgcgtcaggcagaggaattccactcggtggtacatgccctcttggagtggctggctgaggcggagcaaaccctgcgtttccatggtgtcctcccagatgatgaggatgctctccggactctcattgatcagcataaagaattcatgaagaaactggaagaaaagagagctgaactaaataaagccaccactatgggcgacaccgttttggctatctgccaccccgactccatcactaccattaagcactggataacaatcatccgggcgaggtttgaggaggtgctggcctgggcaaagcaacatcagcagagattagcaagtgctctggctgggcttattgccaaacaggaattgttggaagctttgctggcttggttgcaatgggctgaaactacacttactgataaggataaagaagtcatcccccaggagatcgaagaggtgaaagcactcattgcagaacaccagaccttcatggaggaaatgaccagaaaacagcctgatgttgataaagtaacgaagacctataagaggagagctgctgatccttcctcattacaatcccatattccagtcttggataagggacgagcaggaagaaaacgctttccagcatcaagcttgtatccctctgggtcacagacacaaattgaaaccaaaaatcctagggtaaacttactggtgagcaaatggcagcaagtctggctcctggcgttggaaagaaggaggaaactcaatgatgccttggacagactagaggagctgagggaatttgctaactttgattttgatatctggcgcaaaaaatacatgcgatggatgaatcacaagaaatctcgagtgatggacttcttcaggagaattgataaagaccaggatgggaaaataacgcggcaggaatttattgatggaattctttcctcaaagtttccaaccagtcgcttggagatgagcgcagttgcagacatctttgacagagatggcgatggatatattgactactatgaatttgtagcagcccttcacccaaataaagatgcatataaacctatcacagatgccgacaaaatcgaagatgaggtgacaaggcaggtagctaagtgtaaatgtgcaaagcgatttcaagttgagcagattggtgataataaatacaggttcttcctgggaaatcagtttggagactcccagcaactgcgactggtccggatcctgcggagtactgtgatggttcgtgttggaggtggatggatggcacttgatgagttcttagtgaaaaatgatccttgcagggccaaaggaaggacaaacatggaactgcgtgagaagttcattttagcagatggtgccagccagggtatggctgctttccgaccccgaggccgaagatcccggccatcatcacgaggcgcttcacccaacagatccacttctgtgtccagtcaggctgcgcaggcggcctccccacaggtccctgccaccaccacacccaagattctccatcctttaacacgcaattatggtaaaccatggttgacaaacagcaaaatgtcaactccttgtaaagcagcagagtgctcagactttcccgtgccatctgcagagggaacgccaatacaaggaagcaagcttcgacttccaggatatttatcagggaaaggcttccactctggggaggacagtggcttgataacaactgcagctgccagagtccgaacacagtttgctgattccaagaagactcccagccgaccaggaagtcgagctggaagcaaagctggcagcagggccagcagccgccgaggcagtgatgcatcagactttgacatttcagaaatccagtccgtgtgctcagatgtggaaactgtcccccagacacacagacctacaccccgagcaggttctcggccatccacagcgaagccttcaaaaatccccacgccccagaggaaatcacctgccagcaaattggacaagtcctcaaagagatagtgcaattggttctaccaaggcccttccttgagcatttattatttaagtttgaacgatgtaaaatatggtgtagaaattcttgtgaaatattgcaagaggcgagtttaaaattctgcagatggccttatttgtgtatttgtctttttattttatctgtataattttttttgtcagatattctggggttaaagtcacatcatatgtgaggaggaaaagtttaacatgaactaacatttctgcactgtaacgtgccgggcacacactaaactcagttactgtacctacaggtaagtctacatcctctctgacagccacagcactacatcaatccctgacgttagggatacctcatgacattttcctgtttttatggaaactctgagaagctgaatgatacatgcaggggatattttttgagatgatttaaatgtaaaccaaaagatggaagacaaaaagacaaacacacccacacgcagtctttgcagtatctgacagagaactcacaggaagttacttcaagcacttgccagtactatgatattcaagtaccttgcagcatttctctgccattgctttcaatgaggccagaggcatcctggatattagacctattatactgtaagaatataagtataaagtgcgttcatatacatgtgaggttttcttttgcttgagtggacagtagcacctgtatcattgaactcattttgtatcagagcaattttgcttgcagaaagctatgaaataaaacacgtcccttaactgcattgctatggaattaattttttttccccagggaaaactagtgtatttttttatgagcaatatcaatttggagtgaccaaaagatacttaaaaatgggtttattttgatttctcatctgaaataatcatgttctggtattatatctatctatatttaataaatatatacattttaatttattatgtgtactcacatactatagaaagatattagtatgcatttaataaaacatattcacttgaaaaaaaaaaaaaaa

SEQ ID NO: 12859 - DNA, 2945 bp, Homo sapiens
gccccggccacggcgccgcccctgttctcccggccccgctccaccggggctgacggactgacggccaacacagccggctccgggatgagcgcacggacggtattctgaagtctcaggaaactggaccatttaaatgtgcatggcccatgagaaaggcttataagaagccatggcactcccctttcaaaaagagctggagaaatacaagaacattgatgaagatgagcttcttggcaaactctcagaagaggaactgaaacagttggaaaatgttctagatgacctagatcctgagagtgccatgctgccagctggatttcgacagaaagaccagacacagaaggcagccaccggcccctttgaccgcgagcacctcctcatgtacctggagaaggaggctttggaacagaaagacagagaggactttgtgcccttcactggagaaaagaaagggagagtctttatccctaaagaaaagcctatagaaactcgtaaagaagaaaaagtgacccttgacccagaactggaagaagctttggccagtgcctctgacaccgaactctatgatcttgcagctgtccttggagtacacaatttgctcaacaatccaaagttcgatgaagaaacagccaacaataaaggtggcaaaggacctgtcagaaatgttgtcaaaggtgaaaaagtaaagccagtatttgaggaaccaccaaatcccacaaatgtggaaataagcctgcagcagatgaaagccaatgatcctagcttgcaagaagtcaacctcaacaacattaagaacattccaattccaaccctgagggaatttgcaaaggctctggagaccaacactcacgtgaagaagttcagcctggccgcaactcgcagcaatgaccctgtggccattgcttttgcagacatgctgaaagtaaacaagaccttgacaagtctaaacatagaatccaattttatcactggaactgggatcctggccctggtagaggcactgaaagaaaatgacaccttgacagaaatcaagattgacaaccagaggcagcagttgggaacagctgtagagatggaaattgcccagatgctggaggagaattcaaggatcctcaagtttggataccagtttaccaagcaagggccacgaacaagggtggcagctgccatcacaaagaataatgacctggttcgtaagaagagagttgaagcagaccgaaggtaaacttccttgaggagaagtgaagtttcactgtggtatggccattgaaaaacaaaaactcttcttcttccccatcaggaccattttatcaaagttcgttcatttccgttaaccacataactaataatttaattgttattcttttttagcactacttatttatcttggattttgtaatatatgcaattgttttatttgctcatgggcacttctggcaacttgacaaatggaccgatgcagattttagagagtgacgacatggaaaatgaatttaaccactttcttattgggttgtcttgctttcttacatgaacttgtttttttaatcactgaaaggaatttagtgtataatatgtgtttgtaactgtgattatgatagaggcctatctctgtttacatgcatagctttgagttaggctaaatacatcagaagtgttctactgaccacataagaagttagtattgccaatctttcactgcatgtgaaaatgtgaccaatttagcacaaattctctcttagttccagaaaaatcagtaaatgcacatgccctgttgattggagatcagtagtgtcatcttcataaagcaagacaacattatgacactttaaaacagtagcaaagaagtctatttattaacccacaaatgtagcatcaagccagactcacaggtagcaaaatgaattacacacctacttttactgactattcaacataaattgaatctttaacatgaccttaaaggctatttacaaagctgttttaaagtttttcaaacatgatagaaattttctaaattttagtaagagagaagcttttaaaacagtacattcctgaataaaacaacaatattgtatcttaatcaaggctgtctgatgcagatgattgcattttttggcaaattttagaagcatttattgctttgtctttagtgtaacaagatcacaggattaaatataaacattcaggttaattatctagatttttgtccacagtatatgatccatccagacatttgcaaacgtcaggagaaaaatgtgaattatttatccagatgcatgtcatctcaaggacaaagcctgtgaaagtacaagtgagatggttgcattgtagtatgcattaatctttcaatgtagtggtgtaaaaatgcagtgctaaactaatgaagcaggtgactgcagcctttggctcaagctcacaactctgataactgtcagtgcctgaggttgtgattggtgacattctgacactgcccaaggcaactcaccctctattcctcctttctcccctccctttcttccaattcattgtcttttttttcctcttttctctgtaatttgttactaaacaaattccagaatttgtttagtagctgagtgttcctgagttgcctagtagcaataaaacaagtgaataggaaaataattaatatattattctatttagcttgtaaaacacatggaatctgtttaagatagcccttgtaaaattgaacatttacctgtattgtaagtacccacatctgtgtctctgaagtcctttgaaacatctcattatcttgaaatttttttaatgtttgagaacaccataagcagaatattctaacacctttggcccctgaaaatcctttaattagtttatggcttcatctccttatctatttaaaaaacatagtaaataatgttttatggttttcaaaaaaaaaaaaaaaaaaaaaaaaaaaa

SEQ ID NO: 12860 - DNA, 3004 bp, Homo sapiens
gccacgcgtgcgcttaggcgccgctgagcgctgactgggtgcgagtggggaagctgctaacccgacccggattggcgctgaggtggcccgtggggcagggcagatgattctggaccagatgaagcctgaggagccttccagctctaagatagcaggataggagacttctaagattggagctgcagaagacttgccagcccaccagcacaatgtcaggaagccatacacctgcctgtggccctttctcagccctgactccgagcatatggccccaggagatcttggccaagtacacgcagaaggaagagtcagcagagcaaccagagttctactacgatgagtttggtttccgtgtgtacaaggaagaaggtgatgagcctggctccagtctgctggcgaactcccctctgatggaggatgctccacagaggctgcggtggcaggcccacctggagttcacccataaccacgatgtgggggatctcacctgggacaagattgccgtctccctaccccgctctgagaagctccgctccctggtgctggccggcatcccacatggcatgaggccacagctgtggatgcggctctctggggccctgcagaagaagaggaactctgagctgtcctaccgcgagattgtgaagaacagctccaacgatgagaccatcgctgccaagcagatcgagaaggacctgctccgcaccatgcccagcaacgcctgcttcgccagcatgggtagcatcggggtgccccgcctgcgcagggtgctccgggccctggcctggctctacccagagatcggctactgccagggcaccggcatggtggccgcctgcctcctgctgttcctggaggaggaggacgccttctggatgatgtctgccatcatcgaggacctgctccccgcctcctacttcagcaccaccctgctgggtgtccagactgaccagcgggtcctgcgccacctcattgtccagtacctgcctcgcctggacaagctgctccaggagcatgacattgagctgtccctgatcacactgcactggttcctcacggccttcgccagcgtggtggacatcaagctgctcctgcgcatctgggacctgtttttctacgagggctcccgggtgctgttccagctcacgctgggcatgctgcacctcaaggaggaagagctgatccagtcagagaactcggcctccatcttcaacacgctatcggatatcccgtcgcagatggaggacgcggagctgcttctgggggtggccatgcggctggccggctccctcaccgatgtggccgtggagactcagcgccgcaagcacctggcctatctcattgcagaccagggccagctcctgggggccggcaccctcaccaacctctctcaggttgttcgccgcaggacccagcggaggaagtccaccatcactgctctgctcttcggggaggatgacctggaggcactcaaggccaagaacatcaagcagacggaactggtggctgacctccgggaagccatcctgcgcgtggcacgccacttccagtgcacagaccccaaaaactgcagcgtggagctgactccagactatagcatggagagccaccagcgggaccacgagaactacgtggcgtgctcacgcagccaccggcgccgagccaaggccctgctggactttgagcggcacgacgacgacgagctgggcttccgcaagaacgacatcatcacaatcgtgtctcagaaggacgagcactgctgggtgggggagctcaacggcctgcgaggctggtttccagccaagttcgtggaagtcctggatgagcgcagcaaagagtactccatcgcgggggatgactcggtgacggagggggtcacagacctcgtgcgagggaccctctgcccggcccttaaggccctgttcgaacatggactgaagaagccatccctgcttgggggcgcctgccacccctggctgtttatcgaggaggctgcaggccgggaggtcgagagagactttgcctccgtgtattcccgtctggtgctctgtaagaccttcaggttggatgaagatggcaaagtcctgaccccggaggagctgctctaccgggctgtgcagtctgtgaacgtgacccacgatgcagtgcatgcacaaatggatgtgaagctccgctcactgatctgcgtggggctcaatgagcaggtgctgcacctgtggctggaggtgctctgctccagcctgcccaccgtggagaagtggtaccagccctggtccttcctgcgcagcccgggctgggtccagatcaagtgtgagctccgagtcctctgctgctttgccttcagcctctcccaggactgggagctccctgcgaagagagaggcgcagcagcccctgaaggagggcgtccgggacatgctggtgaagcaccacctcttcagctgggatgtggacgggtgaccccctcctccccagcccaacctcgggcctgcgtctgaggtggcccaggaccccaagctgcagagcccagggaagagcagctccagagccctggccggggccgcgggatatcaatatcaggctgccccactccacgttccccagcacatcccaggtggtgggagcagagggtaccctgccccaccagggtccttagggatgctctaggccaaaccacagtttgtaccaaaaaccttgtgaggaggtgggggagccatgtctgtgctcaggaagagggaaggggatgggggtggctagtaggctcctggcctctttggtttataaataaactgtgtctgtctttgagaaagcacctacctgtcttctgtgcagctagggctgcagagctgtattcaggtccaaggttctgcccttccttgagtggtctagaaggcactgcgtggcccctcagatgctgggacacaacagacccgggacccagctgtgctacccaccccttccatggactgaataagatggactaacaggccaaaaaaaaaaaaaaa

SEQ ID NO: 12861 - DNA, 1251 bp, Homo sapiens
ggcctgggcctctctgcctgctgtagccgtctgccgcgcccttgttcctgcagctgtccagttatcttttgactgccacatatggaccccaaaagatctcaaaaggaaagtgtcctcattacaggaggaagtggctattttggttttcgcctgggctgtgccctgaaccaaaatggagtccatgtgattctgtttgacatcagcagccctgctcaaaccattccagaaggaatcaagtttatacaaggagacatccgccacctgtctgacgtagagaaagccttccaggatgcagacgtcacttgtgtgttccatattgcctcttatggtatgtcagggcgggagcaactcaatcgaaacctgatcaaagaagtcaacgtcaggggcacagacaacatcctccaggtttgccaaaggagaagggtgcccaggttagtttacaccagcactttcaatgtcatctttggaggtcaagttatcagaaatggggatgaatctctgccctacctgcctcttcacctccaccctgatcactactctcggacaaagtcaattgcagagcagaaggtgctggaggcgaatgctacacccctggacagaggcgacggtgtcttaagaacctgcgctctgaggccagctggcatctatgggcctggagaacaaagacaccttcccaggatagtcagctacatcgagaagggtctgttcaagtttgtctacggggaccccaggagcctggttgagtttgtccacgtggataacttggtgcaggctcacattctggcctcagaagccctgagagctgacaagggccatattgcctctgggcagccctacttcatctcagatggcagacccgtgaacaactttgagttcttccggcctctggttgagggcctgggctacacattcccgtctacccgcctgccattgaccttggtctactgctttgcttttctaacagagatggttcacttcattttgggtcgactctacaacttccagcccttcctcactcgcactgaagtttacaaaactggtgtcacacattattttagcttagagaaagccaagaaagagctaggttataaggctcagccatttgacctccaggaagcagtggaatggtttaaagcccatggtcatggcagaagttctggaagtcgtgactcggagtgttttgtttgggatgggctattggtcttcctcctgattatagcagttctcatgtgaaaaaaaaaaaaaaaaaaa

SEQ ID NO: 12862 - DNA, 760 bp, Homo sapiens
ccacgcgtccgggaagcatggaggtccatggcaagccccaggctagcccgagttgttcgtcgcccacccgggattcctcaggagtcccagtgtccaaggagctgctgacggcgggaagcgacggccgcggaggtatatgggacaggttgctcatcaactcccaacctaagtccagaaagacctccactcttcaaacagttcggatagagaggagtcccttattggaccaggtacagacatttctcccacagatggcacgggcaaatgaaaagctaagaaaagaaatggcagctgcaccacctggtcgtttcaatattgaaaacattgatgggcctcatagtaaagttatacaaatggatgtggctttgtttgagatgaatcagtcggattcaaaagaagtggacagttcagaagagagttcacaagacagttcagagaacagttcagaatcagaagacgaagatgacagcatcccatctgaagtcaccatagataacattaagcttcccaattctgaaggtggaaaaggcaagattgaagttttggacagtccagcaagtaaaaaaaaagaaatagtcaaataaattatctgaaaagaaaaaaaaaaaaaaaaaaaaaaaaaaaaaaaaaaaaaaaaaaaaaaaaaaaaaaaaaaaaaaaaaaaaaaaaaaaaaaaaaaaaaaaaaaaaaaaaaaaaaaaaaaaaaaaaaaaaaaaaaaaaaaaaaaaaaaaaaaaaaaaaaaaaaaaaaaaaaaaaaaa

SEQ ID NO: 12863 - DNA, 3611 bp, Homo sapiens
aaaaaaaaaaaaaagggcggccgctcgcgatctagaactagtcgtgactgggaagatggccgtctttccttggcactccaggaataggaactacaaagctgaatttgcatcatgccgactggaggctgtaccattggagtttggggactatcaccctctgaaacccataactgtcacagagtcaaagacaaagaaagtgaaccggaaaggaagcacttcttccacgtcctcctcctcctccagctccgtggtggacccgctgagcagcgtcctcgatgggactgaccccctctccatgtttgcagccactgctgaccccgcagccttggcagctgccatggacagctccagaaggaaacgtgatagagatgataactccgttgtaggatcggattttgagccttggaccaacaaacggggagaaatccttgcccggtacaccactaccgaaaagctgtctattaatctgtttatgggatctgaaaaaggcaaagctgggactgccacattggcaatgtcagagaaggtgcggacccggctggaggagctggatgactttgaggagggttcccaaaaggagctgttgaacttgactcagcaggattacgtgaaccgcatagaggagctcaaccaatcgctgaaggatgcctgggcctcagaccagaaagtgaaggctctaaaaatagtcatccagtgttcaaagcttctttcagacaccagtgttattcagttctacccaagcaaatttgtccttatcaccgacatacttgatacatttggaaagctcgtgtacgagcgcatcttttccatgtgtgtggatagccgcagcgtcttaccagatcacttttctccagagaatgcaaatgacacggccaaggaaacatgcctaaattggtttttcaagattgcctccatcagggaactcattccaagattttacgtggaggcatccatcctgaaatgtaacaaattcctctccaaaacgggaatttcagagtgcctgccccggttgacatgcatgatcagagggatcggagacccactagtgtcggtgtatgcccgtgcctacctgtgccgggtgggaatggaagtggccccacatctcaaagaaaccctaaataagaacttttttgacttcctccttacgttcaaacagattcatggggatacggtccagaaccagctggtggtccaaggagtggagctcccatcttacctccccttgtacccgcctgccatggactggatcttccagtgcatctcctaccatgcccccgaggctctgctgaccgagatgatggaaaggtgtaagaaactaggaaacaatgccttgctgttgaattctgtgatgtctgccttccgggctgagttcatcgccacaaggtctatggatttcattggcatgattaaagagtgtgatgaatctggtttccccaagcatcttctttttcgatcactgggattaaacttggccttggctgatcctcctgagagtgaccgacttcagattctcaacgaagcttggaaagtcatcactaagctgaagaacccacaggactacattaattgtgccgaagtgtgggtggaatacacctgcaagcatttcacgaaacgagaggtgaataccgttttggcagatgtcatcaagcacatgactccagatcgtgcatttgaagattcctacccccagcttcagttaataattaagaaagttattgcccacttccatgacttctcagttcttttctcagtggaaaaatttctgccgtttctggacatgttccaaaaagagagtgtgcgggtggaggtttgcaaatgcatcatggacgcctttatcaagcatcaacaagagcccaccaaggacccggtcatcttgaatgcccttttgcatgtttgcaagaccatgcatgactctgtgaatgcactcactcttgaggatgagaaaagaatgctgtcatatttgattaatggatttataaaaatggtttcctttggccgtgattttgaacaacagctgagtttttatgttgagtccaggtcgatgttttgcaatctggagcctgttcttgtgcagttgattcatagtgtgaaccggttggcaatggagacaagaaaagtaatgaaaggaaatcattccagaaagacagctgcatttgtccgggcctgtgttgcctactgcttcatcaccatcccctccctggcgggcatcttcacacgtctcaatctctacctgcattctggtcaggtggccttggccaaccagtgcctctcccaagctgatgcttttttcaaagccgctataagccttgttccggaagttccaaagatgattaatattgatgggaagatgcggccatcggaatcgttccttctggaattcctctgcaatttcttttctactttattaatagttccggatcatcctgaacatggggtcctgtttcttgttcgagagcttctcaacgtgatccaggactacacctgggaggacaacagcgatgagaaaatccgcatctacacctgcgtcctgcatctcctctccgccatgagccaggagacgtacctttaccacatagacaaagtggactccaacgacagcctctacgggggagactccaagttcctggcagaaaacaacaagctgtgtgagacggtgatggctcagatcctagagcatctgaaaaccctggccaaggacgaggccctgaagcgccagagctcgttgggcctttccttctttaacagcatcttggcccatggggacctacgcaacaacaagctcaaccagctctccgtcaacctgtggcacctggcacagaggcacggctgtgcagacaccaggaccatggtgaaaacgctagaatacatcaagaagcaaagcaaacaaccagacatgactcatctgacggagctggccctcagactccctctgcaaacaaggacctgacccccgggcccatccccaggctcagggactctggtgccaaatccagaaagatctgctctgctgccctgaactcttacggcaatttaggtttctcatttttcttttctttttacatatgtacaaattgttttaagctttggcctctatccaggttattctgacaatgaagaaatgggagttgtcagagcattaaaatgcaatcttcactaagaagcagtctctgtgttgtctttgcacaagtggccttcggtctactcagcccgatctgatgggcctttttagcaagagagaaacaagaatgcaagtaacatctttcttctctggaaggtgtttgttttttcatagtttagaaataaggactttaaaagtggactgcttttcaaagtgccactgttccagacccattccattccagactttgtaccttaaagttagagcacacccaaagtctggaactgtgttacctgaacccctatggaggatttataaaaggcagaaatagcactccattaactctttttcctatcaaaagcagctcttgattggacttagaatctgtgttggtggatcaaaggagaaagcgaggtcaaatttgagattctctgtggcttcagtatacagtaactgaataaatgtcctgaaggagaaaaaaaaaaaaaaaaaa

SEQ ID NO: 12864 - DNA, 2381 bp, Homo sapiens
cactgaataaactctaggttcccatttctttcagccagatcctcccagggaatcactacaggctggttagccaaaaagtcctgattttctgctcaatagaggtccttactggaaggcagcatgtccaatgttaccttgagaaaaatgtctcccacaggaaatgagatgaagagcaccactcagggaaccacacggaagcagcaggattttcacgaggtgaacaaaagaagaactttcttacaggataacagttggataaagaaacgccctgaagaagaaaaagatgaaaattacggtagggtggtgctcaaccgacataattcccatgatgcattggacaggaaagtaaatgagagagatgtgccaaaagctacaattagtcggtacagttctgatgacactttggacaggatctcagacagaaatgatgctgctaaaacatataaggccaataccttggataaccaactaaccaataggagcatgtccatgtttagatcactggaagtaacaaagttgcaacctggcggttcattgaatgccaacacctccaacaccatagcatccacttctgctactactcctgtaaagaagaagaggcagtcctggtttccaccgccccctccaggttacaatgcctcttcgagcacaggaaccaggagacgggaaccaggtgttcaccctccaatacctccaaagcccagttctcctgtttcttctcctaaccagctgagacaggataataggcagatacatccacctaaaccaggtgtatatacagaaaccaacagatctgctgaaagaaatataagtgaagaattggataatctcatcaaaatgaacaaaagcttgaataggaatcaaggtcttgatagtctcttcagagcaaatccaaaggtagaagaaagagagaaaagagccaaaagccttgaaagtctcatctatatgagtacccggacagataaagatggcaaaggaatccaaagccttggaagtccgattaaagttaatcaaaggactgacaaaaatgagaaaggaagacaaaatctcgaatctgttgctaaagtgaatgccaggatgaataaaacgagcagaagaagtgaagaccttgataatgctactgaagtaaatcccaaaggacatgaaaataccactggaaaaaaagaccttgatgggcttattaaagtggatcctgaaacaaataaaaatattacgaggggccagagccttgataatctcatcaaagtgacccctgaagtaaagagaagtaaccaaggttccaaagaccttaataacttcatcaaagtgtatccaggaacagaaaaaagtactgaagggggccaaagtctcgacagcctcattaaagtgactcctgaaagaaacagaactaaccaagggaaccaagacttggaaaatcttatcaaagtgatcccttcagcaaacaaaagcagtgaacaaggtcttgatgaacatattaatgtcagccccaaagctgtcaaaaacactgatggaaaacaagatcttgataaactcatcaaggtgaatcctgaaattttcacaaacaaccaaagaaaccaagatcttgctaacctcatcaaagtaaatcctgcagtaatcagaaacaatcagagccaagacttggaaaatcttatcaaagtgatcccttcagctcttagaaacactaatcgagaccagaacctggaaaatttaattgaagtaaattctcatgtgtctgaaaacaagaatggaagctctaacactggagccaagcaggcaggaccacaggatactgttgtgtacacaaggacatatgtggagaatagtaaatcacccaaggatggatatcaggagaatatctctggaaaatacatacaaactgtttattcaacttctgataggtctgtcattgaaagagatatgtgcacttactgccgaaaacccttgggtgtagaaactaaaatgattttagatgaattacaaatttgctgccattctacttgctttaagtgtgaaatatgcaagcagcctttggaaaatctacaagcgggtgatagtatttggatttatagacagacaatacactgtgaaccttgctactctaaaattatggcaaagtggattccataactctggcacaaggaaatcaagatgaaaagcactcattaaggaattaaagttacaagttttatcttaataatatgtaatctagaaaagctttcacattgaagatcaactcttgtacaaaattaacaattctgttattgcataagtaatctaattgtcttcaataaggtcacacacataaaaagagccatctggtctctggctagagttagcaataaaaagttcaaatggttccagaaaaaaaaaaaaaaaaaaaa

SEQ ID NO: 12865 - DNA, 2441 bp, Homo sapiens
cactgaataaactctaggttcccatttctttcagccagatcctcccagggaatcactacaggctggttagccaaaaagtcctgattttctgctcaatagaggtccttactggaaggcagcatgtccaatgttaccttgagaaaaatgtctcccacaggaaatgagatgaagagcaccactcagggaaccacacggaagcagcaggattttcacgaggtgaacaaaagaagaactttcttacaggataacagttggataaagaaacgccctgaagaagaaaaagatgaaaattacggtagggtggtgctcaaccgacataattcccatgatgcattggacaggaaagtaaatgagagagatgtgccaaaagctacaattagtcggtacagttctgatgacactttggacaggatctcagacagaaatgatgctgctaaaacatataaggccaataccttggataaccaactaaccaataggagcatgtccatgtttagatcactggaagtaacaaagttgcaacctggcggttcattgaatgccaacacctccaacaccatagcatccacttctgctactactcctgtaaagaagaagaggcagtcctggtttccaccgccccctccaggttacaatgcctcttcgagcacaggaaccaggagacgggaaccaggtgttcaccctccaatacctccaaagcccagttctcctgtttcttctcctaaccagctgagacaggataataggcagatacatccacctaaaccaggtgtatatacagaaaccaacagatctgctgaaagaaatataaggagtcaggatcttgataacatcgtcaaagtggccacttcacttcagagaagtgacaaaggtgaagaattggataatctcatcaaaatgaacaaaagcttgaataggaatcaaggtcttgatagtctcttcagagcaaatccaaaggtagaagaaagagagaaaagagccaaaagccttgaaagtctcatctatatgagtacccggacagataaagatggcaaaggaatccaaagccttggaagtccgattaaagttaatcaaaggactgacaaaaatgagaaaggaagacaaaatctcgaatctgttgctaaagtgaatgccaggatgaataaaacgagcagaagaagtgaagaccttgataatgctactgaagtaaatcccaaaggacatgaaaataccactggaaaaaaagaccttgatgggcttattaaagtggatcctgaaacaaataaaaatattacgaggggccagagccttgataatctcatcaaagtgacccctgaagtaaagagaagtaaccaaggttccaaagaccttaataacttcatcaaagtgtatccaggaacagaaaaaagtactgaagggggccaaagtctcgacagcctcattaaagtgactcctgaaagaaacagaactaaccaagggaaccaagacttggaaaatcttatcaaagtgatcccttcagcaaacaaaagcagtgaacaaggtcttgatgaacatattaatgtcagccccaaagctgtcaaaaacactgatggaaaacaagatcttgataaactcatcaaggtgaatcctgaaattttcacaaacaaccaaagaaaccaagatcttgctaacctcatcaaagtaaatcctgcagtaatcagaaacaatcagagccaagacttggaaaatcttatcaaagtgatcccttcagctcttagaaacactaatcgagaccagaacctggaaaatttaattgaagtaaattctcatgtgtctgaaaacaagaatggaagctctaacactggagccaagcaggcaggaccacaggatactgttgtgtacacaaggacatatgtggagaatagtaaatcacccaaggatggatatcaggagaatatctctggaaaatacatacaaactgtttattcaacttctgataggtctgtcattgaaagagatatgtgcacttactgccgaaaacccttgggtgtagaaactaaaatgattttagatgaattacaaatttgctgccattctacttgctttaagtgtgaaatatgcaagcagcctttggaaaatctacaagcgggtgatagtatttggatttatagacagacaatacactgtgaaccttgctactctaaaattatggcaaagtggattccataactctggcacaaggaaatcaagatgaaaagcactcattaaggaattaaagttacaagttttatcttaataatatgtaatctagaaaagctttcacattgaagatcaactcttgtacaaaattaacaattctgttattgcataagtaatctaattgtcttcaataaggtcacacacataaaaagagccatctggtctctggctagagttagcaataaaaagttcaaatggttccagaaaaaaaaaaaaaaaaaaaa

SEQ ID NO: 12866 - DNA, 2662 bp, Homo sapiens
cccggacatggccgccaacatgtacagggtcggagactacgtctactttgagaactcctccagcaacccatacctgatccggagaatcgaggagctcaacaagacggccaatgggaacgtggaggccaaagtggtgtgcttctaccggaggcgggacatctccagcaccctcatcgccctggccgacaagcacgcaaccctgtcagtctgctataaggccggaccgggggcggacaacggcgaggaaggggaaatagaagaggaaatggagaatccggaaatggtggacctgcccgagaaactaaagcaccagctgcggcatcgggagctgttcctctcccggcagctggagtctctgcccgccacgcacatcaggggcaagtgcagcgtcaccctgctcaacgagaccgagtcgctcaagtcctacctggagcgggaggatttcttcttctattctctagtctacgacccacagcagaagaccctgctggcagataaaggagagattcgagtaggaaaccggtaccaggcagacatcaccgacttgttaaaagaaggcgaggaggatggccgagaccagtccaggttggagacccaggtgtgggaggcgcacaacccactcacagacaagcagatcgaccagttcctggtggtggcccgctctgtgggcaccttcgcacgggccctggactgcagcagctccgtccgacagcccagcctgcacatgagcgccgcagctgcctcccgagacatcaccctgttccacgccatggatactctccacaagaacatctacgacatctccaaggccatctcggcgctggtgccgcagggcgggcccgtgctctgcagggacgagatggaggagtggtctgcatcagaggccaaccttttcgaggaagccctggaaaaatatgggaaggatttcacggacattcagcaagattttctcccgtggaagtcgctgaccagcatcattgagtactactacatgtggaagaccaccgacagatacgtgcagcagaaacgcttgaaagcagctgaagctgagagcaagttaaagcaagtttatattcccaactataacaagccaaatccgaaccaaatcagcgtcaacaacgtcaaggccggtgtggtgaacggcacgggggcgccgggccagagccctggggctggccgggcctgcgagagctgttacaccacacagtcttaccagtggtattcttggggtccccctaacatgcagtgtcgtctctgcgcatcttgttggacatattggaagaaatatggtggcttgaaaatgccaacccggttagatggagagaggccaggaccaaaccgcagtaacatgagtccccacggcctcccagcccggagcagcgggagccccaagtttgccatgaagaccaggcaggctttctatctgcacacgacgaagctgacgcggatcgcccggcgcctgtgccgtgagatcctgcgcccgtggcacgctgcgcggaacccctacctgcccatcaacagcgcggccatcaaggccgagtgcacggcgcggctgcccgaagcctcccagagcccgctggtgctgaagcaggcggtacgcaagccgctggaagccgtgcttcggtatcttgagacccacccccgcccccccaagcctgaccccgtgaaaagcgtgtccagcgtgctcagcagcctgacgcccgccaaggtggcccccgtcatcaacaacggctcccccaccatcctgggcaagcgcagctacgagcagcacaacggggtggacggcaacatgaagaagcgcctcttgatgcccagtaggggtctggcaaaccacggacagaccaggcacatgggaccaagccggaacctcctgctcaacgggaagtcctaccccaccaaagtgcgcctgatccgggggggctccctgcccccagtcaagcggcggcggatgaactggatcgacgccccgggtgacgtgttctacatgcccaaagaggagaccaggaagatccgcaagctgctctcatcctcggaaaccaagcgtgctgcccgccggccctacaagcccatcgccctgcgccagagccaggccctgccgccgcggccaccgccacctgcgcccgtcaacgacgagcccatcgtcatcgaggactaggggccgcccccacctgcggccgccccccgcccctcgcccgcccacacggccccttcccagccagcccgccgcccgcccctcagtttggtagtgccccacctcccgccctcacctgaagagaaacgcgctccttggcggacactgggggaggagaggaagaagcgcggctaacttattccgagaatgccgaggagttgtcgtttttagctttgtgtttactttttggctggagcggagatgaggggccaccccgtgcccctgtgctgcggggccttttgcccggaggccgggccctaaggttttgttgtgttctgttgaaggtgccattttaaattttatttttattactttttttgtagatgaacttgagctctgtaacttacacctggaatgttaggatcgtgcggccgcggccggccgagctgcctggcggggttggcccttgtcttttcaagtaattttcatattaaacaaaaacaaagaaaaaaaatcttataaaaaggaaaa

SEQ ID NO: 12867 - DNA, 1207 bp, Homo sapiens
attgtgtcagaggaagcaaccatgcaggtgctaaccaagcgttaccccaagaactgcctgctgaccgtcatggaccggtatgcagccgaggtgcacaacatggagcaggtggtgatgatccccagccttctgcgggacgtgcagctgagtgggcctgggggccaggcccaggctgaggcccctgatctctacacctacttcaccatgctcaaggccatctgtgtggatgtggaccatgggctgctgccgcgggaggagtggcaggccaaggtggcaggcagcgaagagaatggaaccgcagagacagaggaagtcgaggacgagagtgcctcaggagagctggacctggaagcccagttccacctgcacttctccagcctccatcacatcctcatgcacctcaccgagaaagcccaggaggtgacaaggaaataccaggaaatgacgggacaagtttggtagaccttggacactagggaagatcccttcacatgatagaagacagactctttgatgaggtcggcggagcagttcactagccaatgatgagagcagaaaggcctagacctgcagccagaagtgaaggcggctcagttctccgggatgcttctctacctcctgagcaccaattcctggattccagtcactggctcacctttagaatgtctgttgctattcactgctcccctcgctcctcttaacagcttggggaggtgaccagtggttcaggagggactagacaattacctgtccagtgtggtatggtaggaagagtgtaggtgttggcacgtgaccaaaattcacatccctcctcatggcagtcattcagtatgtgtacttgtacaagttatttaacccattggagcctaaattccctcatctataaaatggggataatattatctacctcacaagcttatgaaaactaaacatgatgaatcaaaagcacttggcatgtgagggctattaaaatagcctgattttttttttctccccctctccccaatgtatttgctctggcccttgctttttaccctccagagctaagaggtagcagagtctcttgggatgagtgattcaccctcttacttggcgaccactgatgagatcaacaacaggtgaactataaacctattatttattgcagaactaataaaaaatccaaagccttgtaaaaaaaaaaaaaaaaaaaaaaaaaaaaaaaaaa

SEQ ID NO: 12868 - DNA, 5491 bp, Homo sapiens
ctcggctccgccccggcgctctcccagggcccctagctttccgctgggtcgggcggaaatgagccgtggcttttggctggcggagccgctggcagggaccgggccccaccctgccccagtggctgccgactcacgcgggtgcagctctgttccgcggaggcacgccccctcccgtctctccgtctcgaccccctcgcggggcccaggtggggcccaagtcgccgccagcgtctgtgccgcgtcccttgctctgtgaaggacaggcctcgcgccaggaccccggtggacttctgaggtgccaggatggtgggagaactccgctacagggaattcagggtgcccctggggcccggcttacatgcctatcctgatgagctgatccgccagcgcgtgggccatgatgggcatcctgagtaccagatccgttggctcatcctgcggcgtggcgatgagggggacgggggctctggccaagtggactgcaaggctgagcacatcctgctgtggatgtccaaggatgagatctatgccaactgccacaagatgctgggcgaggatggccaggtcatcgggccctcccaggagtctgcaggggaggttggggccctggacaaatctgtgctggaggagatggaaaccgacgtgaagtccctcattcagagagcccttcggcagctggaggagtgtgtgggcactatccctcctgctcctctacttcacactgtccacgtgctcagcgcctatgccagcattgagcccctcactggagtattcaaggacccaagggtcctggacttgctcatgcacatgttgagtagtcctgattatcagattcgctggagtgcaggccggatgatacaagccctgtcctcccatgacgctgggacccggactcagatccttctgtcactgagccaacaagaagccattgagaaacacctggattttgacagccgctgtgctctgctagcactgtttgcacaggccacgctctctgaacaccccatgtctttcgagggcattcagctaccacaggtcccaggaagggtgctcttctccctggtgaagcggtatttgcatgtcacctcgctcctggatcagctgaacgacagtgctgcggagccaggagcccagaacacctctgctcctgaggagttgagtggggagaggggtcaactggagctggagttcagtatggccatgggcaccctgatctcggagctggtgcaagccatgcgctgggaccaggcctcagacagaccaaggagctcagcacggtcccccggttccatcttccagcctcagctggcagatgtgagcccagggctccccgctgcccaggctcagccctccttcaggaggtcaagacgttttcgccctcgttctgagttcgcaagtggcaatacctatgctttgtatgtgcgggacacactgcagccggggatgcgagtgcggatgctggatgattatgaggagatcagtgccggggatgagggcgagtttcggcagagcaacaacggtgtgcctcctgtgcaggtattttgggagtcaacaggccgcacctattgggtgcactggcacatgctggagatcttgggctttgaggaagacattgaggacatggttgaggctgatgagtaccaaggggcagtggccagtagagtcctgggtagagccctgcctgcctggcgctggaggcccatgacagaactctatgctgtgccttatgtgctgcctgaggatgaggacactgaggagtgtgaacacctgaccctggctgagtggtgggaactcctcttcttcatcaagaagctggatggacctgaccatcaggaggttctccagatcctccaggagaacctagatggggagattctggatgatgagatcctagctgaactggccgtgcccatagaattggcccaggacttgctgctgactctgccacagcgactcaatgacagtgccctcagggacctgatcaactgccatgtctacaagaagtatgggcctgaagccctagcagggaaccaagcctacccatcccttctagaagcccaagaagatgtcctcctgctagacgcgcaggcccaggctaaggactcagaagatgcagccaaagtggaagcaaaagaacccccatctcagagtcccaacactcccctgcagcgtctggtggagggttatggtccagctgggaaaatcctcctggatctagagcaagccctcagctcagaggggacccaggagaacaaggtcaagccactcctgctgcagctgcagcggcagccgcagcccttcctggcactgatgcagagcctggacactccggagactaacaggaccctgcacctgactgtgctgagaatcctgaagcagctggtggacttccccgaggcactgctgctcccctggcacgaggccgtggatgcctgcatggcctgcctgcggtccccaaacactgatcgagaggtgctccaggaactgattttcttcctgcaccgcctgacctcagtgagcagggactatgccgtggtgctgaatcagctgggagcaagagacgctatctccaaggccctggaaaagcacctgggaaagctggagctggctcaggagctgcgggacatggtgttcaagtgtgagaagcatgcccacctctaccgcaaactcatcaccaacatcctgggaggctgcatccagatggtgctgggccagatcgaagaccacagacgaacccaccaacccatcaacatccctttctttgatgtgttcctcagatacctgtgccagggctccagtgtggaagtgaaggaggacaagtgctgggagaaggtggaggtgtcctccaacccgcaccgggccagcaagctgacggaccacaaccccaagacctattgggagtccaacggcagcgccggctcccactacatcaccctgcacatgcgccggggcatcctcatcaggcaactgactctgcttgtggctagtgaggactcgagttacatgccggcccgagtggtggtgtgcgggggtgatagcactagctctcttcacacggaactcaactcggtgaatgtgatgccctctgccagccgggtgatcctcctggagaacctgacccgcttctggcccatcatccagatccgcataaagcgctgccagcagggtggcattgatacgcgcattcgggggttagagatcctaggccccaagcccacgttctggccagtgttccgggagcagctctgtcgtcacacacgcctcttctacatggttcgggcacaggcctggagccaggacatggcagaggaccgcaggagcctcctgcacctgagttctagactcaacggtgctctgcgccaggagcagaattttgctgaccgcttcctccctgatgacgaggctgcccaagctctgggcaagacctgctgggaggccctggtcagccccgtggtgcagaacatcacctcccctgatgaggatggcattagccccctgggttggctgctggaccagtacctggagtgtcaggaagctgtcttcaacccccagagccgcggcccagctttcttctcgcgggtgcgccgtctcactcacctgctggtgcatgtcgagccctgtgaggcaccccctcctgtggtggccactcctcggcccaaaggcagaaacagaagccacgactggagctccttggctacccggggccttccaagcagcatcatgagaaacctgacgcgctgttggcgggccgtggtggagaagcaggtgaacaattttctgacctcatcctggcgggatgatgactttgtgccacgctactgtgagcactttaatattctgcagaactcaagctctgaactgtttgggcctcgggcagccttcttgctggcgctgcaaaatggctgtgcgggagccttgctgaagctcccttttctcaaagctgcccacgtgagtgagcagttcgcccggcacattgaccagcagatccagggcagccggatcggtggagcccaggaaatggagaggctggcacagctgcagcaatgcctgcaagctgtcctgattttctccggcttggagatagccaccacttttgagcattattaccagcactacatggcggaccgtctcctgggcgtggtctcgagctggctggagggggccgtgctggagcagatcggtccctgcttccccaaccgcctcccccagcagatgttgcagagcctgagcacctctaaggagctgcagcgccagttccacgtctaccagctccagcagctggatcaggaactcctgaagctggaggatacagagaagaaaatacaggtgggccttggggccagtggcaaggagcacaagagcgagaaggaagaggaagctggggcagcagcagtggtggatgtggcggagggagaggaggaagaggaggagaatgaggacctctactatgaaggggcaatgccagaagtgtctgtgcttgtcctgtcccgacactcctggcctgttgcctcaatctgccacacactgaaccccagaacctgcctgccctcctacctgaggggcactttgaacagatactccaacttctacaacaagagtcagagccaccctgcccttgagcgaggctcacagaggcgactgcagtggacgtggctgggctgggctgagctgcagtttgggaaccagaccctgcatgtgtccaccgtgcagatgtggctactgctgtatctcaacgacctgaaggcggtctctgtggagagtctgctggcgttctcagggctctccgcagacatgctcaatcaggcgattgggcccctcacctcttcaagaggccccctggaccttcacgagcaaaaggatataccaggaggggtcctcaagattcgagatggcagcaaggaacccaggtcgagatgggacattgtgcggctcatcccacctcagacgtacctgcaagctgagggtgaagacggccagaacttggagaagagacggaatcttctgaactgcctcatcgtccgaatcctcaaggcccatggagatgaggggctgcacattgaccagcttgtctgtctggtgctggaggcttggcagaagggcccgtgtcctcccaggggtttggtcagcagccttggtaaggggtctgcatgcagcagcactgacgtcctctcctgcatcctacacctcctgggcaagggcacgctgagacgccatgacgaccggccccaggtgctgtcctatgcagtccctgtgactgtcatggagcctcacactgagtccctgaacccaggctcctcaggccccaacccacccctcaccttccataccctacagattcgctcccggggtgtgccctatgcctcctgcactgccacccagagcttctctaccttccggtagccctagacttggggtcaggggaaggtagagctggagcttttacagaaataaaacccaagagtttgattataaaaaaaaaaaaaaaaaaaaa

SEQ ID NO: 12869 - DNA, 4045 bp, Homo sapiens
gtgtgaagacagttttgtaagaactgcaagtgctcaggctgtatgggaaacagaaacttcagcagatgaactgaccttatgccatttcctgatgtttggcagtgacactgaaagaggaccgcatgtcccctctttatgtggatttatcttttatgaaaagtttgcttttgtccgggacagtttgttgtcgtgagatacatcagacaatataatcatgggacaagctgatgtctccagaccggtaaatccagatgcagttgaggaagcagaccagcccactacagagccaggcatggtcctggacagtgtggaagcaggagacacaacacctcctaccaaaaggaagagcaagttctcaggctttggcaagatcttcaagccctggaaatggaggaaaaaaaaaagtagtgataaatttaaagagacttcagaagttttagaacggaaaatatctatgcgaaagccaagagaagagctggttaaaagaggggttctgttggaagaccctgagcaaggtggtgaggatccaggaaagccaagcgatgccatgttaaagaatggccataccacccccatagggaatgccagatcatctagtccagtccaagtagaggaagagccagtaagattagcaagtcttaggaaagctattccagaagaggacctaaagaaacgactaggctcaactggaagccagcctaattctgaagcagagtctgttcctgagaatgtacccaaaccacctttacttcctcccaaaagacccttgtcctcttctcatgaagcaagtgaagggcaagcaaaggatgccacttcctctggcggcacggcaaggttcatcatctccacctccatcaccacagcacccgctgccaccactgctgccacaagccttgcaaagactgttaatctctctgtcaccccttccccagcacccaggactctgcctgctgctcctgccagcactaacactactgctaccccaagcctcactcatatggtccctgccaagcagccccctatccctccccctaaaccagctcacagaaatagcaaccctgtcattgctgaactgtcccaagcaataaacagtggtacattgttatcaaaaccgtccccacccttaccacctaagagaggcattccatcaacctcagtacccaccttggagtctgctgctgccatcaccacaaaaacaccaagtgatgaaagagagaagagcacgtgttctatgggctcggaactactaccaatgatctcacctcgctctccgtcccccccactgcctactcatatacctccagagcctccacgcacccctccattccctgctaagacttttcaagttgtgccagaaattgagtttccaccatccttagatctacaccaggagattccccagcaggaagatcagaaaaaggaagtccccaagaggatactggaccagaactttggggagccccatataccctctaggctgcctccactcccactgcatattcgaatccagcaggccctcaccagcccacttcccatgactcctattctggagggttctcacagagctcattcgttgctttttgaaaacagtgacagcttttctgaggacagcagtacgctgggtcggaccaggtctcttcccatcactattgaaatgctaaaagttccagacgatgaagaagaagaggagcaaacctgtccatccacattcagtgaagaaatgacacctacctcagtcattcctaaattaccacagtgtctacgggaggaagaagagaaggagagcgactctgattcagaaggtcccattcagtaccgagatgaagaagatgaagatgaaagctatcagagtgctctcgccaacaaagtgaagaggaaagacacactggcaatgaagttgaaccacagacccagtgaaccagagttgaacctgaattcttggccttgtaaaagcaaggaggagtggaatgaaatacggcaccagattggaaacacactgatccggcgactgagtcaaagaccaacaccagaagaactagaacaacgcaatatattgcaacctaaaaatgaagctgatcgtcaggcagaaaaacgagaaattaaacgtcggctcactagaaagctcagtcaaaggccaactgtcgctgaactccttgccaggaagattctgaggtttaatgaatatgtagaggtaacagatgctcaagattatgaccggcgagccgacaaaccttggaccaaactgacccctgctgacaaggctgccataagaaaagaattaaatgaatttaaaagctccgagatggaggttcatgaagagagcaaacattttacacgctaccatcgtccatgatgccaaaggttgagagaggaatcaacatggctgctttgctgcttccttctccaaagtgacatatggagggaactttagcacttcccagcacagccagaattgcatcctctgggatcttctgaggtggacagcactttgaatgtagcatttcactggaacagagtcttatgtgctgcaccgggggcaaaacaacactttgtcagtgcttttgaacctttcaatattgtagcatgcttgaggagtttttcccttactggccaccaaagttctgaaccacttgcaggttccaggttttactggctgcaccacaccccttcccctagatgactgcctgtgcagagacacagtttgcaccattagccttacctgccctgccctgattgtgagacccaaatgtgtaggctctaaattccagccatcaaatccaattcctggtggggaaaaccttctggagacccccaaccttctgataaaagagtctctacctccagggaaagccttcttaccacactggcatatcagatgaaagcattgcactgtacctctcgtaacacagcaatacagtcctcttgaggcactcaagcctgagaggaagctcaggatctgacatgttcttccttttcctcacaagtcatcatgattttttattttaaaataatctggaagtaatgggaacttagtttttcctgaactccaaccagaatccaaattggttagatgaggccaggcgcggtggctcacgcctgtaatcccaaagtggtgggattacaggcatgagccaccgtgcgagccttccttgaagttttttgtttggttttgatttgttttgttttgttttgttttgttttgtttttggagatagggtctcgctctgttacccatgctggagtgcagtggcacaatcttggctcagagcaacctctgcctcccaggctcaagcaatcctcccacttcagtctaagtagctgggactacaggcacgtgccaccaggcccagctaatttttgtgttttgttagagatgaggttttgccatgttgcccaggctcgtcttgaacaccggggctcaaggaatctgcccatcttcgcctcccaaagttctgagatagcaggtgtgagtcatcatgcccagcctccttgaagtttactaacaattgggataactgagggaagagaagtgacaattccactcagtctattagaggtctggatataaggtagccacacaataactctaacttgacttctaaccattctatcttattgatttggaggctgtcttctgccagattttttgtggcttgagatgatattttcgaacccttctttcactacctttcttacccttaatgtgccaagcttgaaacaggatttgatttcctgagctacttgttcgccttctgtgcgtcaccaagtaatctggttcatctttcgtctcattcatgttattttcaagtgaaacaagacattttgggggtcaagtctctttgggtgttttgtttttatgtatataaaaatggattttgtgttccctttccatgtaagtaccaacttatatggaaactcacaatcataatgtaaagaagaaatgaaagcctggtgtattgtacttcaagatgcctccctgatgtatagaatctccttgtaaaataaataattgcattgtaaaaaaaaaaaaaaaaaaaaaaaaaaa

SEQ ID NO: 12870 - DNA, 6719 bp, Homo sapiens
tcggcgggaagcggcgatcctgccaccgggaggtgtggaagagccgggtagattctggctacattggagattggttgctttctaaaactgaaggagaagcccatgaagagatggtggattctcactgagttttgactagcggaagaaaagagagagttcaagtggatggccttgaggacttgaaaagctgagatatgatgattttgaagtcatttcacatcgaagccatgatttaaatatcggcgttaagatttcaacaagaaaaacttaagcttccttggattcccacgtcaaaggaaagtttcaagctttcagaaggagttctcactcgaagataaagaacagctcgctaaccacgaaagaggaatcgatgctcagcttttagttgcacttcctaaagttgcagaattaagacaaatctttgaaccaaagaagaaagaattcttagaaatgaaaagaaaagaaagaattgccaggcgcctggaagggattgaaaatgacactcagcccatcctcttgcagagctgcacaggattggtgactcaccgcctgctggaggaagacacccctcgatacatgagagccagcgaccctgccagcccccacatcggccgatcaaatgaagaggaggaaacttctgattcttctctagaaaagcaaactcgatccaaatactgcacagaaacctccggtgtccacggtgactcaccctatggttcgggtaccatggacacccacagtctggagtccaaagccgaaagaattgcaaggtacaaagcagaaagaaggcgacagctggcagagaagtatgggctgactctggatcccgaggccgactccgagtatttatcccgctataccaagtccaggaaggagcctgatgctgtcgagaagcggggaggaaaaagtgacaaacaggaagagtcaagcagagatgcgagttctctgtaccccgggaccgagacgatggggctcaggacctgtgccggtgaatccaaggactatgccctccatgtgggtgacggctcttccgacccggaggtgctgctgaacatagaaaaccaaagacgaggtcaagagctgagtgccacccggcaggcccatgacctgtccccagcagccgagagttcctcgaccttctctttctctgggcgagactcctccttcactgaagtgccacggtcccccaagcacgcccacagctcctccctgcagcaggcagcctcccggagcccctcctttggtgacccacagctatcccctgaggcccgacccaggtgcacttcacattcagaaacgccaactgtcgatgatgaagaaaaggtggatgaacgagccaagctgagcgtcgccgccaagaggttgcttttcagggagatggaaaaatcttttgatgaacaaaatgttccaaagcgacgctcaagaaacacagctgtggagcagaggctacgccgtctgcaggacaggtccctcacccagcccatcaccactgaagaggtggtcatcgcagccacattgcaggcctctgctcaccaaaaggccttagccaaggaccagacaaatgagggcaaagagcttgctgagcaaggagaacctgattcctccactctaagcttggccgaaaagttggccttgtttaacaaattgtcccagccagtctcaaaagcgatttctacccggaacagaatagacacgagacagaggagaatgaacgctcgctatcaaactcagccagtcacactgggagaggtggagcaggtgcagagtggaaagctcattcctttctcacctgccgtgaacacatcagtgtctaccgtagcatccacggttgctccaatgtatgccggagatcttcgcacaaagccacctcttgaccacaatgcaagtgccactgactataagttttcttcttcaatagaaaattcggactctccagttagaagcattctgaaatcgcaagcttggcagcctttggtagagggtagcgagaacaagggaatgttgagagaatatggagagacagaaagcaagagagctttgacaggtcgagacagtgggatggagaagtatgggtcctttgaggaagcagaagcatcctaccccatcctgaaccgagccagggaaggagacagccataaggaatctaaatatgctgttcccagaagaggaagcctggaacgggcgaaccctcccatcacccacctcggggatgaaccgaaggaattttccatggctaaaatgaatgcacaaggaaacttggacttgagggacaggctgccctttgaagagaaggtggaggtggagaatgttatgaaaaggaagttttcactaagagcggcagagttcggggagcccacttccgagcagacggggacagctgctgggaaaactattgctcaaaccacagcccccgtgtcctggaagccccaggattcttcggaacagccacaggagaagctctgcaagaatccatgtgcgatgtttgctgctggagagatcaaaacgccgacaggggagggccttcttgactcacccagcaaaaccatgtctattaaagaaagattggcactgttgaagaaaagcggggaggaagattggagaaacagactcagcaggaggcaggagggcggcaaggcgccggccagcagcctgcacacccaggaagcagggcggtccctcatcaagaagcgggtcacagaaagtcgagagagccaaatgacgattgaggagaggaagcagctcatcactgtgagagaggaggcctggaagacgagaggcagaggagcggccaacgactcgacccagttcactgtggctggcaggatggtgaagaaaggtttggcgtcacctactgccataaccccagtagcctcagccatttgcggtaaaacaagaggcaccacacccgtttccaaacccctggaagatatcgaagccagaccagatatgcagttagaatcggacctgaagttggacaggctggaaacctttctaagaaggctgaataacaaagttggcgggatgcacgaaacggtgctcactgtcaccggcaaatctgtgaaggaggtgatgaagccagatgatgatgaaacctttgccaaattttaccgcagcgtggattataatatgccaagaagtcctgtggagatggatgaggacttcgatgtcattttcgatccttatgcacccaaattgacgtcttccgtggccgagcacaagcgggcagttaggcccaagcgccgggttcaggcctccaaaaaccccctgaaaatgctggcggcaagagaagatctccttcaggaatacactgagcagagattaaacgttgccttcatggagtcaaagcggatgaaagtagaaaagatgtcttccaactccaacttctcagaagtcaccctggcgggtttagccagtaaagaaaacttcagcaacgtcagcctgcggagcgtcaacctgacggaacagaactctaacaacagcgccgtgccctacaagaggctgatgctgttgcagattaaaggaagaagacatgtgcagaccaggctggtggaacctcgagcttcggcgctcaacagtggggactgcttcctcctgctctctccccactgctgcttcctgtgggtaggagagtttgcaaacgtcatagaaaaggcgaaggcctcagaacttgcaactttaattcagacaaagagggaacttggttgtagagctacttatatccaaaccattgaagaaggaattaatacacacactcatgcagccaaagacttctggaagcttctgggtggccaaaccagttaccaatctgctggagacccaaaagaagatgaactctatgaagcagccataatagaaactaactgcatttaccgtctcatggatgacaaacttgttcctgatgacgactactgggggaaaattccgaagtgctcccttctgcaacccaaagaggtactggtgtttgattttggtagtgaagtttacgtatggcatgggaaagaagtcacattagcacaacgaaaaatagcatttcagctggcaaagcacttatggaatggaacctttgactatgagaactgtgacatcaatcccctggatcctggagaatgcaatccgcttatccccagaaaaggacaggggcggcccgactgggcgatatttgggagacttactgaacacaatgagacgattttgttcaaagagaagtttctggattggacggaactgaagagatcgaatgagaagaaccccggggaacttgcccagcacaaggaagaccccaggactgatgtcaaggcatacgatgtgacacggatggtgtccatgccccagacgacagcaggcaccatcctggacggagtgaacgtcggccgtggctatggcctggtggaaggacacgacaggaggcagtttgagatcaccagcgtttccgtggatgtctggcacatcctggaattcgactatagcaggctccccaaacaaagcatcgggcagttccatgagggggatgcctatgtggtcaagtggaagttcatggtgagcacggcagtgggaagtcgccagaagggagagcactcggtgagggcagccggcaaagagaagtgcgtctacttcttctggcaaggccggcactccaccgtgagtgagaagggcacgtcggcgctgatgacggtggagctggacgaggaaaggggggcccaggtccaggttctccagggaaaggagcccccctgtttcctgcagtgtttccagggggggatggtggtgcactcggggaggcgggaagaggaagaagaaaatgtgcaaagtgagtggcggctgtactgcgtgcgtggagaggtgcccgtggaagggaatttgctggaagtggcctgtcactgtagcagcctgaggtccagaacttccatggtggtgcttaacgtcaacaaggccctcatctacctgtggcacggatgcaaagcccaggcccacacgaaggaggtcggaaggaccgctgcgaacaagatcaaggaacaatgtcccctggaagcaggactgcatagtagcagcaaagtcacaatacacgagtgtgatgaaggctccgagccactcggattctgggatgccttaggaaggagagacaggaaagcctacgattgcatgcttcaagatcctggaagttttaacttcgcgccccgcctgttcatcctcagcagctcctctggggattttgcagccacagagtttgtgtaccctgcccgagccccctctgtggtcagttccatgcccttcctgcaggaagatctgtacagcgcgccccagccagcacttttccttgttgacaatcaccacgaggtgtacctctggcaaggctggtggcccatcgagaacaagatcactggttccgcccgcatccgctgggcctccgaccggaagagtgcgatggagactgtgctccagtactgcaaaggaaaaaatctcaagaaaccagcccccaagtcttaccttatccacgctggtctggagcccctgacattcaccaatatgtttcccagctgggagcacagagaggacatcgctgagatcacagagatggacacggaagtttccaatcagatcaccctcgtggaagacgtcttagccaagctctgtaaaaccatttacccgctggccgacctcctggccaggccactcccggagggggtcgatcctctgaagcttgagatctatctcaccgacgaagacttcgagtttgcactagacatgacgagggatgaatacaacgccctgcccgcctggaagcaggtgaacctgaagaaagcaaaaggcctgttctgagtggggagacgccagaggagcctcacggtcacgtccaacaacaccactgcaccagggaaatggatatatatttttggactggtgtttttcacaaagtatttttcaatcagagttttcagaacctgacattgttaaagatactgcttgtcccggagttgtgtattttgtaaatgttcaagggaactgtttggaaacttctttccaccattcaggaggttatcagaattaataaaagtatctgttatgtgcacttaagccgcagctgctatagatagcactgccttcttgttccagctaggcaatgcctttttttttttttttgaagcagttctctttataaagtgttattttgatagtttgtggattctaaaatatatatatatttatataaacaccatataagtcaaatatgtatttaacaaagcaatatgtattcattcactttcaagatttgttttggtgtcaaaataacatgaaaaggtagatggagttgcttctgttgaattagctctgccaccaatatgtatcttcatacacgtttggaaatgtttcctgcagcattaggtatgacttgttctgagtactgcttccggtgctaaaatgaacaaagaatttgtacttaatggcatggactctggagaatctatgcgaatcaacctttctaccttaatatctccccaaaaatgtatagtgccttgtttttatgtacagtttatatacagaaaagtttgctctgcatttttgatgatggtttggaacattatctacaattttactctcaaatagtcaaaataaaaacatctcaatttctaataccggttgtaaacaaacagtacacatgtcattttgtgatataggactcccaaataaaagtatcagaataaacacaacaattaactggt

SEQ ID NO: 12871 - DNA, 8300 bp, Homo sapiens
cactgctctgactgcgtcctccccaggctgaagtgtcctcaggtttcatgtggatttgcccagtaatggatggctccaccgaggccaggttggggaagttcagcctcgaggacactaggggacgaaaaacttcaaaaagaagactctttttattaatattttggcgttctttttggagaggaacttttgggatgtagcctttacctgtttcctgaatttgacatccaaaaagccttttggaaaacaccattctaaatttatcctgttctgaatcatcatcgcttctgatagatgcagttgcttgctgacatcgtgatctttgattttgtacaacgctatttgggctaacttttgggattttactttgtgcttagaatttgaaagtagtattcattggaaagagactccaagaaaatactcgaagacatcaaaagctggattcgagggtataacgtgttttgttttgttttttaaattagaaaaataaggaattgcagtgtgattttctttccccctttaacttagaggaacgaggattatacagaaatttgaaatttcaacaagaaaaacttaagcttccttggattcccacgtcaaaggaaagtttcaagctttcagaaggagttctcactcgaagataaagaacagctcgctaaccacgaaagaggaatcgatgctcagcttttagttgcacttcctaaagttgcagaattaagacaaatctttgaaccaaagaagaaagaattcttagaaatgaaaagaaaagaaagaattgccaggcgcctggaaggaattgaaaatgacactcagcccatcctcttgcagagctgcacaggattggtgactcaccgcctgctggaggaagacacccctcgatacatgagagccagcgaccctgccagcccccacatcggccgatcaaatgaagaggaggaaacttccgattcttctctagaaaagcaaactcgatccaaatactgcacagaaacctccggtgtccacggtgactcaccctatggttcgggtaccatggacacccacagtctggagtccaaagccgaaagaattgcaaggtacaaagcagaaagaaggcgacagctggcagagaagtatgggctgactctggatcccgaggccgactccgagtatttatcccgctataccaagtccaggaaggagcctgatgctgtcgagaagcggggaggaaaaagtgacaaacaggaagagtcaagcagagatgcgagttctctgtaccccgggaccgagacgatggggctcaggacctgtgccggtgaatccaaggactatgccctccatgcgggtgacggctcttccgacccggaggtgctgctgaacatagaaaaccaaagacgaggtcaagagctgagtgccacccggcaggcccatgacctgtccccagcagccgagagttcctcgaccttctctttctctgggcgagactcctccttcactgaagtgccacggtcccccaagcacgcccacagctcctccctgcagcaggcagcctcccggagcccctcctttggtgacccacagctatcccctgaggcccgacccagtacagggaaacccaaacatgagtggtttctccagaaagattccgaaggggacacaccttcacttatcaactggccttccagagttaaagttagagaaaaattggtgaaagaggaaagtgctcgaaacagccctgaactcgcctcagagtccgtaactcagaggagacaccagccagcgccagtccattacgtgtcatttcagtctgagcactcagcctttgatagggtccccagcaaggcagcaggctctacacgacagccaatccgtggctatgtccaacccgcagataccggtcacaccgccaagctggtgacgccagaaaccccagaaaatgcatctgagtgtagctgggtagcatcagccacccagaatgtccccaaacctcccagcttgacggttctagaaggtgacggaagggatagcccagttctccatatctgcgagtcaaaagcagaagaagaagaaggggaaggagaaggagaagaaaaagaagaagatgtgtgcttcactgaagctctcgagcaaagcaagaaaaccctactggctttggagggtgatgggctagtgagaagcccagaagatccctctagaaatgaggactttggtaagcctgctgtgagcacagtcaccttagagcatcagaaggaactggaaaacgtggcacaaccccctcaagctccgcaccagcccactgagaggacaggcaggagcgagatggttctctacattcaaagtgagcctgtgtcccaagacgccaaaccaactggtcacaacagggaagcctcgaaaaagcgcaaggtccgtacccgctctctgtcagatttcacaggcccccctcagctccaggccttgaagtataaggacccagcttccaggagagagctggagctgcccagctccaagaccgaagggccttatggggagatcagcatgctggacacaaaggtctctgtcgcccagctccgaagtgcgttcctggcatctgccaacgcctgcaggagacctgaactcaaatcacgggtagagaggtcggctgaaggacctggcttgcccaccggtgtggaacgggagagagggtcccggaaaccaagacgctatttttctcctggtgaaagtagaaaaacttccgagagatttagaacccaacctataacttcagcagaacgaaaggaatcggataggtgcacttcacattcagaaacgccaactgtcgatgatgaagaaaaggtggatgaacgagccaagctgagcgtcgccgccaagaggttgcttttcagggagatggaaaaatcttttgatgaacaaaatgttccaaagcgacgctcaagaaacacagctgtggagcagaggctacgccgtctgcaggacaggtccctcacccagcccatcaccactgaagaggtggtcatcgcagccactgaacctatccccgcttcgtgttctgggggcacccaccctgtaatggcgagacttcctagccccactgtagctaggagcgctgtgcagcctgccagattgcaggcctctgctcaccaaaaggccttagccaaggaccagacaaatgagggcaaagagcttgctgagcaaggagaacctgattcctccactctaagcttggccgaaaagttggccttgtttaacaaattgtcccagccagtctcaaaagcgatttctacccggaacagaatagacacgagacagaggagaatgaacgctcgctatcaaactcagccagtcacactgggagaggtggagcaggtgcagagtggaaagctcattcctttctcacctgccgtgaacacatcagtgtctaccgtagcatccacggttgctccaatgtatgccggagatcttcgcacaaagccacctcttgaccacaatgcaagtgccactgactataagttttcttcttcaatagaaaattcggactctccagttagaagcattctgaaatcgcaagcttggcagcctttggtagagggtagcgagaacaagggaatgttgagagaatatggagagacagaaagcaagagagctttgacaggtcgagacagtgggatggagaagtatgggtcctttgaggaagcagaagcatcctaccccatcctgaaccgagccagggaaggagacagccataaggaatctaaatatgctgttcccagaagaggaagcctggaacgggcgaaccctcccatcacccacctcggggatgaaccgaaggaattttccatggctaaaatgaatgcacaaggaaacttggacttgagggacaggctgccctttgaagagaaggtggaggtggagaatgttatgaaaaggaagttttcactaagagcggcagagttcggggagcccacttccgagcagacggggacagctgctgggaaaactattgctcaaaccacagcccccgtgtcctggaagccccaggattcttcggaacagccacaggagaagctctgcaagaatccatgtgcgatgtttgctgctggagagatcaaaacgccgacaggggagggccttcttgactcacccagcaaaaccatgtctattaaagaaagattggcactgttgaagaaaagcggggaggaagattggagaaacagactcagcaggaggcaggagggcggcaaggcgccggccagcagcctgcacacccaggaagcagggcggtccctcatcaagaagcgggtcacagaaagtcgagagagccaaatgacgattgaggagaggaagcagctcatcactgtgagagaggaggcctggaagacgagaggcagaggagcggccaacgactcgacccagttcactgtggctggcaggatggtgaagaaaggtttggcgtcacctactgccataaccccagtagcctcagccatttgcggtaaaacaagaggcaccacacccgtttccaaacccctggaagatatcgaagccagaccagatatgcagttagaatcggacctgaagttggacaggctggaaacctttctaagaaggctgaataacaaagttggcgggatgcacgaaacggtgctcactgtcaccggcaaatctgtgaaggaggtgatgaagccagatgatgatgaaacctttgccaaattttaccgcagcgtggattataatatgccaagaagtcctgtggagatggatgaggacttcgatgtcattttcgatccttatgcacccaaattgacgtcttccgtggccgagcacaagcgggcagttaggcccaagcgccgggttcaggcctccaaaaaccccctgaaaatgctggcggcaagagaagatctccttcaggaatacactgagcagagattaaacgttgccttcatggagtcaaagcggatgaaagtagaaaagatgtcttccaactccaacttctcagaagtcaccctggcgggtttagccagtaaagaaaacttcagcaacgtcagcctgcggagcgtcaacctgacggaacagaactctaacaacagcgccgtgccctacaagaggctgatgctgttgcagattaaaggaagaagacatgtgcagaccaggctggtggaacctcgagcttcggcgctcaacagtggggactgcttcctcctgctctctccccactgctgcttcctgtgggtaggagagtttgcaaacgtcatagaaaaggcgaaggcctcagaacttgcaactttaattcagacaaagagggaacttggttgtagagctacttatatccaaaccattgaagaaggaattaatacacacactcatgcagccaaagacttctggaagcttctgggtggccaaaccagttaccaatctgctggagacccaaaagaagatgaactctatgaagcagccataatagaaactaactgcatttaccgtctcatggatgacaaacttgttcctgatgacgactactgggggaaaattccgaagtgctcccttctgcaacccaaagaggtactggtgtttgattttggtagtgaagtttacgtatggcatgggaaagaagtcacattagcacaacgaaaaatagcatttcagctggcaaagcacttatggaatggaacctttgactatgagaactgtgacatcaatcccctggatcctggagaatgcaatccgcttatccccagaaaaggacaggggcggcccgactgggcgatatttgggagacttactgaacacaatgagacgattttgttcaaagagaagtttctggattggacggaactgaagagatcgaatgagaagaaccccggggaacttgcccagcacaaggaagaccccaggactgatgtcaaggcatacgatgtgacacggatggtgtccatgccccagacgacagcaggcaccatcctggacggagtgaacgtcggccgtggctatggcctggtggaaggacacgacaggaggcagtttgagatcaccagcgtttccgtggatgtctggcacatcctggaattcgactatagcaggctccccaaacaaagcatcgggcagttccatgagggggatgcctatgtggtcaagtggaagttcatggtgagcacggcagtgggaagtcgccagaagggagagcactcggtgagggcagccggcaaagagaagtgcgtctacttcttctggcaaggccggcactccaccgtgagtgagaagggcacgtcggcgctgatgacggtggagctggacgaggaaaggggggcccaggtccaggttctccagggaaaggagcccccctgtttcctgcagtgtttccagggggggatggtggtgcactcggggaggcgggaagaggaagaagaaaatgtgcaaagtgagtggcggctgtactgcgtgcgtggagaggtgcccgtggaagggaatttgctggaagtggcctgtcactgtagcagcctgaggtccagaacttccatggtggtgcttaacgtcaacaaggccctcatctacctgtggcacggatgcaaagcccaggcccacacgaaggaggtcggaaggaccgctgcgaacaagatcaaggaacaatgtcccctggaagcaggactgcatagtagcagcaaagtcacaatacacgagtgtgatgaaggctccgagccactcggattctgggatgccttaggaaggagagacaggaaagcctacgattgcatgcttcaagatcctggaagttttaacttcgcgccccgcctgttcatcctcagcagctcctctggggattttgcagccacagagtttgtgtaccctgcccgagccccctctgtggtcagttccatgcccttcctgcaggaagatctgtacagcgcgccccagccagcacttttccttgttgacaatcaccacgaggtgtacctctggcaaggctggtggcccatcgagaacaagatcactggttccgcccgcatccgctgggcctccgaccggaagagtgcgatggagactgtgctccagtactgcaaaggaaaaaatctcaagaaaccagcccccaagtcttaccttatccacgctggtctggagcccctgacattcaccaatatgtttcccagctgggagcacagagaggacatcgctgagatcacagagatggacacggaagtttccaatcagatcaccctcgtggaagacgtcttagccaagctctgtaaaaccatttacccgctggccgacctcctggccaggccactcccggagggggtcgatcctctgaagcttgagatctatctcaccgacgaagacttcgagtttgcactagacatgacgagggatgaatacaacgccctgcccgcctggaagcaggtgaacctgaagaaagcaaaaggcctgttctgagtggggagacgccagaggagcctcacggtcacgtccaacaacaccactgcaccagggaaatggatatatatttttggactggtgtttttcacaaagtatttttcaatcagagttttcagaacctgacattgttaaagatactgcttgtcccggagttgtgtattttgtaaatgttcaagggaactgtttggaaacttctttccaccattcaggaggttatcagaattaataaaagtatctgttatgtgcacttaagccgcagctgctatagatagcactgccttcttgttccagctaggcaatgcctttttttttttttttgaagcagttctctttataaagtgttattttgatagtttgtggattctaaaatatatatatatttatataaacaccatataagtcaaatatgtatttaacaaagcaatatgtattcattcactttcaagatttgttttggtgtcaaaataacatgaaaaggtagatggagttgcttctgttgaattagctctgccaccaatatgtatcttcatacacgtttggaaatgtttcctgcagcattaggtatgacttgttctgagtactgcttccggtgctaaaatgaacaaagaatttgtacttaatggcatggactctggagaatctatgcgaatcaacctttctaccttaatatctccccaaaaatgtatagtgccttgtttttatgtacagtttatatacagaaaagtttgctctgcatttttgatgatggtttggaacattatctacaattttactctcaaatagtcaaaataaaaacatctcaatttctaataccggttgtaaacaaacagtacacatgtcattttgtgatataggactcccaaataaaagtatcagaataaacacaacaattaactggt

SEQ ID NO: 12872 - DNA, 2803 bp, Homo sapiens
tcctggaattgcacgcgcttcctgaccaccaggctctggcccttgagaagccagcggggctttgtccctgttgctctccttgccaaacccagtctctctgctagtggtggtttcggttgcgacaccgtccaggttcccaggcaggaaccgctcggcctggctgcttagctacttttcactgaggaggtggtggaaggtgtcgcctgctctggctgagtaagggtggctggctgagccggcagcccccgccctaggcctggctcttcccggcctctgtactttgccctcgctgcctgacaggttctgctgtgggctctgctgaatggaagtcgctggtagtccttttccctttctccagtcggcccaccttgggacaccttgactccaagcccagcagtaagtccaacatgattcggggccgcaactcagccacctctgctgatgagcagccccacattggaaactaccggctcctcaagaccattggcaagggtaattttgccaaggtgaagttggcccgacacatcctgactgggaaagaggtagctgtgaagatcattgacaagactcaactgaactcctccagcctccagaaactattccgcgaagtaagaataatgaaggttttgaatcatcccaacatagttaaattatttgaagtgattgagactgagaaaacgctctaccttgtcatggagtacgctagtggcggagaggtatttgattacctagtggctcatggcaggatgaaagaaaaagaggctcgagccaaattccgccagatagtgtctgctgtgcagtactgtcaccagaagtttattgtccatagagacttaaaggcagaaaacctgctcttggatgctgatatgaacatcaagattgcagactttggcttcagcaatgaattcacctttgggaacaagctggacaccttctgtggcagtcccccttatgctgccccagaactcttccagggcaaaaaatatgatggacccgaggtggatgtgtggagcctaggagttatcctctatacactggtcagcggatccctgccttttgatggacagaacctcaaggagctgcgggaacgggtactgaggggaaaataccgtattccattctacatgtccacggactgtgaaaacctgcttaagaaatttctcattcttaatcccagcaagagaggcactttagagcaaatcatgaaagatcgatggatgaatgtgggtcacgaagatgatgaactaaagccttacgtggagccactccctgactacaaggacccccggcggacagagctgatggtgtccatgggttatacacgggaagagatccaggactcgctggtgggccagagatacaacgaggtgatggccacctatctgctcctgggctacaagagctccgagctggaaggcgacaccatcaccctgaaaccccggccttcagctgatctgaccaatagcagcgccccatccccatcccacaaggtacagcgcagcgtgtcggccaatcccaagcagcggcgcttcagcgaccaggctggtcctgccattcccacctctaattcttactctaagaagactcagagtaacaacgcagaaaataagcggcctgaggaggaccgggagtcagggcggaaagccagcagcacagccaaggtgcctgccagccccctgcccggtctggagaggaagaagaccaccccaaccccctccacgaacagcgtcctctccaccagcacaaatcgaagcaggaattccccacttttggagcgggccagcctcggccaggcctccatccagaatggcaaagacagcacagccccccagcgtgtccctgttgcctccccatccgcccacaacatcagcagcagtggtggagccccagaccgaactaacttcccccggggtgtgtccagccgaagcaccttccatgctgggcagctccgacaggtgcgggaccagcagaatttgccctacggtgtgaccccagcctctccctctggccacagccagggccggcggggggcctctgggagcatcttcagcaagttcacctccaagtttgtacgcaggaacctgaatgaacctgaaagcaaagaccgagtggagacgctcagacctcacgtggtgggcagtggcggcaacgacaaagaaaaggaagaatttcgggaggccaagccccgctccctccgcttcacgtggagtatgaagaccacgagctccatggagcccaacgagatgatgcgggagatccgcaaggtgctggacgcgaacagctgccagagcgagctgcatgagaagtacatgctgctgtgcatgcacggcacgccgggccacgaggacttcgtgcagtgggagatggaggtgtgcaaactgccgcggctctctctcaacggggttcgatttaagcggatatcgggcacctccatggccttcaaaaacattgcctccaaaatagccaacgagctgaagctttaacaggctgccaggagcgggggcggcgggggcgggccagctggacgggctgccggccgctgcgccgccccacctgggcgagactgcagcgatggattggtgtgtctcccctgctggcacttctcccctccctggcccttctcagttttctcccacattcacccctgcccagagattcccccttctcctctcccctactggaggcaaaggaaggggagggtggatgggggggcagggctccccctcggtactgcggttgcacagagtatttcgcctaaaccaagaaattttttattaccaaaaagaaaaaaaaaaaaaaaaaa

SEQ ID NO: 12873 - DNA, 2965 bp, Homo sapiens
tcctggaattgcacgcgcttcctgaccaccaggctctggcccttgagaagccagcggggctttgtccctgttgctctccttgccaaacccagtctctctgctagtggtggtttcggttgcgacaccgtccaggttcccaggcaggaaccgctcggcctggctgcttagctacttttcactgaggaggtggtggaaggtgtcgcctgctctggctgagtaagggtggctggctgagccggcagcccccgccctaggcctggctcttcccggcctctgtactttgccctcgctgcctgacaggttctgctgtgggctctgctgaatggaagtcgctggtagtccttttccctttctccagtcggcccaccttgggacaccttgactccaagcccagcagtaagtccaacatgattcggggccgcaactcagccacctctgctgatgagcagccccacattggaaactaccggctcctcaagaccattggcaagggtaattttgccaaggtgaagttggcccgacacatcctgactgggaaagaggtagctgtgaagatcattgacaagactcaactgaactcctccagcctccagaaactattccgcgaagtaagaataatgaaggttttgaatcatcccaacatagttaaattatttgaagtgattgagactgagaaaacgctctaccttgtcatggagtacgctagtggcggagaggtatttgattacctagtggctcatggcaggatgaaagaaaaagaggctcgagccaaattccgccagatagtgtctgctgtgcagtactgtcaccagaagtttattgtccatagagacttaaaggcagaaaacctgctcttggatgctgatatgaacatcaagattgcagactttggcttcagcaatgaattcacctttgggaacaagctggacaccttctgtggcagtcccccttatgctgccccagaactcttccagggcaaaaaatatgatggacccgaggtggatgtgtggagcctaggagttatcctctatacactggtcagcggatccctgccttttgatggacagaacctcaaggagctgcgggaacgggtactgaggggaaaataccgtattccattctacatgtccacggactgtgaaaacctgcttaagaaatttctcattcttaatcccagcaagagaggcactttagagcaaatcatgaaagatcgatggatgaatgtgggtcacgaagatgatgaactaaagccttacgtggagccactccctgactacaaggacccccggcggacagagctgatggtgtccatgggttatacacgggaagagatccaggactcgctggtgggccagagatacaacgaggtgatggccacctatctgctcctgggctacaagagctccgagctggaaggcgacaccatcaccctgaaaccccggccttcagctgatctgaccaatagcagcgccccatccccatcccacaaggtacagcgcagcgtgtcggccaatcccaagcagcggcgcttcagcgaccaggctggtcctgccattcccacctctaattcttactctaagaagactcagagtaacaacgcagaaaataagcggcctgaggaggaccgggagtcagggcggaaagccagcagcacagccaaggtgcctgccagccccctgcccggtctggagaggaagaagaccaccccaaccccctccacgaacagcgtcctctccaccagcacaaatcgaagcaggaattccccacttttggagcgggccagcctcggccaggcctccatccagaatggcaaagacagcctaaccatgccagggtcccgggcctccacggcttctgcttctgccgcagtctctgcggcccggccccgccagcaccagaaatccatgtcggcctccgtgcaccccaacaaggcctctgggctgccccccacggagagtaactgtgaggtgccgcggcccagcacagccccccagcgtgtccctgttgcctccccatccgcccacaacatcagcagcagtggtggagccccagaccgaactaacttcccccggggtgtgtccagccgaagcaccttccatgctgggcagctccgacaggtgcgggaccagcagaatttgccctacggtgtgaccccagcctctccctctggccacagccagggccggcggggggcctctgggagcatcttcagcaagttcacctccaagtttgtacgcaggaacctgaatgaacctgaaagcaaagaccgagtggagacgctcagacctcacgtggtgggcagtggcggcaacgacaaagaaaaggaagaatttcgggaggccaagccccgctccctccgcttcacgtggagtatgaagaccacgagctccatggagcccaacgagatgatgcgggagatccgcaaggtgctggacgcgaacagctgccagagcgagctgcatgagaagtacatgctgctgtgcatgcacggcacgccgggccacgaggacttcgtgcagtgggagatggaggtgtgcaaactgccgcggctctctctcaacggggttcgatttaagcggatatcgggcacctccatggccttcaaaaacattgcctccaaaatagccaacgagctgaagctttaacaggctgccaggagcgggggcggcgggggcgggccagctggacgggctgccggccgctgcgccgccccacctgggcgagactgcagcgatggattggtgtgtctcccctgctggcacttctcccctccctggcccttctcagttttctcccacattcacccctgcccagagattcccccttctcctctcccctactggaggcaaaggaaggggagggtggatgggggggcagggctccccctcggtactgcggttgcacagagtatttcgcctaaaccaagaaattttttattaccaaaaagaaaaaaaaaaaaaaaaaa

SEQ ID NO: 12874 - DNA, 1515 bp, Homo sapiens
actagcggagccgcgagggagaggccgcggccccttcccgttgcctgcggccaccggccggcattcagagcccctcgcctggcgctaaatttaaaaacgtaacacgagcagcaggctggtctcggaaacgaaacgaaattcggtccctgggcctcctcccgggcgctgccggtccctcagcgcgccgcgccacccggaacagacccttctcccgccattttcggcggggctgggagactgaggcccgcggcgctgagcctgcggcgccccggaagaggcgggcggcatggccgctggcgtggactgcggggacggggttggcgcccggcagcacgtgttcctggtttcagaatatttaaaagatgcttcaaagaagatgaaaaatgggctaatgtttgtaaaactggttaacccctgttcaggagaaggagccatttacttgttcaatatgtgtctacagcagctgcttgaagtaaaagttttcaaggaaaaacaccattcttggtttataaatcaatcagttcaatcaggaggtcttctccattttgccacacctgtggatcctctatttctgcttctccactacctcataaaggctgataaggaggggaagtttcagccccttgatcaagttgtggtggataacgtgtttccaaattgcatcttgttgctgaaacttcctggacttgagaagttacttcatcatgtgacagaggaaaaaggtaatccagaaatagacaacaagaaatattacaagtacagcaaagagaagacattaaagtggctggaaaaaaaggttaatcaaactgtggcagcattaaaaaccaataatgtgaatgtcagttcccgggtacagtcaactgcatttttctctggtgaccaagcttccactgacaaggaagaggattatattcgttatgcccatggtctgatatctgactacatccctaaagaattaagtgatgacttatctaaatacttaaagcttccagaaccttcagcctcattgccaaatcctccatcaaagaaaataaagttatcagatgagcctgtagaagcaaaagaagattacactaagtttaatactaaagatttgaagactgaaaagaaaaatagcaaaatgactgcagctcagaaggctttggctaaagttgacaagagtggaatgaaaagtattgataccttttttggggtaaaaaataaaaaaaaaattggaaaggtttgaaactttgaaaataaaatctagcaaaaatatttgctttttacatgtttcagtttgtccttcctgactgttaatgactacctttggttgggggaaggaagaggccaatttcatgttctcttaaacatttctttgcatttggtttttgtgttcctgaacaaaatatgggaaagtgtctaacttcatggctatggccttttggagtctcatctgacataatgaaaagtaatcacttgaagagaattaacatatagcatcatgattttctcaataaactgatgtgtgacaatgtt

SEQ ID NO: 12875 - DNA, 2518 bp, Homo sapiens
atgaatgaacacttatcaagcctaattaaaaaaaaacgtaaatgtatgcagcccaaagattttaattttaaaacaccagaaaatgataagagatttcagaagaaatttgagaaaatggctaaagagctacaaaggcaaaaaacaaatctagatgatgatgtacctattctcttatttgaatctaatggttcattaatatatactcccacaattgaaattaatagtagtcaccacagcgcaatggagaagagattacaagagatgaaggagaaaagggaaaatctttcccccacctcttcccaaatgattcagcagtctcatgataatccaagtaactctctgtgtgaagcacctttgaacatttcacgtgatactttgtgttcagatgaatactttgctggtggcttacactcatcttttgatgatctttgtggaaactcaggatgtggaaatcaggaaaggaagttggaaggatccattaatgacattaaaagtgatgtgtgtatttcttcacttgtattgaaagcaaataatattcattcatcaccatctttcactcacctcgataaatcaagtcctcagaaatttctgagtaatctttcaaaggaagaaataaacttgcaaagaaatattgcaggtaaagtagtcacccctcaccaaaagcaggctgcaggtatgtctcaggagacgtttgaagagaagtatcgtttgtctcctaccttatcttcaacaaaaggccaccttttgatacattcaagacccaggagttcctcagtaaagagaaaaagagtatcacatggctcccattcacctccgaaggaaaaatgcaagagaaagaggagcaccaggagatctatcatgccgaggctgcagctgtgcaggtcggaaggcaggctgcagcacgtggcgggacctgccctggaggctcttagctgtggggagtcttcatatgatgactatttttcacctgataatcttaaggaaaggtattcagagaatcttcctcctgaatctcagctgccatcaagccctgctcagttgagctgcagaagtctttctaagaaggagagaacaagcatatttgaaatgtctgatttttcctgcgttggcaaaaaaaccagaacagttgacattaccaatttcacagcaaaaaccatctccagtcctcggaaaactggaaatggtgaaggccgtgcaacttcgagttgcgtgacttctgcccctgaagaagccctaaggtgttgtagacaggctgggaaagaagacgcatgcccagagggaaatggcttttcttacaccattgaggaccctgctcttccaaaaggacatgatgatgatttaactcctttggaaggaagccttgaagaaatgaaagaagcggttggtctgaaaagcacacagaacaaaggtaccacttccaaaatatcaaactcctctgaaggcgaagcccagagtgaacatgagccatgttttatagttgactgtaacatggagacgtctacagaagagaaggaaaacttacccggaggatacagtggaagtgttaaaaatagaccaacaaggcatgatgttttagatgactcatgtgacggctttaaggacctcatcaaacctcatgaggaattgaagaaaagtgggagaggcaaaaagccaacaagaacattagtcatgacaagcatgccatctgaaaagcagaatgtcgtcatccaggttgtggataaattgaaaggcttttcaattgcaccagacgtctgtgagaccacgactcacgtgctttccgggaagccacttcgcaccctgaatgtgctgctgggaattgcgcgtggctgctgggttctctcttatgattgggtgctatggtctttagaattgggtcactggatttctgaggagccgttcgaactgtctcaccacttccctgcagctcccctgtgccgaagtgagtgccacttgtctgcagggccgtaccgcggaaccctctttgccgaccagccagtgatgtttgtctcgcctgccagcagccccccagtggccaagctctgtgaactagtccacctgtgcggaggccgggtcagccaagtcccccgccaggccagcatcgtcatcgggccctacagcggaaagaagaaagcaacagtcaagtatctgtctgagaaatgggtcttagattccatcacccagcacaaggtctgtgcccctgaaaactacctattgtcacaatgacagtgacctcactggcctgtggtgactgcacacagctcgcaaaactgtctttggatgttcaaatgagaaacaaaactgtgaagagaaggaactggcgtatacaagatgacttctgatatcatgtttgccatgtgttgtggttcttaagaactcataggtgactttctgatgactgaatgtctgtttcagagacgcttcgggcctttttatttttattttattttttattttttgagacggagtccagcctgggcaacagagtaactctccttctcaaataaataaataaataaat

SEQ ID NO: 12876 - DNA, 3452 bp, Homo sapiens
aactccaggaatttgtggcggagagggcaaataactgcggctctcccggcgccccgatgctcgcaccatgtcgaggcgcaagcaggcgaaaccccagcacatcaactcggaggaggaccagggcgagcagcagccgcagcagcagaccccggagtttgcagatgcggccccagcggcgcccgcggcgggggagctgggtgctccagtgaaccacccagggaatgacgaggtggcgagtgaggatgaagccacagtaaagcggcttcgtcgggaggagacgcacgtctgtgagaaatgctgtgcggagttcttcagcatctctgagttcctggaacataagaaaaattgcactaaaaatccacctgtcctcatcatgaatgacagcgaggggcctgtgccttcagaagacttctccggagctgtactgagccaccagcccaccagtcccggcagtaaggactgtcacagggagaatggcggcagctcagaggacatgaaggagaagccggatgcggagtctgtggtgtacctaaagacagagacagccctgccacccaccccccaggacataagctatttagccaaaggcaaagtggccaacactaacgtgaccttgcaggcactacggggcaccaaggtggcggtgaatcagcggagcgcggatgcactccctgcccccgtgcctggtgccaacagcatcccgtgggtcctcgagcagatcttgtgtctgcagcagcagcagctacagcagatccagctcaccgagcagatccgcatccaggtgaacatgtgggcctcccacgccctccactcaagcggggcaggggccgacactctgaagaccttgggcagccacatgtctcagcaggtttctgcagctgtggctttgctcagccagaaagctggaagccaaggtctgtctctggatgccttgaaacaagccaagctacctcacgccaacatcccttctgccaccagctccctgtccccagggctggcacccttcactctgaagccggatgggacccgggtgctcccgaacgtcatgtcccgcctcccgagcgctttgcttcctcaggccccgggctcggtgctcttccagagccctttctccactgtggcgctagacacatccaagaaagggaaggggaagccaccgaacatctccgcggtggatgtcaaacccaaagacgaggcggccctctacaagcacaagtgtaagtactgtagcaaggtttttgggactgatagctccttgcagatccacctccgctcccacactggagagagacccttcgtgtgctctgtctgtggtcatcgcttcaccaccaagggcaacctcaaggtgcactttcaccgacatccccaggtgaaggcaaacccccagctgtttgccgagttccaggacaaagtggcggccggcaatggcatcccctatgcactctctgtacctgaccccatagatgaaccgagtctttctttagacagcaaacctgtccttgtaaccacctctgtagggctacctcagaatctttcttcggggactaatcccaaggacctcacgggtggctccttgcccggtgacctgcagcctgggccttctccagaaagtgagggtggacccacactccctggggtgggaccaaactataattccccaagggctggtggcttccaagggagtgggacccctgagccagggtcagagaccctgaaattgcagcagttggtggagaacattgacaaggccaccactgatcccaacgaatgtctcatttgccaccgagtcttaagctgtcagagctccctcaagatgcattatcgcacccacaccggggagagaccgttccagtgtaagatctgtggccgagccttttctaccaaaggtaacctgaagacacaccttggggttcaccgaaccaacacatccattaagacgcagcattcgtgccccatctgccagaagaagttcactaatgccgtgatgctgcagcaacatattcggatgcacatgggcggtcagattcccaacacgcccctgccagagaatccctgtgactttacgggttctgagccaatgaccgtgggtgagaacggcagcaccggcgctatctgccatgatgatgtcatcgaaagcatcgatgtagaggaagtcagctcccaggaggctcccagcagctcctccaaggtccccacgcctcttcccagcatccactcggcatcacccacgctagggtttgccatgatggcttccttagatgccccagggaaagtgggtcctgccccttttaacctgcagcgccagggcagcagagaaaacggttccgtggagagcgatggcttgaccaacgactcatcctcgctgatgggagaccaggagtatcagagccgaagcccagatatcctggaaaccacatccttccaggcactctccccggccaatagtcaagccgaaagcatcaagtcaaagtctcccgatgctgggagcaaagcagagagctccgagaacagccgcactgagatggaaggtcggagcagtctcccttccacgtttatccgagccccgccgacctatgtcaaggttgaagttcctggcacatttgtgggaccctcgacattgtccccagggatgacccctttgttagcagcccagccacgccgacaggccaagcaacatggctgcacacggtgtgggaagaacttctcgtctgctagcgctcttcagatccacgagcggactcacactggagagaagccttttgtgtgcaacatttgtgggcgagcttttaccaccaaaggcaacttaaaggttcactacatgacacacggggcgaacaataactcagcccgccgtggaaggaagttggccatcgagaacaccatggctctgttaggtacggacggaaaaagagtctcagaaatctttcccaaggaaatcctggccccttcagtgaatgtggaccctgttgtgtggaaccagtacaccagcatgctcaatggcggtctggccgtgaagaccaatgagatctctgtgatccagagtgggggggttcctaccctcccggtttccttgggggccacctccgttgtgaataacgccactgtctccaagatggatggctcccagtcgggtatcagtgcagatgtggaaaaaccaagtgctactgacggcgttcccaaacaccagtttcctcacttcctggaagaaaacaagattgcggtcagctaagggagaacttgcgtggaaggagcaatgcagacacagtgaaatctctagaatctgctttgttttgtaagaactcatctcctcctgttttctttttcttactgatatgcaaatgatgtttactacgttggttgtgaccacaacctcaggcaagtgctacaatcacgattgttgctatgctgctttgcaaaaagttgaaaaaataaaaaaaaaatgcataccaaaa

SEQ ID NO: 12877 - DNA, 3447 bp, Homo sapiens
actcgaagtgcggcgggagaggcgggagcccaggagagggtgcgggagctggcggggcggctcggagctgccaggacgccctggtcccagccgcgcacaggggagcgtggacggcagaggggctcggcgggagccgagatccgcccgtcccggctgcccctcggcctccctctgctcccacctaccccctgacacccatagaaaagcgtgcaaaggcgcggagcgggacggaaaccacaaataaatagcggcggcggcagcgcgtcatctggtggagcaggaagtgcaggcagagtccggaggctggtgctttctgcgcgtccccaggactttgccatgggctgggggccgcggaggctgcgagcggccgggcgagggcagcggcggcggcgtccgcaccggggctgagcgagcagcgacgcgaggggcgcgcggagatggcagcgtccagcaactccagcctgtccggctcgtcggtgtcctccgatgctgaagaataccagcctcctatatggaaatcatacttatatcagttacagcaagaggcacctcgtcccaagagaatcatttgtcctcgggaggtggaaaacagaccaaaatattatggaagagagtttcatgggatcatctctcgggagcaggcggatgagcttcttggaggcgtggagggtgcctacatccttagagaaagccagcggcaaccaggatgctacacgctggctctcaggtttggaaaccagaccttaaactacaggctcttccacgacgggaaacactttgtgggtgagaagaggtttgagtcgattcatgatctggtgacagatggcttgataacactgtacatagaaacaaaagctgccgagtacatttcaaaaatgacaactaaccccatctatgaacacattggatatgccaccctactcagagaaaaagtatccagaaggctgagcaggtctaaaaatgaaccaagaaaaacaaacgtcacacatgaagaacacacagcggtggaaaagatctcctccctggttcgaagggctgccctcacacacaacgacaaccacttcaattatgagaagacacacaactttaaggtccacacgttccgaggcccacactggtgtgaatattgtgccaatttcatgtgggggctcatcgcccaaggggtccggtgctcagactgtggattgaacgtacacaaacagtgttccaagcacgttcccaatgactgccaacctgatctcaagaggatcaagaaagtgtactgttgtgacctcacaacacttgtgaaggctcacaacactcagagacccatggtggtagacatatgcattcgggaaattgaagcaagaggattaaaatcggaaggcctttacagagtctctgggttcactgaacacattgaagatgtcaaaatggcatttgacagagatggtgaaaaggccgatatatctgccaatgtctatccagacataaacatcatcactggagcccttaaactgtatttcagagacttacccatccctgtcatcacatatgatacctattccaaatttatagatgcagcaaaaatctccaatgcagatgagaggctggaagccgtccatgaagtgctgatgctgctgcctcctgcccactatgaaaccctccggtacctaatgatccacctcaaaaaggttactatgaatgaaaaagacaatttcatgaatgcagaaaatctggggatcgtgtttgggcccactctgatgaggccccctgaggacagcaccctgaccaccctgcatgatatgcggtaccaaaagctgattgtgcagattttaatagaaaacgaagacgttttattctaatccatcagggaaatgagctgaatggccccagcaccatccaagttgacacagctaaaggaataaaaacatttcttaccacttgatttgttttccaagcaagtgctagaatttgctggactgcagaggatcgctgagtggggtactgtgtctcatagacatgcgccacctccacgtgagaacaagggtgaaggtgagggaagcccctcaccttgggtcttttgctgtgcctcctatgtatgtctggtttgctggaagagtgattaatacatctttaatttattaaaaaacaatgtagacctttaaacttcagtcttattggtaataaaagggaacttaattcatacaggtacttgatacagttatacattttccacttacaaaaagaagacaattctgttaaatgaaacgtgtatcgtaaaatgtatttttattttacccacgagaatgttgttatttttagcaaatagaactcaatgcagtgcattggttattaccctgtgtaccttgtccctcattttgctgtgacaccctgaaaaagctgaccacaaatgcagtattatcttgacatacctctgtcctcctcagtgctttttaatgaaatttcacctgccccttgtgttcctgctttggatagtttttgctcttaagcattggcattcttctattgtatggtatgtatttatagcaattgtaggatggtctgaaatgtccacacactttctatgcatacaaattttgtgaattcccaaagtatgctttggaattggtcatagtcttttcgtatcatgagtgtgtatcccagaagatacagaatgcggtcattttacctgaaattatttgagaacactggatgtatctggtctgtgtaaaaagttagcacttaccctcttttcttcctggccaagccctctgaattcatctgttaatatcaaattgtatttttgccacatttctgtattggtgaaaagcgaatctgcagaataactgtcaacgtttttcattcttgttttacaaacctattttttaaagtgagaataaggttggtttttaccaaatatttgttcctccttgacaaaagtagctctgtgtggataatatgattttattactacagttccagtcacttggttatatttatcttagcatgagcctttcacaccaagatttctatattttgtaacataggtgaaatatttaaaacatcaaaaactgtaaatctagatttttaaaaaatccaactgcaatgtcttttcctttgattgagatgatttgtgtaaactcaccagtcttgctttggagtgagcagaagagaatgactattttacgtggagcatcattgtgtgactgttgacctggacagtcccaagggctatgcagatggactccattggcacagggaggtttgacctcttccctgctattatccctcctcccaactgtacagatttgtttgttgtagtttatgtacttcttgatactgtcaaaaaattatctggaaatggttttattttgtgaagtgaacaatactttgtaatttatgatagtgtaaatggaaggcaaagcatcacatgtattaaattcttctgtctattaaaaaaaaaaa

SEQ ID NO: 12878 - DNA, 6940 bp, Homo sapiens
cttaaagtagatcatggaggacacccaggctattgactgggatgttgaagaagaggaggagacagagcaatccagtgaatccttgaggtgtaacgtggagccagtagggcggctacatatctttagtggtgcccatggaccagaaaaagatttcccactacacctcgggaagaatgtggtaggccgaatgcctgactgctctgtggccctgccctttccatctatctccaaacaacatgcagagattgaaatcttagcctgggacaaggcacctatcctccgagactgtgggagccttaatggtactcaaatcctgagacctcctaaggttttgagccctggggtgagtcaccgtctgagggaccaggaattgattctctttgctgacttgctctgccagtaccatcgcctggatgtctctctgccctttgtctcccggggccctctgacagtagaagagacacccagagtacagggagaaactcaaccccagaggcttctgttggctgaggactcggaggaggaagtagattttctttctgaaaggcgtatggtaaaaaaatcaaggaccacatcttcctctgtgatagttccagagagtgatgaagaggggcattccccggtcctgggcggccttgggccgccttttgccttcaatttgaacagtgacacagatgtggaagaaggtcagcaaccagccacagaggaggcctcctcagctgccagaagaggtgccactgtagaggcaaagcagtctgaagctgaagttgtaactgaaatccagcttgaaaaggatcagcctttagtgaaggagagggacaatgatacaaaagtcaagaggggtgcagggaatggggtggttccagctggggtgattctggagaggagccaacctcctggagaggacagtgacacagatgtggatgatgacagcaggcctcctggaaggccagctgaggtccatttggaaagggctcagccttttggcttcatcgacagcgacactgatgcggaagaagagaggatcccagcaaccccagttgtcattcctatgaagaagaggaagatcttccatggagtaggtacaaggggtcctggagcaccaggcctggcccatctgcaggagagccaggctggtagtgatacagatgtggaagaaggcaaggccccacaggctgtccctctggagaaaagccaagcttccatggttatcaacagcgatacagatgacgaggaagaagtctcagcagcgctgactttggcacatctgaaagagagccagcctgctatatggaacagagatgcagaagaggacatgccccaacgtgtggtccttctgcagcgaagccaaaccaccactgagagagacagtgacacagacgtggaggaggaagagctcccagtggaaaatagagaagctgtcctcaaggatcacacaaagattagagcccttgttagagcacattcagaaaaggaccaacctccttttggggacagtgatgacagtgtggaagcagataagagctcacctgggatccacctggagagaagccaagcctccaccacagtggacatcaacacacaagtggagaaggaagtcccgccagggtcagccattatgcatataaagaagcatcaggtgtctgtggaggggacaaatcaaacagatgtgaaagcagttgggggaccagcaaagctgcttgtggtatctctagaggaagcctggcctctgcatggggactgtgaaacagatgcagaggagggcacctccctaacagcctcagtagttgcagatgtaagaaagagccagcttccagcagaaggggatgctggggcagagtgggctgcagctgttcttaagcaggagagagctcatgaggtgggggcccagggtgggccacctgtggcacaagtggagcaggacctccctatctcaagagagaacctcacagatctggtggtggacacagacactctaggggaatccacccagccacagagagagggagcccaggtccccacaggaagggagagagaacaacatgtgggtgggaccaaggactctgaagacaactatggtgattctgaagatctggacctacaagctacccagtgctttctggagaatcagggcctggaagcagtccagagcatggaggatgaacctacccaggccttcatgttgactccaccccaagagcttggcccttcccattgcagcttccagacaacaggtaccctagatgaaccatgggaggtcctggctacacagccattctgtctgagagagtctgaggactctgagacccagccttttgacacgcaccttgaggcctatggaccttgcctgtctccacctagggcaataccaggagaccaacatccagagagcccagttcacacagagccaatggggattcaaggcagagggaggcagactgtggataaagtcatgggtataccaaaagaaacagcagagagggtgggccctgagagagggccattggagagagaaactgagaaactgctaccagaaagacagacagatgtgacaggagaggaagaattaaccaaggggaaacaggacagagaacaaaaacagttgttagctagagacacccagagacaagaatctgacaaaaatggggaaagtgcaagtcctgaaagagatagggagagtttgaaggtagaaattgagacatctgaggaaatacaagagaaacaagtacagaagcagacccttccaagcaaagcatttgagagagaagtagagagaccagtagcaaacagagagtgcgatccagccgagttagaagagaaggtgcccaaagtgatcctggagagagatacacagagaggggagccagagggagggagccaggaccagaaagggcaggcctccagcccaacaccagagcctggggtgggggcgggggaccttccgggacctacctcagcccccgtaccttctgggagccagtcaggtggaaggggatccccagtgagccccaggaggcatcagaaaggcctcctgaattgcaagatgccacctgctgagaaggcttccaggatcagagctgctgagaaggtttccaggggcgatcaggaatctccagatgcttgtctgcctcctgcagtacctgaagccccagccccaccccaaaagccccttaactctcagagccagaaacatcttgcacctccgccccttctttctccccttttaccttctatcaagccaaccgttcgtaagaccaggcaagatgggagtcaggaagctccagaggctcccttgtcctcagagctggagcctttccacccaaagcctaaaattagaactcggaagtcctccagaatgacaccctttccagctacctctgctgcccctgagccccacccttccacctccacagcccagccagtcactcccaagcccacatctcaggccactaggagcaggacaaataggtcctctgtcaagacccctgaaccagttgtccccacagcccctgagctccagccttccacctccacagaccagcctgtcacctctgagcccacatctcaggttactaggggaagaaaaagtagatcctctgtcaagacccctgaaacagttgtgcccacagcccttgagctccagccttccacctccaccgaccgacctgtcacctctgaacccacctctcaggctactaggggaagaaaaaatagatcctctgtcaagacccctgaaccagttgtccccacagcccctgagctccagccttccacctccacagaccagcctgtcacttctgagcccacatatcaggctactaggggaagaaaaaatagatcctctgtcaagacccctgaaccagttgtgcccacagcccctgagctccggccttccacctccacagaccgacctgtcacccccaagcccacatctcggaccactaggagcaggacaaatatgtcctctgtcaagacccctgaaacagttgtccccacagcccctgagctccagatttccacctccacagaccaacctgtcacccctaagcccacatctcggaccactaggagcaggacaaatatgtcctctgtgaagaaccctgaatcaactgtccctatagcccctgagctcccaccttccacctccacagagcagcctgtcacccctgagcccacatctcgggctactaggggaagaaaaaatagatcctctggcaagacccctgaaacacttgtccccacagcccctaagctcgagccttccacttccacagaccaacctgtcactcctgagcccacatctcaggccaccaggggcaggacaaataggtcctctgtgaagacccctgaaacagttgtccccacagcccctgagctccagccttccacctccacagaccagcctgttacccctgagcctacgtctcaggctactaggggaagaacagatagatcctctgtcaagactcctgaaacagttgtccccacagcccctgagctacaggcttccgcctccacagaccagcctgtcacctctgagcccacatctcggaccactaggggaagaaaaaatcggtcctctgtcaagacccctgaaacagttgtgcccgcagcccctgagctccagcctcccacctccacagaccgacctgtcacccctgagcccacatctcgggccactaggggcaggacaaataggtcctctgtcaagacccctgaatcaattgtccctatagcccctgagcttcagccttccacctccagaaaccagcttgtcacccctgagcccacatctcgggccactaggtgcaggacaaataggtcctctgtcaagacccctgagccagttgtccccacagcccctgagccccatcctaccacctccacagaccagcctgtcacccccaagctcacatctagggccactaggagaaagacaaataggtcctctgtcaagactcccaaaccagttgaaccagcagcctctgatcttgagccttttacccccacagaccagtccgtcacccctgaggccatagctcagggtggtcagagcaaaacactgaggtcttccacagtaagagctatgccggttcctaccacccctgaattccaatctcctgtcaccacagaccagcctatttcccctgagcctattactcaacccagttgcatcaagaggcagagagccgctgggaaccctggctccctcgcagctcccattgaccataagccttgctctgcacccttggaacctaaatcccaggcctcaaggaaccaaagatggggagcagtgagagcagctgaatcccttacagccattcctgagcctgcctctccccagcttcttgagacaccaattcatgcctcccagatccaaaaggtggaaccagcaggtagatctaggttcaccccggagctccagcctaaggcctctcaaagccgcaagaggtctttagctaccatggattcaccaccacatcaaaaacagccccaaagaggggaagtctcccagaagacagtgattatcaaggaagaggaagaagatactgcagagaagccagggaaggaagaggatgtcgtgactccaaaaccaggcaagagaaagagagaccaggcagaggaggagcccaacagaataccaagccgcagcctccgacggaccaaacttaaccaagaatcaacagcccccaaagtgctcttcacaggagtggtggatgctcggggagagcgggctgtgctggcactggggggaagtctggctggttcagcggcagaggcttcccacctggtcactgatcgcatccgccggacagtcaagttcctgtgtgccctggggcggggaatccccattctgtccctggactggctgcatcagtcccgcaaggctggtttcttcttacccccggatgaatatgtggtgaccgaccctgagcaagagaagaactttggctttagccttcaagacgcactgagcagggctcgggagcgaaggctgctagagggctatgagatctatgtgacccctggagtccagccaccaccacctcagatgggagagattattagctgctgtggaggcacatacctacccagcatgcctcggtcctataagcctcagagagttgtgatcacatgccctcaggacttccctcattgctccattccactacgggttgggctgcccctcctctcgcctgagttcctgctgactggagtgctgaagcaggaagccaagccagaggcctttgtcctctcccctttggagatgtcatccacctgagaactccactacccttttccctcccagaccacgaattagaagatatgtggaagaaagaactcagggcgttagaaaggattggggtatattgatacaacttgtcctggaacatgggtgggaccagaaatctttatgaataaatgaaaagataagggatttggaagccacaggttgttttttgtttgtttgtttgtttttttaatggccattttattttatttgtatttatagttttttatttgtatagatttaggggatacaagatttcttacatgcatgtattaaatggccattttaaaattagctagtttcatgctcagatgtcataagtggcagctatctttagccagactgttgcagttattgctcgatgccactcatggtgtcctacctcctatttggaaaccatctctatttttttcttactgagattcttactttggggtcaggaacttgaagggatgcttggagtgagtagatttgagggtccagttatggagtgctactaaaacattttcttctctcctggcctctggaagcatctttagctttgactttgggcaagtctctgtacttttctggccagcttttccaggatttataaaattagagcttcggcttgacctctgtgataaataaatattcactctgtgcctt

SEQ ID NO: 12879 - DNA, 1798 bp, Homo sapiens
gccgcccggccgagcgcggagcgcagccactcgccgctgcccagggagcgcccaagatgtggggggaccggggcggcagcggccgtagcagcgccagggacgggggcacgcagcagcctccgctcgcccgcctgtcctgacctgcctcgcttgcccccaaagaatgtcagccaagtccaaggggaacccctcctcgtcctgtccagccgagggaccgccggcagcctccaaaaccaaggtgaaggaacagatcaagatcatcgtggaggatttggaattagtcctgggcgacctgaaggacgtggccaaggaacttaaggagatgaagtcccactctgttgcccaggctagagtgcaatggcacaatctgggctcactgcaacctctgcctcccaggttcaagctattctcctgcctcagcctgcctcagtgcgccactacgcctgggtggttgaccagattgacaccctgacctctgacctacagctggaggatgagatgactgacagctccaaaacggacacgctgaatagtagctcaagtggcacaacagcctccagcctagagaagatcaaagtgcaggctaatgcaccgcttattaaacccccagcacacccatctgctatcctcacggtcctgagaaagccaaaccctccaccacctcctccaaggttgacacctgtgaagtgtgaagaccccaaaagggtggttccaactgccaatcctgtaaaaaccaatggcacccttctacgaaatggaggcttaccaggtggacctaacaaaattccaaatggagatatctgctgcatacccaacagtaacttggacaaggctccagtccagcttctgatgcatagacctgaaaaagacagatgtccccaggcagggcctcgagaacgagttcggtttaatgaaaaagtacagtaccatggctattgtcctgactgtgatacccggtataacataaaaaacagggaggtccacttacacagtgaacctgtccacccaccgggaaagattcctcaccaaggccctcccctccctcctacaccccatctccctcctttcccactagaaaatgggggaatgggaataagccacagtaacagcttcccccctatcagacctgcaactgtgcctcctcccactgcaccaaaaccacagaagacgatcttgaggaagtcaaccactacaaccgtgtgatgtatgccattaaaaaaattgtttttttaattttctatattataaacataaaataagtaatgagcactttctactcaagcaataaaaagcccaaatatattaatcctgcattcagcaaagtggcataaaaatcacctggtaagtatgcagcacattgcttatatcctgggtatgcattattttaaatgttgtatcattaaaaacctcagaatgatgaaaaatatgaatgatgcattgtttttgcaattgacctatgacaaactgtgaacctgcagatttcacctattttgatttactataagagctgggatttgattcattttatttatgcctaagtcatctatgcattaacatgtcatattcttaactttgatctaatgctttttactaggaaattttaatactgaaggactattttattatttttttctaaagatgtttgtcactagtttttcattattaaatgctgaggccaataccaagaagtttattttctatattatacaattatgaattacatgctcagctatatatgtaataaaatactttggtctgtggaaaaaaaaaaaaaaaaaaaaaaaaaaaaaaaaaaaaa

SEQ ID NO: 12880 - DNA, 1852 bp, Homo sapiens
ccgcgctgtccgccgccgctgcctgagtcgactctgcgccgcccgccgcgatggaggccgccgcccagttcttcgtcgagagcccggacgtggtctacggccccgaggccatcgaggcgcaatacgagtaccggacgacgcgcgtcagccgcgagggtggcgttctcaaggtgcaccccacgtccacgcgcttcaccttccggaccgcccggcaggtgccccggctcggggtcatgcttgtcggctggggcgggaacaacggctccacactcaccgccgcggtgctggccaatcgactgcgtttgtcctggcccacgcgcagcggccgcaaggaggccaactactacggctcgctgactcaggcgggcaccgtgagcctgggcctggacgccgagggccaggaggtgttcgtacccttcagcgcggtgctgcccatggtggcgcccaacgacctcgtgttcgatggctgggacatctcgtcgctgaacctggccgaggcgatgcggcgcgcgaaggtgctggactgggggctgcaggagcaactgtggccgcacatggaggccctgcggccccggccttctgtttacatccccgaattcatcgcggccaaccagagcgcgcgcgcggacaacctcatcccaggctcgcgtgcgcagcagctggagcagatccgcagggacatccgagacttccggtctagcgcggggctggacaaagtcatagtgctgtggacggcgaacacggagcgcttctgtgaggtgattccaggcctcaacgacacagccgagaacctgctgcgcaccattgagctcggtctggaggtgtcgccctccacgctcttcgccgtggccagcatcctggagggctgtgccttcctcaatgggtctccgcagaacaccctggtgcccggagctcttgagctcgcgtggcagcaccgggtttttgtgggcggagatgacttcaagtcaggccagaccaaagtcaagtccgtgcttgtggacttcctcattggctccggcctcaagaccatgtccatcgtgagttacaaccacctgggcaacaacgatggggagaacctatcggcgccattgcagttccgctctaaggaggtgtccaagagcaacgtggtggacgacatggtgcagagcaacccagtgctctatacgcccggcgaagagcctgaccactgcgtggtcatcaagtatgtgccgtacgtgggtgacagcaagcgcgcgctggatgagtatacctcggagctgatgctgggcggaaccaacacactggtgctgcacaacacgtgtgaggactcgctgctggccgcacccatcatgctggacctagcgctgctgaccgagctgtgccagcgcgtgagcttctgcactgacatggaccccgagccgcagaccttccaccccgtgctgtccctgctcagcttcctcttcaaggcgccactagtgccgcccggcagcccggtggtcaatgcgcttttccgccagcgcagctgcatcgagaacatcctcagggcctgcgtggggctcccgccacagaaccacatgctcctggaacacaaaatggagcgcccagggcccagcctcaagcgagttggacccgtggctgccacctaccctatgttgaacaagaaaggaccggtacccgctgccaccaatggctgcaccggtgatgccaatgggcatctgcaagaggagcccccaatgcccaccacctgaggccccggtcacacagtttctcggctcttcctccccgctgccccccacgaccctaccttgaaggcccccacaaataaaggcgctgccactcagccctcaaaaaaaaaaaaaaaaaaaaaaaaaaa

SEQ ID NO: 12881 - DNA, 10487 bp, Homo sapiens
acgcgggggagtgcagctggcaccatgggtgtgctccagagcaacttctgcttgctctgagccccctgccctgcctcccctttcaccatgtttcctctgacaagattttaagtacagcaattcaagaagatttctcctcctaaacgacatttatctgaagtctattgcctcttgattgctggaaaagaatcttaaaatcatttcaaaagtaacttataaacaaacttattaaaagtgatgaaaggagcattgaaattaattagcactaatttttcactgtgccaaagtgtgcagtgtccttcagaggaaacaataacagatctggtgagtgtgccatgccagtggggagaattgaatgtccctcatctccctctttccctagggacattagtcatgagtgccgagtgtgcggggtcacagaagtgggtctttctgcatatgcaaagcacatttctggccagttgcacaaagataacgttgatgcccaggaaagagaagatgatggaaaaggagaggaagaggaagaagattattttgacaaggaactcattcagttaataaaacaaaggaaagaacaaagtcgacaagatgaaccttccaatagcaaccaagaaataaactctgatgacagacgaccccaatggagacgagaagaccgaattccttaccaagacagagagagttacagtcagcctgcatggcatcatcgtggacctccacagcgggattggaaatgggaaaaagatggctttaataatactaggaaaaacagctttccacattctttgaggaatggtggtggaccaagaggacgttccgggtggcataagggtgttgcaggaggctcctcgacttggtttcacaaccatagtaattctggaggtggttggctttcaaatagtggagcagtagattggaatcataatggtacaggaaggaattccagttggctttctgaaggaacaggtggcttttccagttggcatatgaacaacagtaacggaaactggaaatccagtgtacgtagtacaaataattggaattacagtggccctggagacaaatttcaaccaggcagaaacagaaattctaactgtcaaatggaagacatgactatgctatggaacaagaaatctaataagtcaaacaaatacagtcacgacagatataattggcagcggcaagaaaatgacaaacttggtacagttgccacatatagaggtccttctgaaggatttacaagtgataaatttccttcagaaggcttactcgacttcaattttgagcagctggaaagccaaaccactaaacaagcagacactgctacttccaaagttagtggaaagaatggcagtgcggcaagggaaaagcctcgtcgctggacgccttacccttctcagaagactctggatttacagtcgggattgaaagacatcactggtaacaagtcagaaatgatagagaaacctctctttgattttagcttgataactacaggaatacaggagccccaaactgatgaaacacgtaattccccaacacagaaaacacaaaaagaaatacatactggatctcttaatcacaaggcctcttctgattccgctgcttccttcgaggtggtgagacagtgccccactgcagaaaaacctgaacaagagcatacaccaaataaaatgccatcattgaaatccccactccttccatgtccagccactaaatcattgtctcaaaagcaagatccaaagaatatctcaaaaaacaccaaaacaaattttttttcccctggagaacactcaaatccctcgaacaagcccactgtggaagataaccatggtccttacatatccaaactgcgtagttcatgtcctcatgttttaaaagggaataaaagtacatttggctctcaaaagcaatctggtgataatttaaatgatactttacgaaaggccaaagaggtgctacagtgtcatgagtcattgcaaaatccacttcttagcacttctaaaagtaccaggaactatgcaaaagcaagtagaaatgtagaagaatctgaaaaagggtctttgaaaattgagtttcaagtgcacgcactagaagatgaaagtgatggagagacatctgacacggaaaagcatggaacaaaaattggaaccctaggttctgcaactacagaattgttatctggcagcactcgaactgctgatgagaaagaggaggatgaccgcatcctgaagacttctagagagctatccacttccccatgtaatcccatagttcgccagaaagaatctgaattacaaatgacatctgcagccagtccacaccctggcttattgctagacttgaaaacctctctagaagatgcacaggttgatgactctattaaatctcatgtatcttatgaaacagaaggctttgagagtgctagcttggatgcagagcttcaaaaaagtgacatcagtcagccctcgggccctctcctgcctgaactaagtaagcttggctttcctgcctcacttcagagggatctaacccggcacattagtttgaagagcaaaactggagtacaccttcctgagccaaacctcaatagtgcccgccgcattcgcaatattagcggtcaccgaaagagtgagacagagaaggagtctgggctcaagccaaccctacggcagattctaaatgcatctcggagaaatgtcaactgggaacaggtcattcagcaagtaaccaagaaaaagcaagagctgggcaaaggcttacccaggtttggcatagaaatggtaccccttgttcaaaatgaacaagaagccttagatttggatggggaacctgatctgtccagtctagaaggattccagtgggaaggtgtttccatttcctcgtcccctggcttggcaagaaagcgaagcctttctgagagcagcgtgatcatggacagagctccttctgtgtatagcttcttcagtgaggaaggtacaggcaaagaaaatgagccccagcagatggtttcacctagtaactcattgagggctggacagagccagaaagcaaccatgcacctcaaacaagaagtgacacctcgggctgcctccctccgaacaggtgaaagggctgaaaatgttgctacccaaaggcgacatagtgcacaattatcctctgaccatataatacctttgatgcatttggcaaaagacttgaacagccaggagaggtctataccaccgtcagagaatcagaattcccaggagagtaatggagagggaaactgtctgtcatcaagcgcatcctcagcccttgcgatctccagtttagcggatgcagccacagatagtagctgtacctctggtgctgaacaaaatgatggccaaagtattagaaagaaacgaagagccactggagatggatcttctcctgaactcccaagtcttgagagaaaaaataaaagaaggaaaattaaaggaaaaaaagaacgttctcaggttgaccagctgctgaatatttctttaagggaggaagaacttagtaagtcattgcagtgcatggataacaatcttctgcaagcccgtgcagcccttcagacagcttatgtggaagttcagaggctacttatgctcaagcagcagataactatggagatgagtgcactgaggacccatagaatacagattctacagggattacaagaaacatatgaaccttctgagcacccagaccaggttccctgtagcctcacacgagaacgaaggaacagtagatctcaaacatccattgatgccgcactgctgcccactccctttttcccactttttctggagcctccatcttcccatgtgtctccatcacccaccggagcctctcttcaaataaccacgtctcctactttccaaacccatggcagtgtccctgctccagactcatcagttcagattaaacaagagcccatgtctcctgaacaagatgagaatgtgaatgctgtgccaccaagctctgcctgcaatgtgtccaaggaattactggaagctaatagagagatcagtgacagttgtccagtttatccagtcatcactgctagattgtccttaccagagtcaacagaaagtttccatgagcctagccaagaactgaagttttctgtggagcaaagaaataccagaaacagagaaaactctccctcttcccaatcagctggtctttctagcataaataaagaaggggaagagccaaccaaaggcaatagtgggtctgaagcctgtaccagttcttttctaagattgtcttttgcttcagaaacccctttggagaaggaaccccactctccagctgaccagcctgaacaacaggcagaatccactttgacatcagctgagactaggggaagcaagaaaaagaagaaactccggaagaagaaaagtctacgggctgcccatgttcctgagaatagtgacactgaacaggatgttttgactgttaaacctgtaaggaaagtaaaagctggaaagttaattaaaggggggaaagtaacaacctccacttgggaagacagcaggactggtcgggagcaggagagtgtcagagatgagccagatagtgactcgtctctggaagtcctagaaattcctaatcctcagttagaagtagtagccattgattcttcagaatcaggagaagagaaaccagacagcccatctaaaaaggatatttggaactctacagagcaaaacccactagaaacgtctcgttctgggtgtgatgaagttagctctaccagtgaaattggcactcgctataaagatggcatccctgtaagtgtggcagaaactcagactgtgatctcctccataaaaggatcaaagaattcttcagaaatatcttcagagccaggagatgatgatgaacccacagaaggaagctttgagggacaccaagctgccgtaaatgcaattcagatatttgggaacttgctatatacctgttcagcagataaaactgttcgggtttataatctggtgagtcggaaatgtattggtgtctttgagggtcatacctccaaagttaactgcctcctggttactcagacctccgggaagaatgctgccctttacaccgggtccagtgaccataccatccgctgctataatgttaagagccgagagtgtgtggagcagttacagctggaagaccgggtcctctgcctccacagtagatggcgaatcctctatgcgggactggcaaatggcactgtggtcaccttcaacataaagaacaacaaacgacttgagatctttgaatgccatggccctcgggcagtcagctgtcttgctacagctcaggaaggtgcccgaaaactgctggtcgtggggtcttatgactgcacaattagtgtacgcgatgcccggaatggactgctcctcagaactctggagggccatagcaaaaccattctttgcatgaaggtggtgaatgatctcgtgttcagtggctccagtgatcagtcagtccatgctcacaacattcacactggtgagctcgtgcggatctataaaggtcacaatcatgcagtgactgtggtgaatatcctaggaaaagtgatggtgactgcttgcctggataaatttgttcgtgtctatgaattacagtctcatgatcgattacaagtttatggaggacacaaagacatgattatgtgtatgaccatccataaaagcatgatttacactggctgttatgatggcagtattcaggccgtgaggcttaatctgatgcagaattaccgctgttggtggcatggttgctctctgatatttggcgttgtagatcatttaaaacaacacttgctgaccgaccacactaatcccaacttccagactctgaaatgtcgctggaagaactgcgatgcttttttcactgctaggaaaggatccaaacaggatgctgcaggacatattgaacgacatgctgaagatgacagcaaaattgattcatgaagttttttgcctcccacgttgggaagtcattagttgaactattttcacattggccccccacacaggccactctcttccctttcttggtgaagtaaggaaggagaaagtggttactagccaggcatacccctagcataagtctgggcagctctatgggatgataaattacacttttaagttcttgctggaggttttaaatagatttagacaaatgttaaggaaccatacttctctgggacagcatggcatatagtgatatatgctatttgcgttctccagatgtttattgaagatacagatcctaattggttacccagtttgaccctaatcatatgtatattttattgatttcagtttgcaatttttaatttatgttcttatgatggtttaaacctatagtcaggcttttaagtacaagtttgtttaagtgccagactttgaggatcagttttaatttctccatttgtaatagctgggtatttaaactggaagcaaatagttttctttcttaacaattatgtgcagtgtgtgtcactgttttcttgctttatagatagagctggctttaagtgctaaaggacacagtagatttttgacaaacagtggctgctctgctgactatcttttaggaattcaggaagcaaatcacatagtgacaagtccttacagacaccacttctagtaaatctctgtaaatgtggatagaaagctcagtgtgaggcagtgcgtagacctaacgtctacctttacatctgctgttgaacctgggcactacctgttacagatcctgtcaggctgttgaactggaggtgtacctttatcttcctttctagtgtctgaccctgcaagcctaatgttggtttgaacccttttggtttgttcagttgccagcctccatctctcccactgtatggccgtgcctagaccgatggcagccatcgaatattcctctgggctcacggggtgttttccacccccctgcagcaactaagatggtgggggagagggggttagaataaagcatctgaatacagttttcaggacctcaagcagacttcctagagacttgtttctgagacagttctttgccttcacttccctgctagctgggaaagaagagtggagcagagactctgcctggccactgagaacagccaaattcacaaaccctcagtggggctttgtttttggattttctccggactcatcagtaaacctgtagaagtgtcgctttccagccttttgtttctggatcctcaaaactcagaacgtggccgggcgtggtggctcacgcctgtaatcccagcactttgggaggctgaggcaggcagatcacctgaggctaggagttgcagaccagcctggccaacatggcaaaaccccgtctctactaaaaatacaaaaagccgggcgtggtgggcgcctgtaatcccagctgctcaggaggctgaggcaggagaatcgcttgaacccgggaggcagagattgcagtaagctgagatcgtgccactgcactccagcctggtgacagagtgagactccgtctcaaaaaaaaaaaaaaaaactcagcttcttcagagagataaaattgggggaggagcccagggccacataccaagctttgggacatggtgcctcatgctctctgggattgcagaccatccaggtctgtcttcgcccctgttagtgcacatatatccactcacatgtcttccctcaggctatcgggcagggggacttcaccagggggtttatggataggcttcaagagggtctgtgagcccccagaaattgtgtgtgagactgagtatgtgttcttttttccaggaaaggctccagtggttcttacttgatccaaaaaatgtcaagaattaatctaggaggccgggcctggtggctcacacctgtaatcccagctctttgggaggccgaggcgggtggatcactcaaggtcaggcatttgagaccagcctggccaacatagtgaaaccccgtctctattaaaaatacaaaaattagctgggtgtggtggtatgtgcctgtagtctcagctactcaggaggctgagacaggagaatcacttgaaccctggaggtagaagttgcagtgagccaagatcatactactgcactccagcctgggcgacaagagtgaaactccacctcaaaaaaaaaaaaaaaagagttaatctaggagataatgaatggcctagtactagataatatatggccccacaagctcttgacttctgtccttggggaaagccattttgttaaccacactagtgagatttacatgatgcttaatggagaacagagaagatcttgttgcaaaaggtgtattaaatatttgtgctgtttctgtatgagattgagaagcttttcccacctctcacccctatttcctataaggatatccagagaagccaaactgttctgtgggtttgggaatggtcatttcccgggaaaatgcatctggatcgatgactaaacctggcccttttctctgggctgtagtgaagccgcattttcacgctggctggcagtgtgctgagagcctcgaatgctctgcggcgtagtgcccttctgccctgcctgacgatgtatcgaaaagatgagagtgaaggagactttgtgcagcaggaaacgggtaggtgaggtgttgggcagttgtgggaacttctgagagtattacagagtggtagaatcggtaagaactctgatttggacttcgctttggtggaactgtgtgcctatacctgcctgtgtgtgtgcaagtgtgcaggttcctttgtatgtatgtgtacgtgtgggaacctgtgtttgtcatatttttcttcatttcacaaaggctttttttgaagcagtggcagtatgcctttgtttcaagaacacatgaaattcttttaacaccagattagtgtgttaccccaaatgaacggttctagccctctattaagaaataaagggaccataagcattttggctgcttatggctgtgtgttactacttacaagagtcttgaaaattatacagaactttgccttctttttttaatgtcttccacaatgttgtgactgattataaccctgtttcccctcagagaagagctatggctcagggatctgtgttgactctggcatttagtggctttgtgaaggaaagaaaccattaaatgacctgacaaaaactgactcatgtctttaaagtagttgaagccacttttagaatgttactctcggttgcttttgtctaattctaatggcttaaagccaagaaaaccatagtataaatctttttgtgtacctatgctagtgtttaaatggcagttcgttgtgataaagtatcagtcacttcaagttttctgtgaaagtttttaattaggttaaaaataattttggcatacgtctctactcagtttataaagcagttccacaccatgcaaacaaaactctaacagcaaaggttatcttgacctgatgttacttgaatctgagagaaagtcattacttactactgcactcctgcttttgtgggaaaaattttcttcttccccagaagagttaacagttgagtgttcagctcctgacttacctttaatttagaggcaatattattactgtttaagtgattatttgcttaacacaggttttattttgtctttttgctggtagattatacaagggacaactttagtgatgaggcatgtggatgatttggtgggagtaggtatatacttagtggaatggtttattttatggaagagaattcattggaggtgagattgaagtatattgtgaagtgggatttgaacagcacatatgctctggtttgctcaaataactgcagtttatgcttacatctaaattttgtttctgttacctaaacgggagcttctagaattacgaaggccatacctgccacatttataaaataatggttttatccctgcccccaaatcatcaggttcctcgggtttaagagaagtggtctaatagacaggaatagaagttgtggtggaggtgatttgggatagactaggtttccttatgcaagtggatatgagctcctcatagaaaccagacctactgtattagacagtaacctctaacctcacctccaagcccaagtatatggccctgctgggttacctggtgactacatttcccagattcactctaaattcaaggtagtgacccaaataaattgggaaaggagggggtcaaggaggaaaagctgttgaaaatctttctcctatttaagagaaatatatgccctagagctgctccagcacccttggtttctgatttttttaatattgaatatggattagaagaatgaaatcagatgacacctgactgcaaaaatgtttataagcaaatagccttcttacattttggtataaagctgtgaacttcgtaactttgtaaagcaagatataaagcaaatacaagaggaaaataaagtacttttactaattgaaaaaaaaaaaaaaaaaaaa

SEQ ID NO: 12882 - DNA, 1218 bp, Homo sapiens
atggactctcttgttacagcaaacaccaaattttgctttgatctttttcaagagataggcaaagatgatcgtcataaaaacatatttttctctcccctgagcctctcagctgcccttggtatggtacgcttgggtgctagaagtgacagtgcacatcagattgatgaggtactacacttcaacgaattttcccagaatgaaagcaaagaacctgacccttgtctgaaaagcaacaaacaaaaagctgggtccttaaacaatgagagcggactggtcagctgctactttgggcagcttctctccaaattagacaggatcaagactgattacacactgagtattgccaacaggctttatggagagcaggaattcccaatctgtcaggaatacttagatggtgtgattcaattttaccacacgacgattgaaagtgttgatttccaaaaaaaccctgaaaaatccagacaagagattaacttctgggttgaatgtcaatcccaaggtaaaatcaaggaactcttcagcaaggacgctattaatgctgagactgtgctggtactggtgaatgctgtttacttcaaggccaaatgggaaacatactttgaccatgaaaacacggtggatgcacctttctgtctaaatgcgaatgaaaacaagagtgtgaagatgatgacgcaaaaaggcctctacagaattggcttcatagaggaggtgaaggcacagatcctggaaatgaggtacaccaaggggaagctcagcatgttcgtgctgctgccatctcactctaaagataacctgaagggtctggaagagcttgaaaggaaaatcacctatgaaaaaatggtggcctggagcagctcagaaaacatgtcagaagaatcggtggtcctgtccttcccccggttcaccctggaagacagctatgatctcaattccattttacaagacatgggcattacggatatctttgatgaaacgagggctgatcttactggaatctctccaagtcccaatttgtacttgtcaaaaattatccacaaaacctttgtggaggtggatgaaaacggtacccaggcagctgcagccactggggctgttgtctcggaaaggtcactacgatcttgggtggagtttaatgccaaccacccttttctctttttcattagacacaacaaaacccaaaccattctcttttatggcagggtctgctctccttaa

SEQ ID NO: 12883 - DNA, 4775 bp, Homo sapiens
cagtcgcgcgcggtgcagtcgggaggtggaggcaccggctgcattgttttcgggatcgaggggtgagggcgctatggcacccggctgcaaaactgagttacgcagcgtgacaaatggtcagtctaaccaaccaagtaatgaaggtgatgccatcaaagtttttgtgcgaattcgtcctcctgcagaaagatctgggtcagctgatggagagcagaacttatgcttatctgtgctgtcctccacgagtctccggctgcactccaaccctgagcccaagaccttcacgtttgatcatgttgcagatgtggataccactcaggaatctgtatttgcaactgtggctaaaagcattgtggagtcttgcatgagcggttataatggtaccatctttgcatatggacagactggctcagggaagacatttactatgatgggaccatctgaatctgataatttttctcataacctgagaggagtaatcccacgaagttttgaatatttgttttccttaattgatcgtgaaaaagaaaaggctggagctggaaagagtttcctttgtaagtgttcctttattgaaatctacaacgagcagatatatgatctactggactctgcatcggctggactgtacttaagggagcatatcaagaagggagtctttgttgttggtgcggtggagcaggtggtaacctcagctgctgaagcctatcaggtgctgtctggaggatggaggaatagacgtgtggcatcaacatcaatgaacagagaatcgtctaggtctcatgccgtctttacaattacaatagagtcaatggagaaaagtaatgagattgtgaatatacggacctccctactcaacctggtggatttagcaggatctgaaaggcaaaaagatacccatgcagaagggatgagattgaaggaagcaggtaacataaatcgatcattgagctgcctgggccaagtgattacagcacttgtcgacgtgggtaatggaaaacagagacatgtttgctacagagactccaaacttaccttcttactacgggattcccttggaggtaatgccaaaacagccataattgcaaatgttcatcctggatccaggtgttttggggaaaccctatcaacacttaactttgctcaaagagccaagctgattaaaaacaaggcagtagtaaatgaagacacccaaggaaatgtgagccagctccaagctgaagtgaagaggctcaaagaacaactggcggagcttgcttcaggacagacaccaccagaaagcttcctgaccagagacaaaaagaagactaactatatggagtatttccaggaagcaatgttattctttaagaaatctgaacaggaaaagaagtctctgatagaaaaagttacccaattagaagacctcaccctcaaaaaggaaaaatttattcaatctaataaaatgattgtgaaattccgagaggatcaaataatacgcttggaaaagctccacaaggaatcccggggaggttttctgcctgaggagcaggatcgtttgctctcagaattaaggaatgagattcaaactctgcgagaacaaatagagcaccaccccagagttgcaaagtatgctatggaaaatcattccctcagggaggagaatagaagactgagattattagagcctgtgaaaagagctcaagaaatggatgcccagaccattgcaaaactagaaaaagctttctctgaaataagtggcatggagaaaagtgacaaaaatcagcaaggattttcacctaaagctcagaaagagccatgtttgtttgcaaacactgagaagttaaaagcacaactcctgcaaattcagacagagctgaataattcaaagcaagaatatgaagaattcaaagaacttactaggaaaaggcagctagaattggaatcagagcttcagtctttgcaaaaagcgaaccttaatcttgaaaaccttttggaagcaacaaaagcctgcaagcggcaagaagtttctcagctgaataaaattcatgctgaaacacttaagattataactacaccaaccaaggcctaccaacttcattcccgaccagtaccaaaattaagccctgaaatgggaagctttggctctctatacactcagaattctagcatattagataatgatatattaaatgagccagttcctcctgagatgaatgaacaagcttttgaggccatttctgaagagcttagaacagtgcaggaacaaatgagtgctcttcaagccaaactggatgaagaagagcataaaaacctaaagcttcagcagcatgttgacaaactggaacatcattctacccaaatgcaggagcttttctcatcagaaagaattgattggaccaaacagcaggaagagcttctctcacagttgaatgtccttgaaaagcagcttcaagagactcaaactaaaaatgactttttgaaaagtgaggtacatgacctgcgagtagtccttcattctgctgacaaggagctttcttcagtgaaattggaatatagttcattcaaaacgaatcaggagaaagaattcaacaaactttctgaaagacacatgcatgtacagcttcaattagataatctcaggttagaaaacgaaaagctgcttgagagcaaagcctgcctacaggattcctatgacaacttacaagaaataatgaaatttgagattgaccaactttcaagaaacctccaaaacttcaaaaaagaaaatgaaactctgaaatctgatctgaataatttgatggagcttcttgaggcagaaaaagaacgcaataacaaattatcattacagtttgaagaagataaagaaaacagttctaaagaaatcttaaaagttcttgaggctgtacgtcaggagaaacagaaagagacggccaagtgtgagcagcagatggcaaaagtacagaaactagaagagagcttgcttgctactgaaaaagtgatcagttccctggaaaagtctagagattctgataagaaagttgtagctgacctcatgaaccagatccaggagctaagaacatcggtctgtgagaaaacagaaactatagacaccctgaaacaagaactgaaggacataaattgcaaatacaactctgctttggttgacagagaagagagcagagtgttgatcaagaagcaggaagtggatattctggatctgaaagaaacccttaggctgagaatactttctgaggacatagagagggatatgctctgtgaggacctggctcatgccactgagcagctgaacatgctcacagaggcctcaaaaaaacactcggggctgctgcagtctgcccaggaagaactgaccaagaaggaagccctgattcaggaacttcagcacaagctaaaccaaaagaaagaggaagtagaacagaagaagaatgaatataacttcaaaatgaggcaactagaacatgtgatggattctgctgctgaggatccccagagtcctaagacaccacctcactttcaaacacatttggcaaaactcctggaaacacaagaacaagagatagaagatggaagagcctctaagacttctttggaacaccttgtaacaaagctaaatgaagacagagaagtcaaaaatgctgaaatcctcagaatgaaggagcagttgcgtgaaatggaaaacctacgcctggaaagtcagcagttaatagagaaaaactggctcctgcaaggtcagctggatgatattaaaagacaaaaggaaaacagtgatcagaatcatccagataatcaacagctgaagaatgaacaagaagaaagtatcaaagaaagacttgcaaaaagtaaaatagttgaagaaatgctgaaaatgaaagcagacctagaagaagtccaaagtgccctttacaacaaagagatggaatgccttagaatgactgatgaagtcgaacgaacccaaactttggagtctaaagcattccaggaaaaagaacaactgagatcaaagctggaagaaatgtatgaagaaagagagagaacatcccaggagatggaaatgttaaggaagcaggtggagtgtcttgctgaggaaaatggaaagttggtaggtcaccaaaatttgcatcagaagattcagtacgtagtgcgactaaagaaggaaaatgtcaggcttgctgaggagacagaaaagttgcgtgccgaaaatgtatttttaaaagaaaagaaaagaagtgaatcttgaggattccggtcagctacctaggcatcaccttgtttgaagatgtttcttctcttttacaagtaagacctactcctggccacttaggagagctgaatttatggaccttaattattaaatgtttataaggtggtggtaaccacctcaagtttctgatgaacattctgcatccatatacaccctgtgacagtcagcagtctgctattaagtggcctacttcaaggctttgaatcaacttaagggaaaaccttttgtctttgtaaaaataaaagcctgtagctaaggtttacagtggacattagccagatcattttcttcttagattatgccataatctcctttgattcttatggaagttctaacaatatatggtggttccaacacctgcagtgagtttaatgactgacttagtagcaggtacaagaagcaaacttgttaatatagattatttttgtattcttactttaggtattttacttgagcattttccatgactgtaaataaagccattttttaagataaaaaaaaaaaaaaaaaa

SEQ ID NO: 12884 - DNA, 3117 bp, Homo sapiens
gcaaggggagggcagcaaggagggggggccacccactacctcgcgcccccgccctgcgggtgtctcgcgcgcgttccgtgcgtgtgagtgtgtgggtctgtctcgctccagaagtgcgtgcccgcgcgctgcgccttgcgctttttcccctccctcgccccttcctggtcctcccaccctcctcggctccctcctttcccagcaaacgccgcccctcccgcgccctggctcaggctctggcgccgccgcagccgtcgccgcccgaaagttcaggagccctggaaaggagaaggaataagacggcaggaggaagagagagagagggtagaatggaagaatctcacttcaattctaacccgtacttctggccttctatccccacagtctcaggtcagatcgagaacacaatgttcatcaacaagatgaaggatcagctgttgccagagaagggctgtggtctggccccacctcactaccccaccttgctgacagtgcctgcctcagtgtccctgccctcaggcatcagtatggacacagagtccaagtcagaccagctgaccccacacagccaagcgtccgttacccagaatatcacggtggtccctgtgccgtctacaggactgatgactgctggagtctcctgttctcagaggtggagaagagaagggagtcaatcaaggggtccgggtttggtaatcacgtccccctcaggctctcttgtgaccacagcatcatcagctcagaccttccccatttcggctcccatgattgtctcagctcttccccctggctcacaagccctgcaggttgtccctgacctctccaagaaggtagcatcgaccctaaccgaggaaggaggcggaggtggtggtggaggtggcagtgtggctcctaagccaccccggggccggaagaagaagcggatgctggaatcagggctgcccgagatgaatgacccttatgtcctctcccctgaggatgatgatgaccatcagaaagacggcaagacctacaggtgccggatgtgctcactgacattctactccaagtcggagatgcagatccactccaagtcacacaccgagaccaagccccacaagtgcccacattgctccaagaccttcgccaacagctcctacctggcccagcacatccgtatacactcaggggctaagccctacagttgtaacttctgtgagaaatccttccgccagctctcccaccttcagcagcacacccgaatccacactggtgatagaccatacaaatgtgcacacccaggctgtgagaaagccttcacacaactctccaatctgcagtcccacagacggcaacacaacaaagataaacccttcaagtgccacaactgtcatcgggcgtacacggatgcagcctcactagaggtgcacctgtctacgcacacagtgaagcatgccaaggtgtacacctgcactatctgcagtcgggcatacacatcagaaacataccttatgaaacatatgcgcaaacacaacccgcctgatcttcagcaacaggtgcaggcagcagcagcagcggcagcagtggcccaggcccaggctcaagctcaagcccaggctcaggctcaggctcaagcccaggcccaggcccaggcctcccaggcatcacagcagcagcagcagcagcagcagcagcagcagcagcagcagcaacagccaccaccacacttccagtctcctggggcagccccccagggtgggggtggtggggacagcaatcccaaccctccaccccagtgttcctttgacctgaccccgtataagacggcggagcatcataaggacatctgcctcactgtcaccaccagcaccatccaggtggagcacctggccagctcttagagatccgtgctgccacccactgggaagaggaagaagtagtcctggtgtcttctttctccaactcttggtgggaaaagtccttttcttccttgacaggccttggctccatctccttgggcctctgtcacggctttccttcacaggataccatcctttttctgaactcttcttcaaaaggaacatcagccctcctgattgcaaaggaatactgagctgatggtgtcatccagcagcctcccctcccaagcaaagcttctaaaactgggggtcggtgctcaagggaaggatttgctatgacctcatagaaccttgtccagtgtggccacttaccctatccttaccctccttatcctcaaagtttgggctgatgtaagactagaggctggccctcccagataacagagaaaagggagccccaaatgcaaccagcctcttgttctattcttgcctgcaaaagaacagaggtttctcaaatgcctcagtccctgagagccatttcttcccctacatcgtctcactttgcttcctattgactgctggtagaaggagatttggggtaggggctagacctccttttatttgaagggggcaagggctgagatgtggtccccaaggggccagaaattcccaagttggtcacaggtggcttagaagtgtgtgttatggttttacggatttccttgaagcctctctccttctctgcctacaaagaccctatactctcagtctccccaacccacccccaaggagctgtgggaggctttgtgttatctgtgaaactccaaaacaggggtgttgcggagaagggagagttcaaggcaaacgcaaggactggacttagctccctaggtgccacagtcagatgccggacacggatttatatataaatatatatatataaatatattatactcactcatcacggccatctttgttgtaaccatttctgtgtttataaatgcattatctctgagaattttcatatttgatgttttgtttatttttgtcctttttttccctctctccacccctgtcctctagccacagcatttttctttttgtcttttttttttttttttaaatcatggcagatttcagaggaaaggaaattaaaaaaaaaatcaggaaaccagttgttataaagtaatttaaaaatgaagaaaaaaagaaaaaaacttatgtacaaaccaaggggtgtttttagaacattgtatagaaataaattcatgtaaaagga

SEQ ID NO: 12885 - DNA, 1066 bp, Homo sapiens
ggctgcagaggggaaggcggctaccagtgtaaagccagagctgaggttcttgatagtccacaatgggtgaaccacagcaagtgagtgcacttccaccacctccaatgcaatatatcaaggaatatacggatgaaaatattcaagaaggcttagctcccaagcctccccctccaataaaagacagttacatgatgtttggcaatcagttccaatgtgatgatcttatcatccgccctttggaaagtcagggcatcgaacggcttcatcctatgcagtttgatcacaagaaagaactgagaaaacttaatatgtctatccttattaatttcttggaccttttagatattttaataaggagccctgggagtataaaacgagaagagaaactagaagatcttaagctgctttttgtacacgtgcatcatcttataaatgaataccgaccccaccaagcaagagagaccttgagagtcatgatggaggtccagaaacgtcaacggcttgaaacagctgagagatttcaaaagcacctggaacgagtaattgaaatgattcagaattgcttggcttctttgcctgatgatttgcctcattcagaagcaggaatgagagtaaaaactgaaccaatggatgctgatgatagcaacaattgtactggacagaatgaacatcaaagagaaaattcaggtcataggagagatcagattatagagaaagatgctgccttgtgtgtcctaattgatgagatgaatgaaagaccatgaaagatgtttctttttctttttttccttttgataatagcatcatatattagttcattttcttttggacagtcttaagagaagtttcactaaaaatgtaaacagctttaatcttgactccaaatttttcaattatgagatgtcataggcagtaatttcgctgtataacaagcatagacaaatgagtgtccctgcactaagaagaatcactttaaaaagcaaagtgttagctgctgttgtatgggacattcctatgttttagagttgcagtaaaactttgatgataacctcaataatagcaaagt

SEQ ID NO: 12886 - DNA, 649 bp, Homo sapiens
atggttagtaatttcttccatgtcatacaagtattcgagaaatctgctaccttgattagtaagactgaacacattggttttgtcatttattcatggaggaagtccaccacccacttggggagcagaaggaaatttgccatctcaatttacttatcagaagtttctttgcagaaatatgattgtcccttcagtgggacatcatttgtggtcttctctctctttttgatctgtgcaatggctggagatgtagtctacgctgacatcaaaactgttcggacttccccgttagaactcgcgtttccacttcagagatctgtttctttcaacttttctactgtccataaatcatgtcctgccaaagactggaaggtgcataagggaaaatgttactggattgctgaaactaagaaatcttggaacaaaagtcaaaatgactgtgccataaacaattcatatctcatggtgattcaagacattactgctatggtgagatttaacatttagaggtgacagcatcccccacactggcagtgaattttttgtgctacaaacttggcaaaagtctgtgaaaagaagtttcaacttcatgtgttattaactatacaaatattagttgaatgaattgttgaattacaaaaaaaaaaaaaaa

SEQ ID NO: 12887 - DNA, 3095 bp, Homo sapiens
cgtggaaagaggttggcgcgctggaagtccagttgcttcggctccctgcgttaggtctggtggcggtcaatgcgcttccggacccgggatcagagtgtgtggatcgctatagggggaggggagctcagggtagacaacctcagcgtgttgcagattccctgcaaggggagttagacatctgagtcctagaccgagataccagctgaaggaacgctgcctggcgaaccctggtgttcaagttccagaggaacgggatgagctcctgagatggaagatctgtcctctccagactccacccttctccaagggggacataatctactctcatcagccagttttcaggaatcggtgactttcaaggatgtgatagtggactttacccaggaagaatggaaacagctggaccctggccagagagatttgttcagggatgtgacattggaaaattatacacacctggtctctataggactccaagtttctaaacctgatgtgatttcccagttagagcaagggacagagccatggatcatggagccaagcattccagtaggtacctgtgcagactgggagacaagacttgaaaatagtgtgtcagccccagagcctgacatttctgaagaagagctatctccagaggtaatagtggaaaaacacaaaagagatgattcttggagttccaacttgctagaaagttgggaatatgaaggcagtttagagagacagcaggcaaaccaacagacactgccaaaggaaataaaggtaaccgaaaagacaatacccagttgggaaaaaggccctgtaaataatgaatttgggaaaagtgtcaatgtgagttcaaaccttgtaacacaagaaccatctccagaagagacctctactaaaagaagcatcaaacagaattcaaacccagttaaaaaagagaaatcttgtaagtgcaatgaatgtgggaaagcctttagttattgttcagctcttattcgccatcagagaacacatactggagaaaaaccctacaaatgtaatgaatgtgaaaaagccttcagccggagtgaaaaccttataaaccatcaaagaattcatactggagataaaccatataaatgtgatcagtgtggaaaaggcttcattgagggtccatctcttactcaacatcaaagaattcatactggagaaaaaccatataaatgtgatgaatgtgggaaagcctttagtcagaggacccatcttgttcagcatcagagaattcatactggcgagaagccatacacttgtaatgagtgtggaaaagcctttagccagagaggccactttatggaacatcagaaaattcatacgggagaaaaaccttttaaatgtgatgaatgtgataaaaccttcaccaggagcacacaccttactcaacatcaaaaaattcatactggagaaaaaacctataaatgtaatgaatgtggaaaggccttcaacgggccctcaacttttatccgtcatcatatgattcatactggtgaaaaaccgtacgaatgcaatgaatgtgggaaagccttcagccagcactcaaacctcactcagcatcaaaaaactcatactggggagaaaccctatgattgtgcagaatgtggaaaatcttttagttactggtcatcccttgctcaacacctgaaaattcatactggagaaaaaccttacaaatgcaatgaatgtggaaaggccttcagttactgctcatcccttactcaacatcggagaattcacacgagagaaaagccctttgaatgcagtgaatgtggaaaggctttcagttatctctcaaaccttaatcagcatcagaaaactcatactcaagagaaagcttatgaatgtaaagaatgtgggaaagcttttattcggagttcatctcttgctaagcatgaaagaattcatactggagagaaaccctatcagtgtcatgaatgtgggaaaaccttcagttatggttcatcccttattcagcataggaagatccatactggagaacgaccttacaagtgtaatgagtgtgggagagcattcaaccagaacatacaccttacacagcataagagaattcatacaggagccaagccttatgagtgtgctgagtgtggtaaagcctttcgacattgttcatctcttgctcaacatcaaaaaactcacacagaagaaaaaccctaccagtgtaataaatgtgaaaagacctttagccagagctcccatctaactcagcatcaacgaattcacactggggagaagccctataagtgcaatgaatgtgacaaagcctttagccggagcactcatctgactgaacatcagaatactcatactggagagaaaccttataactgtaatgaatgcagaaagacttttagccagagcacatatctcattcagcaccagagaattcattcaggagagaagccttttggatgtaatgattgtggaaaatccttcagatatcgctctgctctcaacaaacatcagagactgcatcctggcatatgacaattctaggaacatcataaatttaggggagatatttactttagtttgtccttttgttaagtactgaagaatcagagtggatttagaaactgccttgaaatcttttaaattttcactatcatgttatggaatggaaagtacattgggctgaactaatccaattgttattaagccactctgtgacattagaaaactctactgttttaagctttagtttcctttatggaatgaaggctttggagtagattatttcaaaggtagtttggagttttataatcagttttgtatatttacaatattttcttgaatgggtttactatacatcagcattttgctgtgttgcatctagaatgtgtatgtttatgcatgttttgccaatagaatttgtgcttcagtaactagatcggggatctagtatgctcctggtctaatgcatttacattgtttaggtaactggttcctaataaaaagaattataaaataccctcaaattaacaattcaattgcatataatagcctaactcagtaagaatattaaaacttactattattcttaaaaaaaaaaaaaaaaa

SEQ ID NO: 12888 - DNA, 2963 bp, Homo sapiens
ccactgctgtcctcttcagctcaagatggtggcctgccgggcgattggcatcctcagccgcttttctgccttcaggatcctccgctcccgaggttatatatgccgcaattttacagggtcttctgctttgctgaccagaacccatattaactatggagtcaaaggggatgtggcagttgttcgaattaactctcccaattcaaaggtaaatacactgagtaaagagctacattcagagttctcagaagttatgaatgaaatctgggctagtgatcaaatcagaagtgccgtccttatctcatcaaagccaggctgctttattgcaggtgctgatatcaacatgttagccgcttgcaagacccttcaagaagtaacacagctatcacaagaagcacagagaatagttgagaaacttgaaaagtccacaaagcctattgtggctgccatcaatggatcctgcctgggaggaggacttgaggttgccatttcatgccaatacagaatagcaacaaaagacagaaaaacagtattaggtacccctgaagttttgctgggggccttaccaggagcaggaggcacacaaaggctgcccaaaatggtgggtgtgcctgctgctttggacatgatgctgactggtagaagcattcgtgcagacagggcaaagaaaatgggactggttgaccaactggtggaacccctgggaccaggactaaaacctccagaggaacggacaatagaatacctagaagaagttgcaattacttttgccaaaggactagctgataagaagatctctccaaagagagacaagggattggtggaaaaattgacagcgtatgccatgactattccatttgtcaggcaacaggtttacaaaaaagtggaagaaaaagtgcgaaagcagactaaaggcctttatcctgcacctctgaaaataattgatgtggtaaagactggaattgagcaagggagtgatgccggttatctctgtgaatctcagaaatttggagagcttgtaatgaccaaagaatcaaaggccttgatgggactctaccatggtcaggtcctgtgcaagaagaataaatttggagctccacagaaggatgttaagcatctggctattcttggtgcagggctgatgggagcaggcatcgcccaagtctccgtggataaggggctaaagactatacttaaagatgccaccctcactgcgctagaccgaggacagcaacaagtgttcaaaggattgaatgacaaagtgaagaagaaagctctaacatcatttgaaagggattccatcttcagcaacttgactgggcagcttgattaccaaggttttgaaaaggccgacatggtgattgaagctgtgtttgaggaccttagtcttaagcacagagtgctaaaggaagtagaagcggtgattccagatcactgtatctttgccagtaacacatctgctctcccaatcagtgaaatcgctgctgtcagcaaaagacctgagaaggtgattggcatgcactacttctctcccgtggacaagatgcagctgctggagattatcacgaccgagaaaacttccaaagacaccagtgcttcagctgtagcagttggtctcaagcaggggaaggtcatcattgtggttaaggatggacctggcttctatactaccaggtgtcttgcgcccatgatgtctgaagtcatccgaatcctccaggaaggagttgacccgaagaagctggattccctgaccacaagctttggctttcctgtgggtgccgccacactggtggatgaagttggtgtggatgtagcgaaacatgtggcggaagatctgggcaaagtctttggggagcggtttggaggtggaaacccagaactgctgacacagatggtgtccaagggcttcctaggtcgtaaatctgggaagggcttttacatctatcaggagggtgtgaagaggaaggatttgaattctgacatggatagtattttagcgagtctgaagctgcctcctaagtctgaagtctcatcagacgaagacatccagttccgcctggtgacaagatttgtgaatgaggcagtcatgtgcctgcaagaggggatcttggccacacctgcagagggagacatcggagccgtctttgggcttggcttcccgccttgtctgggagggcctttccgctttgtggatctgtatggcgcccagaagatagtggaccggctcaagaaatatgaagctgcctatggaaaacagttcaccccatgccagctgctagctgaccatgctaacagccctaacaagaagttctaccagtgagcaggcctcatgcctcgctcagtcagtgcactaaccccagctgccggcagtgctggttctccaacagagtggtgtctagatttatcagagtaacgagaagacaaactccggcactgggtttgctccctgattaaagtgccttcagccaagaccatctctccctcctggtgaagtgtgacttcgaattagtttgcacttcctattggaaggtagagcccactgctcattgtataagccccgaggcctagagtggcagccaagagccatctgaagccacctctctgcctgttcctcccaagaggccagggtggccaggggtggtgagggcagttctgcacccagccaaacacataacaataaaaaccaaactctgtgtcagcatctttgcccttctggtttaaacgcctccttcaaaaagcaatctggaagaaagccctgtgctttgggggagtaagaatgtgtgtgcagaattctaggcagcaccttagggagggactgggatgagagaaagtgggacctggtgggctcaaccacacacacctgtctgtgcagatgctttgcccaggcttctcaccacggtgtaccgggatattaaacctctttccccagcaaaaaaaaaaaaaaaaaaaaaaaaaaaaaaaaaaaa

SEQ ID NO: 12889 - DNA, 2336 bp, Homo sapiens
attttccacgctgtaccggcggaaattcaagcactggaagagaggttccggggctgggctggcctgactgaaggcggcggaatggagacgcggaccgaggacgggggcctcacccgccgccccacgctggcctcttcttgggatgttgcaggcggggccctgacccacagcctcctcctcacccgggccggtctcggccccggtgacttcgactgggaggagctgctggcaccgcctgctccaggtcaggatctggtgattttgaagagaaaccacaacgacaaagatgaaaacccctgcttcctttacctgaggtgtggccctgatggaggtgaagaaatcgcttctattggcattttaagttcagcaagaaatatggaagtgtacttaggagaggagtactgtggaaccagtaggggcaagaatgtttgtactgtcctggatgacagtgaacatgaaaagatcattttgtataaaaaaaatctaaaattggagtcctccacacatgcttgtaaaataaagttgctctcctttggcgaaaggcagtgtgtgttcatcagtaaagttgtggtacacatgagatcagtttttgcaaattcttcaacaagctctcctgctctaggatcaaggatagaccttgacaaggtccaaaccataatggagtccatggggtcaaagttatctcctggagctcagcagttgatggatatggttaggtgtcagcagcggaattgtattcccattggagagcagcttcagtcggtgttgggcaattctggatacaagcatatgattggactacaatcctcatctaccttaggaaccttaaacaagtcgtcctccacaccttttccttttagaactggattgacatctgggaacgtgactgaaaacttacaaacttacattgataaaagtacacaactgcctggtggagagaattctaccaagcttgatgagtgtaaagttatgcctcaaaaccattcctttcttgaaaatgatcttaaaaatgcaatggcctctttcttaccaaagaaagtaagtgacaactcaaatatacccaactccgagttgctgccttttctccagaatttatgtagtcaagttaatcatctccatgtgggaaataagaccgagtgtcaggaaaacatcaccaagcatggtgaacgcattcttggtgttggaatggaagagcaatctatttgctcctacttggaaaagattctttctaaaaatatggaactgatggaaaagaaacttatggattacattgatcagcgaatacatgaactccaggagcacattgatgataagattgctttgttactggatttgctgcaaaatcctaactccccgcccactgggatacctctaagacattatgactctggagaaagactttcaaatggagaaagataagctctcaacataaacagtgtactgcagatatttattacatatttattacaaagccaaaacccaaaaatatttataaaaagcaagtatttaatgtcctttgagggatcattgtcttacacaaagtgacctcagttttcgtttttactacacttgttattttaaatccagtactgtacactgagttaatatgatacagtcaaattatttttgctcacgatatttttcagtcttacagaaatgtatgtatatttgtgttaagagtttaaaatgcttgaggatttctaatacagttcattagtttgtattgtatatgtgtttaagtataatttttatttatacaaagatcttatagtcttagaagtatgaaaaataatgcttaagagtatttgatttttttctttttctaattatcttggaaaattggatacttaagacttggagcctttacttcagattaccagtttacattttgtattgcttgtgtgagataatgaataagatgtgatatttggcatgtgtaaacttagttcactctggggttgttaatattatttgtttcattacagagtagctgtaggtaggaaagtaaacatcagaactagcctagtccttgttacgattagtactttggatttgatttttcctgtaaaacagatgcagtcatcttgtttgacctcagtaaccccagacagtttaagaaaacctctccttttgagctgatacaggttttttccccagaatccttttctggcatgtttattgtatgaaataatgaggctctccatggaaggatgaacacatatgagtcaagggattgcaattctctctgatagacttagttttcagaccttataactattgtatatgcattgaagggtgatatatttgcatataaaaataaacgcacctgctctggg

SEQ ID NO: 12890 - DNA, 2444 bp, Homo sapiens
ggttttttttttttaccccccttttttatttattatttttttgcacattgagcggatccttgggaacgagagaaaaaagaaacccaaactcacgcgtgcagaagatctccccccccttcccctcccctcctccctcttttcccctccccaggagaaaaagacccccaagcagaaaaaagttcaccttggactcgtctttttcttgcaatattttttgggggggcaaaactttgagggggtgattttttttggcttttcttcctccttcatttttcttccaaaattgctgctggtgggtgaaaaaaaaatgccgcagctgaacggcggtggaggggatgacctaggcgccaacgacgaactgatttccttcaaagacgagggcgaacaggaggagaagagctccgaaaactcctcggcagagagggatttagctgatgtcaaatcgtctctagtcaatgaatcagaaacgaatcaaaacagctcctccgattccgaggcggaaagacggcctccgcctcgctccgaaagtttccgagacaaatcccgggaaagtttggaagaagcggccaagaggcaagatggagggctctttaaggggccaccgtatcccggctaccccttcatcatgatccccgacctgacgagcccctacctccccaacggatcgctctcgcccaccgcccgaacctatctccagatgaaatggccactgcttgatgtccaggcagggagcctccagagtagacaagccctcaaggatgcccggtccccatcaccggcacacattgtctctaacaaagtgccagtggtgcagcaccctcaccatgtccaccccctcacgcctcttatcacgtacagcaatgaacacttcacgccgggaaacccacctccacacttaccagccgacgtagaccccaaaacaggaatcccacggcctccgcaccctccagatatatccccgtattacccactatcgcctggcaccgtaggacaaatcccccatccgctaggatggttagtaccacagcaaggtcaaccagtgtacccaatcacgacaggaggattcagacacccctaccccacagctctgaccgtcaatgcttccgtgtccaggttccctccccatatggtcccaccacatcatacgctacacacgacgggcattccgcatccggccatagtcacaccaacagtcaaacaggaatcgtcccagagtgatgtcggctcactccatagttcaaagcatcaggactccaaaaaggaagaagaaaagaagaagccccacataaagaaacctcttaatgcattcatgttgtatatgaaggaaatgagagcaaaggtcgtagctgagtgcacgttgaaagaaagcgcggccatcaaccagatccttgggcggaggtggcatgcactgtccagagaagagcaagcgaaatactacgagctggcccggaaggagcgacagcttcatatgcaactgtaccccggctggtccgcgcgggataactatggaaagaagaagaagaggaaaagggacaagcagccgggagagaccaatgaacacagcgaatgtttcctaaatccttgcctttcacttcctccgattacagacctcagcgctcctaagaaatgccgagcgcgctttggccttgatcaacagaataactggtgcggcccttgcaggagaaaaaaaaagtgcgttcgctacatacaaggtgaaggcagctgcctcagcccaccctcttcagatggaagcttactagattcgcctcccccctccccgaacctgctaggctcccctccccgagacgccaagtcacagactgagcagacccagcctctgtcgctgtccctgaagcccgaccccctggcccacctgtccatgatgcctccgccacccgccctcctgctcgctgaggccacccacaaggcctccgccctctgtcccaacggggccctggacctgcccccagccgctttgcagcctgccgccccctcctcatcaattgcacagccgtcgacttcttggttacattcccacagctccctggccgggacccagccccagccgctgtcgctcgtcaccaagtctttagaatagctttagcgtcgtgaaccccgctgctttgtttatggttttgtttcacttttcttaatttgccccccacccccaccttgaaaggttttgttttgtactctcttaattttgtgccatgtggctacattagttgatgtttatcgagttcattggtcaatatttgacccattcttatttcaatttctccttttaaatatgtagatgagagaagaacctcatgattggtaccaaaatttttatcaacagctgtttaaagtctttgtagcgtttaaaaaatatatatatatacataactgttatgtagttcggatagcttagttttaaaagactgattaaaaaacaaaaaaaa

SEQ ID NO: 12891 - DNA, 4188 bp, Homo sapiens
aggctccagtctccggccgagtcttctcgcagccgcaacccacctggggccagcccagagctgccagcgccgctcggctccctccctccctcccggcccttcggccgcggcggcgtgcgcctgccttttccgggggcgggggcctggcccgcgcgctcccctcccgcaggcgccacctcggacatccccgggattgctacttctctgccaacttcgccaactcgccagcacttggagaggcccggctcccctcccggcgccctctgaccgcccccgccccgcgcgctctccgaccaccgcctctcggatgaccaggttccaggggagctgagcgagtcgcctcccccgcccagcttcagccctggctgcagctgcagcgcgagccatgcgcccccagtgcaccccggcccggcccaccgccccggggccattctgctgaccgcccagccccgagccccgacagtggcaagttgcggctactgcagttgcaagctccggccaacccggaggagccccagcggggagcgcagtgttgcgccccccgcccccgcgcgccccgcagcagccgggcgttcactcatcctccctcccccaccgtccctcccttttctcctcaagtcctgaagttgagtttgagaggcgacacggcggcggcggccgcgctgctcccgctcctctgcctccccatggatatgcactgcaaagcagaccccttctccgcgatgcacccagggcacgggggtgtgaaccagctcgggggggtgtttgtgaacggccggcccctacccgacgtggtgaggcagcgcatcgtggagctggcccaccagggtgtgcggccctgtgacatctcccggcagctgcgggtcagccacggctgtgtcagcaaaatcctgggcaggtactacgagaccggcagcatcaagccgggtgtgatcggtggctccaagcccaaagtggcgacgcccaaagtggtggacaagattgctgaatacaaacgacagaacccgactatgttcgcctgggagattcgagaccggctcctggccgagggcatctgtgacaatgacacagtgcccagcgtctcttccatcaacagaatcatccggaccaaagttcagcagcctttccacccaacgccggatggggctgggacaggagtgaccgcccctggccacaccattgttcccagcacggcctcccctcctgtttccagcgcctccaatgacccagtgggatcctactccatcaatgggatcctggggattcctcgctccaatggtgagaagaggaaacgtgatgaagatgtgtctgagggctcagtccccaatggagattcccagagtggtgtggacagtttgcggaagcacttgcgagctgacaccttcacccagcagcagctggaagctttggatcgggtctttgagcgtccttcctaccctgacgtcttccaggcatcagagcacatcaaatcagaacaggggaacgagtactccctcccagccctgacccctgggcttgatgaagtcaagtcgagtctatctgcatccaccaaccctgagctgggcagcaacgtgtcaggcacacagacatacccagttgtgactggtcgtgacatggcgagcaccactctgcctggttacccccctcacgtgccccccactggccagggaagctaccccacctccaccctggcaggaatggtgcctgggagcgagttctccggcaacccgtacagccacccccagtacacggcctacaacgaggcttggagattcagcaaccccgccttactaatgccgccccccggtccgcccctgccgctgctgccgctgcctatgaccgccactagttaccgcggggaccacatcaagcttcaggccgacagcttcggcctccacatcgtccccgtctgaccccaccccggagggagggaggaccgacgcgacgcgatgcctcccggccaccgccccagcctcaccccatcccacgacccccgcaacccttcacatcacccccctcgaaggtcggacaggacgggtggagccgtgggcgggaccctcaggcccgggcccgccgcccccagccccgcctgccgcccctccccgcctgcctggactgcgcggcgccgtgagggggattcggcccagctcgtcccggcctccaccaagccagccccgaagcccgccagccaccctgccggactcgggcgcgacctgctggcgcgcgccggatgtttctgtgacacacaatcagcgcggaccgcagcgcggcccagccccgggcacccgcctcggacgctcgggcgccaggaggcttcgctggaggggctgggccaaggagattaagaagaaaacgactttctgcaggaggaagagcccgctgccgaatccctgggaaaaattcttttcccccagtgccagccggactgccctcgccttccgggtgtgccctgtcccagaagatggaatgggggtgtgggggtccggctctaggaacgggctttgggggcgtcaggtctttccaaggttgggacccaaggatcggggggcccagcagcccgcaccgatcgagccggactctcggctcttcactgctcctcctggcctgcctagttccccagggcccggcacctcctgctgcgagacccggctctcagccctgccttgcccctacctcagcgtctcttccacctgctggcctcccagtttcccctcctgccagtccttcgcctgtcccttgacgccctgcatcctcctccctgactcgcagccccatcggacgctctcccgggaccgccgcaggaccagtttccatagactgcggactggggtcttcctccagcagttacttgatgccccctcccccgacacagactctcaatctgccggtggtaagaaccggttctgagctggcgtctgagctgctgcggggtggaagtggggggctgcccactccactcctcccatcccctcccagcctcctcctccggcaggaactgaacagaaccacaaaaagtctacatttatttaatatgatggtctttgcaaaaaggaacaaaacaacacaaaagcccaccaggctgctgctttgtggaaagacggtgtgtgtcgtgtgaaggcgaaacccggtgtacataacccctccccctccgccccgccccgcccggccccgtagagtccctgtcgcccgccggccctgcctgtagatacgccccgctgtctgtgctgtgagagtcgccgctcgctgggggggaagggggggacacagctacacgcccattaaagcacagcacgtcctgggggaggggggcattttttatgttacaaaaaaaaattacgaaagaaaagaaatctctatgcaaaatgacgaacatggtcctgtggactcctctggcctgttttgttggctctttctctgtaattccgtgttttcgctttttcctccctgcccctctctccctctgcccctctctcctctccgcttctctccccctctgtctctgtctctctccgtctctgtcgctcttgtctgtctgtctctgctctttcctcggcctctctccccagacctggcccggccgccctgtctccgcaggctagatccgaggtggcagctccagcccccgggctcgccccctcgcgggcgtgccccgcgcgccccgggcggccgaaggccgggccgccccgtcccgccccgtagttgctctttcggtagtggcgatgcgccctgcatgtctcctcacccgtggatcgtgacgactcgaaataacagaaacaaagtcaataaagtgaaaataaataaaaatccttgaacaaatccgaaaaggcttggagtcctcgcccagatctctctcccctgcgagccctttttatttgagaaggaaaaagagaaaagagaatcgtttaagggaacccggcgcccagccaggctccagtggcccgaacggggcggcgagggcggcgagggcgccgaggtccggcccatcccagtcctgtggggctggccgggcagagaccccggacccaggcccaggcctaacctgctaaatgtccccggacggttctggtctcctcggccactttcagtgcgtcggttcgttttgattctttttcttttgtgcacataagaaataaataataataataaataaagaataaaattttgtatgtcaaaaaaaaaaaaaaaaaa

SEQ ID NO: 12892 - DNA, 4207 bp, Homo sapiens
aggctccagtctccggccgagtcttctcgcagccgcaacccacctggggccagcccagagctgccagcgccgctcggctccctccctccctcccggcccttcggccgcggcggcgtgcgcctgccttttccgggggcgggggcctggcccgcgcgctcccctcccgcaggcgccacctcggacatccccgggattgctacttctctgccaacttcgccaactcgccagcacttggagaggcccggctcccctcccggcgccctctgaccgcccccgccccgcgcgctctccgaccaccgcctctcggatgaccaggttccaggggagctgagcgagtcgcctcccccgcccagcttcagccctggctgcagctgcagcgcgagccatgcgcccccagtgcaccccggcccggcccaccgccccggggccattctgctgaccgcccagccccgagccccgacagtggcaagttgcggctactgcagttgcaagctccggccaacccggaggagccccagcggggagcgcagtgttgcgccccccgcccccgcgcgccccgcagcagccgggcgttcactcatcctccctcccccaccgtccctcccttttctcctcaagtcctgaagttgagtttgagaggcgacacggcggcggcggccgcgctgctcccgctcctctgcctccccatggatatgcactgcaaagcagaccccttctccgcgatgcacccagggcacgggggtgtgaaccagctcgggggggtgtttgtgaacggccggcccctacccgacgtggtgaggcagcgcatcgtggagctggcccaccagggtgtgcggccctgtgacatctcccggcagctgcgggtcagccacggctgtgtcagcaaaatcctgggcaggtactacgagaccggcagcatcaagccgggtgtgatcggtggctccaagcccaaagtggcgacgcccaaagtggtggacaagattgctgaatacaaacgacagaacccgactatgttcgcctgggagattcgagaccggctcctggccgagggcatctgtgacaatgacacagtgcccagcgtctcttccatcaacagaatcatccggaccaaagttcagcagcctttccacccaacgccggatggggctgggacaggagtgaccgcccctggccacaccattgttcccagcacggcctcccctcctgtttccagcgcctccaatgacccagtgggatcctactccatcaatgggatcctggggattcctcgctccaatggtgagaagaggaaacgtgatgaagatgtgtctgagggctcagtccccaatggagattcccagagtggtgtggacagtttgcggaagcacttgcgagctgacaccttcacccagcagcagctggaagctttggatcgggtctttgagcgtccttcctaccctgacgtcttccaggcatcagagcacatcaaatcagaacaggggaacgagtactccctcccagccctgacccctgggcttgatgaagtcaagtcgagtctatctgcatccaccaaccctgagctgggcagcaacgtgtcaggcacacagacatacccagttgtgactggtcgtgacatggcgagcaccactctgcctggttacccccctcacgtgccccccactggccagggaagctaccccacctccaccctggcaggaatggtgcctgggagcgagttctccggcaacccgtacagccacccccagtacacggcctacaacgaggcttggagattcagcaaccccgccttactaagttccccttattattatagtgccgccccccggtccgcccctgccgctgctgccgctgcctatgaccgccactagttaccgcggggaccacatcaagcttcaggccgacagcttcggcctccacatcgtccccgtctgaccccaccccggagggagggaggaccgacgcgacgcgatgcctcccggccaccgccccagcctcaccccatcccacgacccccgcaacccttcacatcacccccctcgaaggtcggacaggacgggtggagccgtgggcgggaccctcaggcccgggcccgccgcccccagccccgcctgccgcccctccccgcctgcctggactgcgcggcgccgtgagggggattcggcccagctcgtcccggcctccaccaagccagccccgaagcccgccagccaccctgccggactcgggcgcgacctgctggcgcgcgccggatgtttctgtgacacacaatcagcgcggaccgcagcgcggcccagccccgggcacccgcctcggacgctcgggcgccaggaggcttcgctggaggggctgggccaaggagattaagaagaaaacgactttctgcaggaggaagagcccgctgccgaatccctgggaaaaattcttttcccccagtgccagccggactgccctcgccttccgggtgtgccctgtcccagaagatggaatgggggtgtgggggtccggctctaggaacgggctttgggggcgtcaggtctttccaaggttgggacccaaggatcggggggcccagcagcccgcaccgatcgagccggactctcggctcttcactgctcctcctggcctgcctagttccccagggcccggcacctcctgctgcgagacccggctctcagccctgccttgcccctacctcagcgtctcttccacctgctggcctcccagtttcccctcctgccagtccttcgcctgtcccttgacgccctgcatcctcctccctgactcgcagccccatcggacgctctcccgggaccgccgcaggaccagtttccatagactgcggactggggtcttcctccagcagttacttgatgccccctcccccgacacagactctcaatctgccggtggtaagaaccggttctgagctggcgtctgagctgctgcggggtggaagtggggggctgcccactccactcctcccatcccctcccagcctcctcctccggcaggaactgaacagaaccacaaaaagtctacatttatttaatatgatggtctttgcaaaaaggaacaaaacaacacaaaagcccaccaggctgctgctttgtggaaagacggtgtgtgtcgtgtgaaggcgaaacccggtgtacataacccctccccctccgccccgccccgcccggccccgtagagtccctgtcgcccgccggccctgcctgtagatacgccccgctgtctgtgctgtgagagtcgccgctcgctgggggggaagggggggacacagctacacgcccattaaagcacagcacgtcctgggggaggggggcattttttatgttacaaaaaaaaattacgaaagaaaagaaatctctatgcaaaatgacgaacatggtcctgtggactcctctggcctgttttgttggctctttctctgtaattccgtgttttcgctttttcctccctgcccctctctccctctgcccctctctcctctccgcttctctccccctctgtctctgtctctctccgtctctgtcgctcttgtctgtctgtctctgctctttcctcggcctctctccccagacctggcccggccgccctgtctccgcaggctagatccgaggtggcagctccagcccccgggctcgccccctcgcgggcgtgccccgcgcgccccgggcggccgaaggccgggccgccccgtcccgccccgtagttgctctttcggtagtggcgatgcgccctgcatgtctcctcacccgtggatcgtgacgactcgaaataacagaaacaaagtcaataaagtgaaaataaataaaaatccttgaacaaatccgaaaaggcttggagtcctcgcccagatctctctcccctgcgagccctttttatttgagaaggaaaaagagaaaagagaatcgtttaagggaacccggcgcccagccaggctccagtggcccgaacggggcggcgagggcggcgagggcgccgaggtccggcccatcccagtcctgtggggctggccgggcagagaccccggacccaggcccaggcctaacctgctaaatgtccccggacggttctggtctcctcggccactttcagtgcgtcggttcgttttgattctttttcttttgtgcacataagaaataaataataataataaataaagaataaaattttgtatgtcaaaaaaaaaaaaaaaaaa

SEQ ID NO: 12893 - DNA, 4257 bp, Homo sapiens
aggctccagtctccggccgagtcttctcgcagccgcaacccacctggggccagcccagagctgccagcgccgctcggctccctccctccctcccggcccttcggccgcggcggcgtgcgcctgccttttccgggggcgggggcctggcccgcgcgctcccctcccgcaggcgccacctcggacatccccgggattgctacttctctgccaacttcgccaactcgccagcacttggagaggcccggctcccctcccggcgccctctgaccgcccccgccccgcgcgctctccgaccaccgcctctcggatgaccaggttccaggggagctgagcgagtcgcctcccccgcccagcttcagccctggctgcagctgcagcgcgagccatgcgcccccagtgcaccccggcccggcccaccgccccggggccattctgctgaccgcccagccccgagccccgacagtggcaagttgcggctactgcagttgcaagctccggccaacccggaggagccccagcggggagcgcagtgttgcgccccccgcccccgcgcgccccgcagcagccgggcgttcactcatcctccctcccccaccgtccctcccttttctcctcaagtcctgaagttgagtttgagaggcgacacggcggcggcggccgcgctgctcccgctcctctgcctccccatggatatgcactgcaaagcagaccccttctccgcgatgcacccagggcacgggggtgtgaaccagctcgggggggtgtttgtgaacggccggcccctacccgacgtggtgaggcagcgcatcgtggagctggcccaccagggtgtgcggccctgtgacatctcccggcagctgcgggtcagccacggctgtgtcagcaaaatcctgggcaggtactacgagaccggcagcatcaagccgggtgtgatcggtggctccaagcccaaagtggcgacgcccaaagtggtggacaagattgctgaatacaaacgacagaacccgactatgttcgcctgggagattcgagaccggctcctggccgagggcatctgtgacaatgacacagtgcccagcgtctcttccatcaacagaatcatccggaccaaagttcagcagcctttccacccaacgccggatggggctgggacaggagtgaccgcccctggccacaccattgttcccagcacggcctcccctcctgtttccagcgcctccaatgacccagtgggatcctactccatcaatgggatcctggggattcctcgctccaatggtgagaagaggaaacgtgatgaagttgaggtatacactgatcctgcccacattagaggaggtggaggtttgcatctggtctggactttaagagatgtgtctgagggctcagtccccaatggagattcccagagtggtgtggacagtttgcggaagcacttgcgagctgacaccttcacccagcagcagctggaagctttggatcgggtctttgagcgtccttcctaccctgacgtcttccaggcatcagagcacatcaaatcagaacaggggaacgagtactccctcccagccctgacccctgggcttgatgaagtcaagtcgagtctatctgcatccaccaaccctgagctgggcagcaacgtgtcaggcacacagacatacccagttgtgactggtcgtgacatggcgagcaccactctgcctggttacccccctcacgtgccccccactggccagggaagctaccccacctccaccctggcaggaatggtgcctgggagcgagttctccggcaacccgtacagccacccccagtacacggcctacaacgaggcttggagattcagcaaccccgccttactaatgccgccccccggtccgcccctgccgctgctgccgctgcctatgaccgccactagttaccgcggggaccacatcaagcttcaggccgacagcttcggcctccacatcgtccccgtctgaccccaccccggagggagggaggaccgacgcgacgcgatgcctcccggccaccgccccagcctcaccccatcccacgacccccgcaacccttcacatcacccccctcgaaggtcggacaggacgggtggagccgtgggcgggaccctcaggcccgggcccgccgcccccagccccgcctgccgcccctccccgcctgcctggactgcgcggcgccgtgagggggattcggcccagctcgtcccggcctccaccaagccagccccgaagcccgccagccaccctgccggactcgggcgcgacctgctggcgcgcgccggatgtttctgtgacacacaatcagcgcggaccgcagcgcggcccagccccgggcacccgcctcggacgctcgggcgccaggaggcttcgctggaggggctgggccaaggagattaagaagaaaacgactttctgcaggaggaagagcccgctgccgaatccctgggaaaaattcttttcccccagtgccagccggactgccctcgccttccgggtgtgccctgtcccagaagatggaatgggggtgtgggggtccggctctaggaacgggctttgggggcgtcaggtctttccaaggttgggacccaaggatcggggggcccagcagcccgcaccgatcgagccggactctcggctcttcactgctcctcctggcctgcctagttccccagggcccggcacctcctgctgcgagacccggctctcagccctgccttgcccctacctcagcgtctcttccacctgctggcctcccagtttcccctcctgccagtccttcgcctgtcccttgacgccctgcatcctcctccctgactcgcagccccatcggacgctctcccgggaccgccgcaggaccagtttccatagactgcggactggggtcttcctccagcagttacttgatgccccctcccccgacacagactctcaatctgccggtggtaagaaccggttctgagctggcgtctgagctgctgcggggtggaagtggggggctgcccactccactcctcccatcccctcccagcctcctcctccggcaggaactgaacagaaccacaaaaagtctacatttatttaatatgatggtctttgcaaaaaggaacaaaacaacacaaaagcccaccaggctgctgctttgtggaaagacggtgtgtgtcgtgtgaaggcgaaacccggtgtacataacccctccccctccgccccgccccgcccggccccgtagagtccctgtcgcccgccggccctgcctgtagatacgccccgctgtctgtgctgtgagagtcgccgctcgctgggggggaagggggggacacagctacacgcccattaaagcacagcacgtcctgggggaggggggcattttttatgttacaaaaaaaaattacgaaagaaaagaaatctctatgcaaaatgacgaacatggtcctgtggactcctctggcctgttttgttggctctttctctgtaattccgtgttttcgctttttcctccctgcccctctctccctctgcccctctctcctctccgcttctctccccctctgtctctgtctctctccgtctctgtcgctcttgtctgtctgtctctgctctttcctcggcctctctccccagacctggcccggccgccctgtctccgcaggctagatccgaggtggcagctccagcccccgggctcgccccctcgcgggcgtgccccgcgcgccccgggcggccgaaggccgggccgccccgtcccgccccgtagttgctctttcggtagtggcgatgcgccctgcatgtctcctcacccgtggatcgtgacgactcgaaataacagaaacaaagtcaataaagtgaaaataaataaaaatccttgaacaaatccgaaaaggcttggagtcctcgcccagatctctctcccctgcgagccctttttatttgagaaggaaaaagagaaaagagaatcgtttaagggaacccggcgcccagccaggctccagtggcccgaacggggcggcgagggcggcgagggcgccgaggtccggcccatcccagtcctgtggggctggccgggcagagaccccggacccaggcccaggcctaacctgctaaatgtccccggacggttctggtctcctcggccactttcagtgcgtcggttcgttttgattctttttcttttgtgcacataagaaataaataataataataaataaagaataaaattttgtatgtcaaaaaaaaaaaaaaaaaa

SEQ ID NO: 12894 - DNA, 4276 bp, Homo sapiens
aggctccagtctccggccgagtcttctcgcagccgcaacccacctggggccagcccagagctgccagcgccgctcggctccctccctccctcccggcccttcggccgcggcggcgtgcgcctgccttttccgggggcgggggcctggcccgcgcgctcccctcccgcaggcgccacctcggacatccccgggattgctacttctctgccaacttcgccaactcgccagcacttggagaggcccggctcccctcccggcgccctctgaccgcccccgccccgcgcgctctccgaccaccgcctctcggatgaccaggttccaggggagctgagcgagtcgcctcccccgcccagcttcagccctggctgcagctgcagcgcgagccatgcgcccccagtgcaccccggcccggcccaccgccccggggccattctgctgaccgcccagccccgagccccgacagtggcaagttgcggctactgcagttgcaagctccggccaacccggaggagccccagcggggagcgcagtgttgcgccccccgcccccgcgcgccccgcagcagccgggcgttcactcatcctccctcccccaccgtccctcccttttctcctcaagtcctgaagttgagtttgagaggcgacacggcggcggcggccgcgctgctcccgctcctctgcctccccatggatatgcactgcaaagcagaccccttctccgcgatgcacccagggcacgggggtgtgaaccagctcgggggggtgtttgtgaacggccggcccctacccgacgtggtgaggcagcgcatcgtggagctggcccaccagggtgtgcggccctgtgacatctcccggcagctgcgggtcagccacggctgtgtcagcaaaatcctgggcaggtactacgagaccggcagcatcaagccgggtgtgatcggtggctccaagcccaaagtggcgacgcccaaagtggtggacaagattgctgaatacaaacgacagaacccgactatgttcgcctgggagattcgagaccggctcctggccgagggcatctgtgacaatgacacagtgcccagcgtctcttccatcaacagaatcatccggaccaaagttcagcagcctttccacccaacgccggatggggctgggacaggagtgaccgcccctggccacaccattgttcccagcacggcctcccctcctgtttccagcgcctccaatgacccagtgggatcctactccatcaatgggatcctggggattcctcgctccaatggtgagaagaggaaacgtgatgaagttgaggtatacactgatcctgcccacattagaggaggtggaggtttgcatctggtctggactttaagagatgtgtctgagggctcagtccccaatggagattcccagagtggtgtggacagtttgcggaagcacttgcgagctgacaccttcacccagcagcagctggaagctttggatcgggtctttgagcgtccttcctaccctgacgtcttccaggcatcagagcacatcaaatcagaacaggggaacgagtactccctcccagccctgacccctgggcttgatgaagtcaagtcgagtctatctgcatccaccaaccctgagctgggcagcaacgtgtcaggcacacagacatacccagttgtgactggtcgtgacatggcgagcaccactctgcctggttacccccctcacgtgccccccactggccagggaagctaccccacctccaccctggcaggaatggtgcctgggagcgagttctccggcaacccgtacagccacccccagtacacggcctacaacgaggcttggagattcagcaaccccgccttactaagttccccttattattatagtgccgccccccggtccgcccctgccgctgctgccgctgcctatgaccgccactagttaccgcggggaccacatcaagcttcaggccgacagcttcggcctccacatcgtccccgtctgaccccaccccggagggagggaggaccgacgcgacgcgatgcctcccggccaccgccccagcctcaccccatcccacgacccccgcaacccttcacatcacccccctcgaaggtcggacaggacgggtggagccgtgggcgggaccctcaggcccgggcccgccgcccccagccccgcctgccgcccctccccgcctgcctggactgcgcggcgccgtgagggggattcggcccagctcgtcccggcctccaccaagccagccccgaagcccgccagccaccctgccggactcgggcgcgacctgctggcgcgcgccggatgtttctgtgacacacaatcagcgcggaccgcagcgcggcccagccccgggcacccgcctcggacgctcgggcgccaggaggcttcgctggaggggctgggccaaggagattaagaagaaaacgactttctgcaggaggaagagcccgctgccgaatccctgggaaaaattcttttcccccagtgccagccggactgccctcgccttccgggtgtgccctgtcccagaagatggaatgggggtgtgggggtccggctctaggaacgggctttgggggcgtcaggtctttccaaggttgggacccaaggatcggggggcccagcagcccgcaccgatcgagccggactctcggctcttcactgctcctcctggcctgcctagttccccagggcccggcacctcctgctgcgagacccggctctcagccctgccttgcccctacctcagcgtctcttccacctgctggcctcccagtttcccctcctgccagtccttcgcctgtcccttgacgccctgcatcctcctccctgactcgcagccccatcggacgctctcccgggaccgccgcaggaccagtttccatagactgcggactggggtcttcctccagcagttacttgatgccccctcccccgacacagactctcaatctgccggtggtaagaaccggttctgagctggcgtctgagctgctgcggggtggaagtggggggctgcccactccactcctcccatcccctcccagcctcctcctccggcaggaactgaacagaaccacaaaaagtctacatttatttaatatgatggtctttgcaaaaaggaacaaaacaacacaaaagcccaccaggctgctgctttgtggaaagacggtgtgtgtcgtgtgaaggcgaaacccggtgtacataacccctccccctccgccccgccccgcccggccccgtagagtccctgtcgcccgccggccctgcctgtagatacgccccgctgtctgtgctgtgagagtcgccgctcgctgggggggaagggggggacacagctacacgcccattaaagcacagcacgtcctgggggaggggggcattttttatgttacaaaaaaaaattacgaaagaaaagaaatctctatgcaaaatgacgaacatggtcctgtggactcctctggcctgttttgttggctctttctctgtaattccgtgttttcgctttttcctccctgcccctctctccctctgcccctctctcctctccgcttctctccccctctgtctctgtctctctccgtctctgtcgctcttgtctgtctgtctctgctctttcctcggcctctctccccagacctggcccggccgccctgtctccgcaggctagatccgaggtggcagctccagcccccgggctcgccccctcgcgggcgtgccccgcgcgccccgggcggccgaaggccgggccgccccgtcccgccccgtagttgctctttcggtagtggcgatgcgccctgcatgtctcctcacccgtggatcgtgacgactcgaaataacagaaacaaagtcaataaagtgaaaataaataaaaatccttgaacaaatccgaaaaggcttggagtcctcgcccagatctctctcccctgcgagccctttttatttgagaaggaaaaagagaaaagagaatcgtttaagggaacccggcgcccagccaggctccagtggcccgaacggggcggcgagggcggcgagggcgccgaggtccggcccatcccagtcctgtggggctggccgggcagagaccccggacccaggcccaggcctaacctgctaaatgtccccggacggttctggtctcctcggccactttcagtgcgtcggttcgttttgattctttttcttttgtgcacataagaaataaataataataataaataaagaataaaattttgtatgtcaaaaaaaaaaaaaaaaaa

SEQ ID NO: 12895 - DNA, 4290 bp, Homo sapiens
aggctccagtctccggccgagtcttctcgcagccgcaacccacctggggccagcccagagctgccagcgccgctcggctccctccctccctcccggcccttcggccgcggcggcgtgcgcctgccttttccgggggcgggggcctggcccgcgcgctcccctcccgcaggcgccacctcggacatccccgggattgctacttctctgccaacttcgccaactcgccagcacttggagaggcccggctcccctcccggcgccctctgaccgcccccgccccgcgcgctctccgaccaccgcctctcggatgaccaggttccaggggagctgagcgagtcgcctcccccgcccagcttcagccctggctgcagctgcagcgcgagccatgcgcccccagtgcaccccggcccggcccaccgccccggggccattctgctgaccgcccagccccgagccccgacagtggcaagttgcggctactgcagttgcaagctccggccaacccggaggagccccagcggggagcgcagtgttgcgccccccgcccccgcgcgccccgcagcagccgggcgttcactcatcctccctcccccaccgtccctcccttttctcctcaagtcctgaagttgagtttgagaggcgacacggcggcggcggccgcgctgctcccgctcctctgcctccccatggatatgcactgcaaagcagaccccttctccgcgatgcacccagggcacgggggtgtgaaccagctcgggggggtgtttgtgaacggccggcccctacccgacgtggtgaggcagcgcatcgtggagctggcccaccagggtgtgcggccctgtgacatctcccggcagctgcgggtcagccacggctgtgtcagcaaaatcctgggcaggtactacgagaccggcagcatcaagccgggtgtgatcggtggctccaagcccaaagtggcgacgcccaaagtggtggacaagattgctgaatacaaacgacagaacccgactatgttcgcctgggagattcgagaccggctcctggccgagggcatctgtgacaatgacacagtgcccagcgtctcttccatcaacagaatcatccggaccaaagttcagcagcctttccacccaacgccggatggggctgggacaggagtgaccgcccctggccacaccattgttcccagcacggcctcccctcctgtttccagcgcctccaatgacccagtgggatcctactccatcaatgggatcctggggattcctcgctccaatggtgagaagaggaaacgtgatgaagatgtgtctgagggctcagtccccaatggagattcccagagtggtgtggacagtttgcggaagcacttgcgagctgacaccttcacccagcagcagctggaagctttggatcgggtctttgagcgtccttcctaccctgacgtcttccaggcatcagagcacatcaaatcagaacaggggaacgagtactccctcccagccctgacccctgggcttgatgaagtcaagtcgagtctatctgcatccaccaaccctgagctgggcagcaacgtgtcaggcacacagacatacccagttgtgactggtcgtgacatggcgagcaccactctgcctggttacccccctcacgtgccccccactggccagggaagctaccccacctccaccctggcaggaatggtgcctgaggctgcagttggtccctcatcctccctcatgagcaagccggggaggaagcttgcagaagtgcccccttgtgtgcaacccactggagcgagttctccggcaacccgtacagccacccccagtacacggcctacaacgaggcttggagattcagcaaccccgccttactaagttccccttattattatagtgccgccccccggtccgcccctgccgctgctgccgctgcctatgaccgccactagttaccgcggggaccacatcaagcttcaggccgacagcttcggcctccacatcgtccccgtctgaccccaccccggagggagggaggaccgacgcgacgcgatgcctcccggccaccgccccagcctcaccccatcccacgacccccgcaacccttcacatcacccccctcgaaggtcggacaggacgggtggagccgtgggcgggaccctcaggcccgggcccgccgcccccagccccgcctgccgcccctccccgcctgcctggactgcgcggcgccgtgagggggattcggcccagctcgtcccggcctccaccaagccagccccgaagcccgccagccaccctgccggactcgggcgcgacctgctggcgcgcgccggatgtttctgtgacacacaatcagcgcggaccgcagcgcggcccagccccgggcacccgcctcggacgctcgggcgccaggaggcttcgctggaggggctgggccaaggagattaagaagaaaacgactttctgcaggaggaagagcccgctgccgaatccctgggaaaaattcttttcccccagtgccagccggactgccctcgccttccgggtgtgccctgtcccagaagatggaatgggggtgtgggggtccggctctaggaacgggctttgggggcgtcaggtctttccaaggttgggacccaaggatcggggggcccagcagcccgcaccgatcgagccggactctcggctcttcactgctcctcctggcctgcctagttccccagggcccggcacctcctgctgcgagacccggctctcagccctgccttgcccctacctcagcgtctcttccacctgctggcctcccagtttcccctcctgccagtccttcgcctgtcccttgacgccctgcatcctcctccctgactcgcagccccatcggacgctctcccgggaccgccgcaggaccagtttccatagactgcggactggggtcttcctccagcagttacttgatgccccctcccccgacacagactctcaatctgccggtggtaagaaccggttctgagctggcgtctgagctgctgcggggtggaagtggggggctgcccactccactcctcccatcccctcccagcctcctcctccggcaggaactgaacagaaccacaaaaagtctacatttatttaatatgatggtctttgcaaaaaggaacaaaacaacacaaaagcccaccaggctgctgctttgtggaaagacggtgtgtgtcgtgtgaaggcgaaacccggtgtacataacccctccccctccgccccgccccgcccggccccgtagagtccctgtcgcccgccggccctgcctgtagatacgccccgctgtctgtgctgtgagagtcgccgctcgctgggggggaagggggggacacagctacacgcccattaaagcacagcacgtcctgggggaggggggcattttttatgttacaaaaaaaaattacgaaagaaaagaaatctctatgcaaaatgacgaacatggtcctgtggactcctctggcctgttttgttggctctttctctgtaattccgtgttttcgctttttcctccctgcccctctctccctctgcccctctctcctctccgcttctctccccctctgtctctgtctctctccgtctctgtcgctcttgtctgtctgtctctgctctttcctcggcctctctccccagacctggcccggccgccctgtctccgcaggctagatccgaggtggcagctccagcccccgggctcgccccctcgcgggcgtgccccgcgcgccccgggcggccgaaggccgggccgccccgtcccgccccgtagttgctctttcggtagtggcgatgcgccctgcatgtctcctcacccgtggatcgtgacgactcgaaataacagaaacaaagtcaataaagtgaaaataaataaaaatccttgaacaaatccgaaaaggcttggagtcctcgcccagatctctctcccctgcgagccctttttatttgagaaggaaaaagagaaaagagaatcgtttaagggaacccggcgcccagccaggctccagtggcccgaacggggcggcgagggcggcgagggcgccgaggtccggcccatcccagtcctgtggggctggccgggcagagaccccggacccaggcccaggcctaacctgctaaatgtccccggacggttctggtctcctcggccactttcagtgcgtcggttcgttttgattctttttcttttgtgcacataagaaataaataataataataaataaagaataaaattttgtatgtcaaaaaaaaaaaaaaaaaa

SEQ ID NO: 12896 - DNA, 5048 bp, Homo sapiens
aaaggcaatttaccagtgatttctgggtgctggggctgatattttttgtgcatatttaagaatgtcttccaagcaagccacctctccatttgcctgtgcagctgatggagaggatgcaatgacccaggatttaacctcaagggaaaaggaagagggcagtgatcaacatgtggcctcccatctgcctctgcaccccataatgcacaacaaacctcactctgaggagctaccaacacttgtcagtaccattcaacaagatgctgactgggacagcgttctgtcatctcagcaaagaatggaatcagagaataataagttatgttccctatattccttccgaaatacctctacctcaccacataagcctgacgaagggagtcgggaccgtgagataatgaccagtgttacttttggaaccccagagcgccgcaaagggagtcttgccgatgtggtggacacactgaaacagaagaagcttgaggaaatgactcggactgaacaagaggattcctcctgcatggaaaaactactttcaaaagattggaaggaaaaaatggaaagactaaataccagtgaacttcttggagaaattaaaggtacacctgagagcctggcagaaaaagaacggcagctctccaccatgattacccagctgatcagtttacgggagcagctactggcagcgcatgatgaacagaaaaaactggcagcgtcacaaattgagaaacaacggcagcaaatggaccttgctcgccaacagcaagaacagattgcgagacaacagcagcaacttctgcaacagcagcacaaaattaatctcctgcagcaacagatccaggttcagggtcacatgcctccgctcatgatcccaatttttccacatgaccagcggactctggcagcagctgctgctgcccaacagggattcctcttcccccctggaataacatacaaaccaggtgataactaccccgtacagttcattccatcaacaatggcagctgctgctgcttctggactcagccctttacagctccagaagggtcatgtctcccacccacaaattaaccaaaggctaaagggcctaagtgaccgttttggcaggaatttggacacctttgaacatggtggtggccactcttacaaccacaaacagattgagcagctctatgccgctcagctggccagcatgcaggtgtcacctggagcaaagatgccatcaactccacagccaccaaacacagcagggacggtctcacctactgggataaaaaatgaaaagagagggaccagccctgtaactcaagttaaggatgaagcagcagcacagcctctgaatctctcatcccgacccaagacagcagagcctgtaaagtccccaacgtctcccacccagaacctcttcccagccagcaaaaccagccctgtcaatctgccaaacaaaagcagcatccctagccccattggaggaagcctgggaagaggatcctctttagatatcctatctagtctcaactcccctgccctttttggggatcaggatacagtgatgaaagccattcaggaggcgcggaagatgcgagagcagatccagcgggagcaacagcagcaacagccacatggtgttgacgggaaactgtcctccataaataatatggggctgaacagctgcaggaatgaaaaggaaagaacgcgctttgagaatttggggccccagttaacgggaaagtcaaatgaagatggaaaactgggcccaggtgtcatcgaccttactcggccagaagatgcagagggaggtgccactgtggctgaagcacgagtctacagggacgcccgcggccgtgccagcagcgagccacacattaagcgaccaatgaatgcattcatggtttgggcaaaggatgagaggagaaaaatccttcaggccttccccgacatgcataactccaacattagcaaaatcttaggatctcgctggaaatcaatgtccaaccaggagaagcaaccttattatgaagagcaggcccggctaagcaagatccacttagagaagtacccaaactataaatacaaaccccgaccgaaacgcacctgcattgttgatggcaaaaagcttcggattggggagtataagcaactgatgaggtctcggagacaggagatgaggcagttctttactgtggggcaacagcctcagattccaatcaccacaggaacaggtgttgtgtatcctggtgctatcactatggcaactaccacaccatcgcctcagatgacatctgactgctctagcacctcggccagcccggagcccagcctcccggtcatccagagcacttatggtatgaagacagatggcggaagcctagctggaaatgaaatgatcaatggagaggatgaaatggaaatgtatgatgactatgaagatgaccccaaatcagactatagcagtgaaaatgaagccccggaggctgtcagtgccaactgaggagtttttgtttgctgaattaaagtactctgacatttcacccccctccccaacaaagagttattaaagagcccgcatgcatttgtggctccacaattacatcagcagaatggtcttaattgtttcgtaaagtgtgagacagattaagttttccctgatttttcatgaacttgagttttttgttgttattgttattgttgttgttgttgtttttttaatttaggtgaagacatattaaatatgagacaccaggacttgaaacttatctcaacccgtagatgtcttacaagtcttatatttttgtcttactttttttttcttttggatgttgataaaggtttaagttactgttttagatggggttaaacattctcactcaggtatgctgtgccggcctacaggttgtgaatgtgtttttattctgaattattttagaaaacaactgaggatttcatattgtgaaacagaacaagtccacggcgtgtgcagctgcatgtagagcatattcaaaaggcctcggaattccaattttccatttgtagagttaaactttgaatgtgccaaactttttcgtaacttttgaatcttaatattttgaaagtcttaaaggagacactgcaaagtcttagacaatctttggcatcttaaaataaaatagcaaaccaacatttttttttccagaaaatggtaaggtactcaggaatctggagacaagatattgtaaggaatgaacaaggttgccacagtgcatggacccaattgtgtttgcctgttgacgtgccatcagtgcgtgatgtggtatgacatacacacaccagagcaaccgccacaccagatatcgacagagtggtcttctctgcctgagaccacctctcactacatccattatccctttgcctttaaccctgacattcagtcttaacacattttatcttaaataatttattcattccagaatgtcaagggtccacttgctatttattttttttcaattgttggtggcattaatttaataattcttgtttttcaccttccttccccgaagaacttttccgtccttttcacctccttctcctgtgtacatagtgattttatgtccccagaacgcctggaagcatttctgaaaccaagatattattaaaaacctattattgtttttaatcatgagtatgtatctggctgcagggctgtgtattgggatataggtatatagtcttacacttaaacaggtatgcccctgaggttcactgtgacctcaagtcttttgccagaattttcccctaattcagttcacaagtggtagggtctgcatcagtggcatttccccctgaattccattcagcagcaaggttcaacagtggtgactgccaggcaggagagtcctgcggccaaacctgaagcccaaggctcgtgggccatgcaggaatctcagtgaagctgtcatgggctggcacctttacactgagttgccttgtcccagctggcacatctagggagttcattgcaaaatccccaggatgcaaaaagccacatgacagcctcagagcaaagatggtggcaaatagtcatgatacatctagagaatgaaagaaaactgtaagggaggagaaggaggggaatacattccctatatgggatgttcctactgttaactctggggaacagatagctccgggggcagcagatgagttcctctggctgactctatctgtagccacatggggacctgcctacgtgtgaacaaaatgaactgcacttatcacacaaggatttctttgaagacatgctactggggtgggaagcagtgaggttttattccccatctcctaactacagggagctctgccatgtcattttggccttcctgaaactaggacaggttgtctatcggggggcttcccccagagaggtttagtgggagaatgtcagtgaatgggatagttcacctcatgggacaacccagaatctgatcaccaggacataggaatggccccatcagatttcttgagccattttgtcacttggaagaaaatagtgtacctttgtatttatttaagagtgctcaaggcctaatagcaataaacaggtctagccaagaaattacaagctattctgttagctgggagtgctctctataagctgattaaggtactgataggaactctttgttattcatgttggttggggattagaaatttgtttttgtacatttatttcaaatgaggaggaggtcattttttctctcaaaaaatgagtatttattattgtcttactgatttctttgattatatacctctcctcctcagttcactcttgttttttttctttctctttggcttttgcttttgctctctctcacttctttcttattttgttgcattggtagagtgttgtatggctagcattgtattgtatgtaattaattttgcacaaaagcaaacatttagcatagtaggttaattttgtttgtttttatgaccatgccaaaataatattctgggctggtggagaacaaaggactgttctttaggactgaaacttgattttgctcatagtaagt

SEQ ID NO: 12897 - DNA, 3401 bp, Homo sapiens
acggaccggcaggcctagctccggggctgcggcggctgaggcgcggggatggagcccctgcgggtgctggagctatacagcggcgtgggcggcatgcaccacgcgctgagagaaagctgtatacctgcacaagtggtggctgccattgatgtcaacactgtcgctaatgaagtatacaagtataattttcctcacacacagttacttgccaagacgattgaaggcattacactcgaagagtttgacagattatcttttgatatgattttaatgagccctccctgccagccattcacaagagacctcttgatacaaacaatagaaaattgtggctttcagtaccaagagtttctattatctccaacctctcttggcattccaaattcaaggctacgatattttcttattgcaaagcttcagtcagagccattaccctttcaagcccctggtcaggtactgatggagttccccaaaattgaatctgtacatccacaaaaatatgcaatggatgtagaaaataaaattcaagaaaagaacgttgaaccaaatattagctttgatggcagcatacagtgttctggaaaagatgccattctttttaagcttgaaactgcagaagaaattcacaggaaaaatcaacaagatagtgatctctctgtgaaaatgctaaaagattttcttgaagatgacactgacgtgaaccagtatcttttaccaccaaagtcattgctgcgatatgctcttctgttagacattgttcagcccacttgtagaaggtccgtgtgctttaccaaaggatatggaagctacatagaagggacagggtctgtgttacagactgcagaggatgtgcaggttgagaatatctacaaatcccttaccaatttgtcacaagaagaacagataacaaagctgttaatacttaaactgcgatatttcactcctaaagaaatagcaaatctccttggatttcctccagagttcggatttcctgagaagataacagtgaaacagcgttatcgcctacttggaaatagtctcaacgtgcatgtagtagctaaactaatcaaaatcttatatgaataattttgaaataactctgaaagatggtcatatgatattccttcattttcagagagtaattctgaaattctgttttgaactaattctggtgaaatttaactaaattattttaatctgtccttattaagaaatttggattttattaaaaaaatccatgtgtttcatcaaatttatattactgtattttataaaatacgaactattgttatgctttatggagagtatattttcatatgaaactgataaatatatatgtggaatattctttttaaaaacaattttataaacaaatcaaggagcactagagctttagtgtctacatgagtatcttgtgaagtgtcataacaggcataacatatttttatgttaattaaagaagttttttatttctaattttaaaataatgattctaattctagcccattgaatgttttacttaatttccaatcctgtaaatatttctttatttcatctaaacaaatgcatatgatatgtaaaccaaattatcatcattcagtttatacagcagactgaagaatatgtcaggaaaaataatcctaaatgtttgattacctctccatgaagcggccacagaaactgttggtgcacattatctacattttcctcagcctctatctgaaggacaaaactcatttttccttcttcattttgtatgtactttcctttagttgactattatcaaagcttgtttttgtcttctcagcttctgagttgaatttgcctttgcacgctgaggaatgtagcatgacgttaagatttcagggaggaagctgccctctgatcccatgtcatatgacagtactcccctccccccagttgttctttattgtagcaacatacactctcaatgaacttttatgacttttaactttctctgtctctcttcctcagcagacctcttggaattagggtttctaatcaaactaagtcttgcatcataaattctatggtttgtgataaaagcaagtgacaaagagaagagagatgaaaagaaacaagtccagaaatcatattacaagattttaattcaaatttttcttcttaaaaatcagctatttagaggtggataaattggaagtttgtgcattgcttgtgggaacgtaaaatggttcagctgctgttggaaaacgctatggaggttcgtcacaaaattcaacatagaattaccctatgattcagcgattccacctctggctatagatccaaaagaattgaaagcagggacttgaacagatatttgtacaccagtgtttataacaccattatttacagtagccaaaaggtagaagcagcccaagtgtcatcccattcacccatgaatggatgcaggaattgtgttccgtgcatgcagtggaatagtaccagccttccgcaggaaggaaattctgacatatgcggtgacatggatgaaccttgagtacattatgcgaagtgaaataagccaccctgtggggatggagaatgggtagttagtgcataatggatacaaagtttctgattggggtgatgagaaagttctggaggtggatggggaggatggttgcacaacagtgtgagtgtacttaatgccactgcaactgtatatttaaaaatagttaaaatgataaattttacattatgtatattttactgcaattgaaaaaatcatactctattaccaatttttcagaactcatagataaatatgaatgtagggaagctgtaagccagcccatatacagaaactatcactatctacatttttcatatgtgttcagacagagcctattacaagtctcataaatttcagtaaacaatcacaaattattttggcacactttcatgtaggttctgttcactgctgaaatattctaaataaaatggtttagagttttactgtaactatgaataattatgctataattatagtatcccacattcggttgagcaacattatacaaaataagtgtcgagttactgtgcaccaactataaatacttgaaaggtctgtagagacatttgcttacaaactggtagacagaatgtagcttagtggaattcttaaattatgggaatgtattcacaggaagacggtgattcttgcccttaattcataattgaaaatatgcagtaacaagcataaaactcacatcttaatgaagatgtatctaccagtgtcattcaattagcagatgtatatgtatgcataattaatttggaaaatgttattttatggaatgtctgctatatgcttttggtaataatgctgtatataaaatttgcactggaaattctgtttcctgataaaaaaaaaaaaa

SEQ ID NO: 12898 - DNA, 3467 bp, Homo sapiens
acggaccggcaggcctagctccggggctgcggcggctgaggcgcggggatggagcccctgcgggtgctggagctatacagcggcgtgggcggcatgcaccacgcgctgagagaaagctgtatacctgcacaagtggtggctgccattgatgtcaacactgtcgctaatgaagtatacaagtataattttcctcacacacagttacttgccaagacgattgaaggcattacactcgaagagtttgacagattatcttttgatatgattttaatgagccctccctgccagccattcacaagattacaaaaattaccaaagtatattcttttggaaaatgttaaaggttttgaagtatcttctacaagagacctcttgatacaaacaatagaaaattgtggctttcagtaccaagagtttctattatctccaacctctcttggcattccaaattcaaggctacgatattttcttattgcaaagcttcagtcagagccattaccctttcaagcccctggtcaggtactgatggagttccccaaaattgaatctgtacatccacaaaaatatgcaatggatgtagaaaataaaattcaagaaaagaacgttgaaccaaatattagctttgatggcagcatacagtgttctggaaaagatgccattctttttaagcttgaaactgcagaagaaattcacaggaaaaatcaacaagatagtgatctctctgtgaaaatgctaaaagattttcttgaagatgacactgacgtgaaccagtatcttttaccaccaaagtcattgctgcgatatgctcttctgttagacattgttcagcccacttgtagaaggtccgtgtgctttaccaaaggatatggaagctacatagaagggacagggtctgtgttacagactgcagaggatgtgcaggttgagaatatctacaaatcccttaccaatttgtcacaagaagaacagataacaaagctgttaatacttaaactgcgatatttcactcctaaagaaatagcaaatctccttggatttcctccagagttcggatttcctgagaagataacagtgaaacagcgttatcgcctacttggaaatagtctcaacgtgcatgtagtagctaaactaatcaaaatcttatatgaataattttgaaataactctgaaagatggtcatatgatattccttcattttcagagagtaattctgaaattctgttttgaactaattctggtgaaatttaactaaattattttaatctgtccttattaagaaatttggattttattaaaaaaatccatgtgtttcatcaaatttatattactgtattttataaaatacgaactattgttatgctttatggagagtatattttcatatgaaactgataaatatatatgtggaatattctttttaaaaacaattttataaacaaatcaaggagcactagagctttagtgtctacatgagtatcttgtgaagtgtcataacaggcataacatatttttatgttaattaaagaagttttttatttctaattttaaaataatgattctaattctagcccattgaatgttttacttaatttccaatcctgtaaatatttctttatttcatctaaacaaatgcatatgatatgtaaaccaaattatcatcattcagtttatacagcagactgaagaatatgtcaggaaaaataatcctaaatgtttgattacctctccatgaagcggccacagaaactgttggtgcacattatctacattttcctcagcctctatctgaaggacaaaactcatttttccttcttcattttgtatgtactttcctttagttgactattatcaaagcttgtttttgtcttctcagcttctgagttgaatttgcctttgcacgctgaggaatgtagcatgacgttaagatttcagggaggaagctgccctctgatcccatgtcatatgacagtactcccctccccccagttgttctttattgtagcaacatacactctcaatgaacttttatgacttttaactttctctgtctctcttcctcagcagacctcttggaattagggtttctaatcaaactaagtcttgcatcataaattctatggtttgtgataaaagcaagtgacaaagagaagagagatgaaaagaaacaagtccagaaatcatattacaagattttaattcaaatttttcttcttaaaaatcagctatttagaggtggataaattggaagtttgtgcattgcttgtgggaacgtaaaatggttcagctgctgttggaaaacgctatggaggttcgtcacaaaattcaacatagaattaccctatgattcagcgattccacctctggctatagatccaaaagaattgaaagcagggacttgaacagatatttgtacaccagtgtttataacaccattatttacagtagccaaaaggtagaagcagcccaagtgtcatcccattcacccatgaatggatgcaggaattgtgttccgtgcatgcagtggaatagtaccagccttccgcaggaaggaaattctgacatatgcggtgacatggatgaaccttgagtacattatgcgaagtgaaataagccaccctgtggggatggagaatgggtagttagtgcataatggatacaaagtttctgattggggtgatgagaaagttctggaggtggatggggaggatggttgcacaacagtgtgagtgtacttaatgccactgcaactgtatatttaaaaatagttaaaatgataaattttacattatgtatattttactgcaattgaaaaaatcatactctattaccaatttttcagaactcatagataaatatgaatgtagggaagctgtaagccagcccatatacagaaactatcactatctacatttttcatatgtgttcagacagagcctattacaagtctcataaatttcagtaaacaatcacaaattattttggcacactttcatgtaggttctgttcactgctgaaatattctaaataaaatggtttagagttttactgtaactatgaataattatgctataattatagtatcccacattcggttgagcaacattatacaaaataagtgtcgagttactgtgcaccaactataaatacttgaaaggtctgtagagacatttgcttacaaactggtagacagaatgtagcttagtggaattcttaaattatgggaatgtattcacaggaagacggtgattcttgcccttaattcataattgaaaatatgcagtaacaagcataaaactcacatcttaatgaagatgtatctaccagtgtcattcaattagcagatgtatatgtatgcataattaatttggaaaatgttattttatggaatgtctgctatatgcttttggtaataatgctgtatataaaatttgcactggaaattctgtttcctgataaaaaaaaaaaaa

SEQ ID NO: 12899 - DNA, 3539 bp, Homo sapiens
acggaccggcaggcctagctccggggctgcggcggctgaggcgcggggatggagcccctgcgggtgctggagctatacagcggcgtgggcggcatgcaccacgcgctgagagaaagctgtatacctgcacaagtggtggctgccattgatgtcaacactgtcgctaatgaagtatacaagtataattttcctcacacacagttacttgccaagacgattgaaggcattacactcgaagagtttgacagattatcttttgatatgattttaatgagccctccctgccagccattcacaaggattggccggcagggtgatatgactgattcaaggacgaatagcttcttacatattctagatattctcccaagattacaaaaattaccaaagtatattcttttggaaaatgttaaaggttttgaagtatcttctacaagagacctcttgatacaaacaatagaaaattgtggctttcagtaccaagagtttctattatctccaacctctcttggcattccaaattcaaggctacgatattttcttattgcaaagcttcagtcagagccattaccctttcaagcccctggtcaggtactgatggagttccccaaaattgaatctgtacatccacaaaaatatgcaatggatgtagaaaataaaattcaagaaaagaacgttgaaccaaatattagctttgatggcagcatacagtgttctggaaaagatgccattctttttaagcttgaaactgcagaagaaattcacaggaaaaatcaacaagatagtgatctctctgtgaaaatgctaaaagattttcttgaagatgacactgacgtgaaccagtatcttttaccaccaaagtcattgctgcgatatgctcttctgttagacattgttcagcccacttgtagaaggtccgtgtgctttaccaaaggatatggaagctacatagaagggacagggtctgtgttacagactgcagaggatgtgcaggttgagaatatctacaaatcccttaccaatttgtcacaagaagaacagataacaaagctgttaatacttaaactgcgatatttcactcctaaagaaatagcaaatctccttggatttcctccagagttcggatttcctgagaagataacagtgaaacagcgttatcgcctacttggaaatagtctcaacgtgcatgtagtagctaaactaatcaaaatcttatatgaataattttgaaataactctgaaagatggtcatatgatattccttcattttcagagagtaattctgaaattctgttttgaactaattctggtgaaatttaactaaattattttaatctgtccttattaagaaatttggattttattaaaaaaatccatgtgtttcatcaaatttatattactgtattttataaaatacgaactattgttatgctttatggagagtatattttcatatgaaactgataaatatatatgtggaatattctttttaaaaacaattttataaacaaatcaaggagcactagagctttagtgtctacatgagtatcttgtgaagtgtcataacaggcataacatatttttatgttaattaaagaagttttttatttctaattttaaaataatgattctaattctagcccattgaatgttttacttaatttccaatcctgtaaatatttctttatttcatctaaacaaatgcatatgatatgtaaaccaaattatcatcattcagtttatacagcagactgaagaatatgtcaggaaaaataatcctaaatgtttgattacctctccatgaagcggccacagaaactgttggtgcacattatctacattttcctcagcctctatctgaaggacaaaactcatttttccttcttcattttgtatgtactttcctttagttgactattatcaaagcttgtttttgtcttctcagcttctgagttgaatttgcctttgcacgctgaggaatgtagcatgacgttaagatttcagggaggaagctgccctctgatcccatgtcatatgacagtactcccctccccccagttgttctttattgtagcaacatacactctcaatgaacttttatgacttttaactttctctgtctctcttcctcagcagacctcttggaattagggtttctaatcaaactaagtcttgcatcataaattctatggtttgtgataaaagcaagtgacaaagagaagagagatgaaaagaaacaagtccagaaatcatattacaagattttaattcaaatttttcttcttaaaaatcagctatttagaggtggataaattggaagtttgtgcattgcttgtgggaacgtaaaatggttcagctgctgttggaaaacgctatggaggttcgtcacaaaattcaacatagaattaccctatgattcagcgattccacctctggctatagatccaaaagaattgaaagcagggacttgaacagatatttgtacaccagtgtttataacaccattatttacagtagccaaaaggtagaagcagcccaagtgtcatcccattcacccatgaatggatgcaggaattgtgttccgtgcatgcagtggaatagtaccagccttccgcaggaaggaaattctgacatatgcggtgacatggatgaaccttgagtacattatgcgaagtgaaataagccaccctgtggggatggagaatgggtagttagtgcataatggatacaaagtttctgattggggtgatgagaaagttctggaggtggatggggaggatggttgcacaacagtgtgagtgtacttaatgccactgcaactgtatatttaaaaatagttaaaatgataaattttacattatgtatattttactgcaattgaaaaaatcatactctattaccaatttttcagaactcatagataaatatgaatgtagggaagctgtaagccagcccatatacagaaactatcactatctacatttttcatatgtgttcagacagagcctattacaagtctcataaatttcagtaaacaatcacaaattattttggcacactttcatgtaggttctgttcactgctgaaatattctaaataaaatggtttagagttttactgtaactatgaataattatgctataattatagtatcccacattcggttgagcaacattatacaaaataagtgtcgagttactgtgcaccaactataaatacttgaaaggtctgtagagacatttgcttacaaactggtagacagaatgtagcttagtggaattcttaaattatgggaatgtattcacaggaagacggtgattcttgcccttaattcataattgaaaatatgcagtaacaagcataaaactcacatcttaatgaagatgtatctaccagtgtcattcaattagcagatgtatatgtatgcataattaatttggaaaatgttattttatggaatgtctgctatatgcttttggtaataatgctgtatataaaatttgcactggaaattctgtttcctgataaaaaaaaaaaaa

SEQ ID NO: 12900 - DNA, 1513 bp, Homo sapiens
gccgggcgctccatggccgcgccgtaacggggacccagccgcctccccgcccagcccagcccagcccttccgcccgcccaggatggaggcgcccgccagcgcgcagaccccgcacccgcacgagcccatcagcttcggcatcgaccagatccttaacagcccggaccaggacagcgcacccgccccgcggggccccgacggcgccagctacctgggagggccccccgggggccgtccgggcgccacatacccgtctctgcccgcctcctttgcgggcctcggcgcgcccttcgaggacgcgggatcttacagtgtgaacctgagcctagcgcccgcaggcgtgatccgggtgccggcgcacaggccgctgcccggggccgtgccaccgcctctgccaagcgcgctacccgccatgccctccgtgcccacggtctccagccttggcggtctcaatttcccctggatggagagcagccgccgcttcgtgaaagaccgcttcacagcggcggccgcactcacgcccttcaccgtgacccggcgcatcggccacccctaccagaaccggacgccgcccaagcgtaagaagccgcgcacgtccttttcccgggtgcagatctgcgagctggaaaagcgcttccatcgccagaagtacctggcctctgccgagagggcggcgctcgccaagtccctcaaaatgacggacgcgcaggtcaagacctggttccaaaaccggaggaccaagtggcggcggcagacggcggaggagcgggaggcggagcggcagcaggcgagccggctcatgctgcagctgcaacacgacgccttccaaaagagcctcaacgactccatccagcctgacccgctctgtctgcacaactcgtcactctttgctctgcagaatctgcagccctgggaggaggatagttccaaggttcccgctgtcacctccctggtgtgagcccaccagcgcgcaccgtcgccacggatcgccgcccccacccagccgggcgccccggaccccccaggagggctgcgggggaaccggcgccgagaggggaaggggccgcctagcccgagtaggccccagggcgcggccacagactggcgggccgcggaagggggtagggcccgagctccgcgcggccgcacaatccgagcccccgccccgcgccccgtcccgccccaggcccgggcctgacaagaaagcgccttacgtttctccgccccccgcccgcaccccccgggccgggcgcctgtattatactttgtacttttgcccaaacgtgtaaataataaaaaagttttggcttttttctttagaaaccggccacctgcttcccccgcgggggccgctggaggaagggcagccgacccggccgctgggggaagtgccaggggcccggggcaccctgcgtttaggctgggtccactcttcttctttttcgttccttttatttaagtctttttatttaataaaaaagttagctatttcaaaaaaaaaaaaaaaaaaaaa

SEQ ID NO: 12901 - DNA, 2095 bp, Homo sapiens
agctagcagctggcggacgcgacccggaggcggtgggggtgcggctgagccatgcccggtggcgcggcctgagcccctccacctgctgcaatcatgaaggacagcggggactccaaggaccagcaactcatggtggcgcttcgggtccggcccatcagcgtggcagagctggaggaaggagctaccctcatcgcccataaagtggatgagcagatggtggttctcatggacccaatggaggatcccgacgacatcctgcgggcgcatcgctcccgggagaagtcctacctgttcgacgtggcctttgacttcaccgccacccaggagatggtgtatcaggccaccaccaagagcctcatcgagggcgtcatctcaggctacaatgccactgtctttgcctatggccccacaggctgtgggaaaacctacaccatgctgggcacagaccaggagcctggcatctatgttcagaccctcaacgacctcttccgtgccatcgaggagaccagcaatgacatggagtatgaggtctccatgtcctacctggagatctacaatgagatgatccgggacctgctgaacccctccctgggctacctggagctgcgggaggactctaagggggtgatccaggtggccggcatcaccgaagtctccaccatcaatgccaaggagatcatgcagctgctgatgaaggggaaccggcagaggacccaggagcccacggccgccaaccagacgtcctcccgctcccacgcggtactgcaggtgaccgtgcgccagcgcagccgggtcaagaacatcttgcaggaggtgcggcagggccgcctgttcatgatcgacctggctggctcagagcgcgcctcgcagacacagaatcgtgggcagcgtatgaaggagggggcccacatcaaccgctcactgctggcactgggcaactgcatcaacgccctgagcgacaagggtagcaacaagtacatcaactatcgcgacagcaagctcacccggctcctgaaggactctctgggaggaaacagccgcacagtgatgatcgctcacatcagtcctgcgagcagtgccttcgaggagtcccggaacaccctgacctacgccggccgggccaagaacattaagactagggtgaagcagaacctcctgaacgtctcctaccacatcgcccagtacaccagcatcatcgctgacctgcggggcgagatccagcgactcaagcgcaagattgatgagcagactgggcggggccaggcccggggccggcaggatcggggtgacatccgccacatccaagctgaggtccagctgcacagcgggcagggtgagaaggctggcatgggacagcttcgggagcagctcgccagcgccttccaggagcagatggatgtgcggaggcgcctgctggagctggagaaccgcgccatggaggtccagattgacacctcccgacacctgctcaccatcgccggctggaagcacgagaagtcccgctgggccctcaaatggcgggaggagcagcgaaaggagtgctacgctaaggacgacagcgagaaggactcagacacaggtgatgaccaaccagacatcctggagccacccgaggtggccgcagcccgggagagcattgcagccctggtggacgagcagaagcaactgcgcaagcagaaggtgtccagggtttggggggacaaggagagtgggtttaggggacagggtgagcaggtttgagaggcaaggcggaggggccagggtgggggtagccgtgagacttgggaactcaggccacaaatcctgtgtgactttgctaagctctttaacttctctatgcgtcacattccccacctgtaaaatgggagcagtccatggtgcagccctcatggggttgctgggaagattacataaatgcctggcacataccaaggactcaaaaaatggtaactaatgttataattagggtttttcaggctgggcacagtgactcacacctgtaatctcagcacgttgggaagttgaggtaggcagatcacttgaggccaggagttcgagaccagcctggccaacatggcgaaatcccgtctttacc

SEQ ID NO: 12902 - DNA, 3669 bp, Homo sapiens
gcccaggtaaagccatgttttcctacacttaaaaatgtaaataaatatcccttagataatctggacagcagtttcttatatagcatgtctgagcactatattttgctgggctataaaaggtttaattgttgtttattggtacaataagggattctagttactaatatctacctgtagtcaataaagcaaacattgattggttgatcgaatcattgattcattcaataggtattgattcagcaccagctatgagctaggcagagttctaggccctacagagaaaactgatatcaaactaagaaagtctttttccaagtgctacagtaggggtgggggaggagagagataacaaactggtgagcaaatgttaaacaaaatgattctagagagtgctaaatactgtgaggaagataaaatgataaaataataaagacttctgaagattggttagggtaacctcttgtagaagtatcattggagaccgaaggatgacacaccagccatctgaccatgagagaacatcattcaaggcaaaggaaacagaccaccaccaacaaaaaaagatgcactggggaatttccagtaacacttttgttagctctcttaatatctgattttttgagcactagaacactgcctctcacagaatcctagcttaaaacagcaatgaacagactagaattctaggctaaaaccaacaagatgaaatgtgactgatatgaatataaatggtgcacataagttcacaaacccaattacacagcacaaaatgatatccacgtggcttgacagctgttcatattagaaaaatctagggattctaatggactacatattggagattgctctttgctgttcctgactggaaaaaaaaatatgtagatattacccttgggcagatttcagcccaacttaaagtatcattagagctgtccaaaatggaacagcctgctttgcacatagagaactcacattgctcaactcaaaaaagagcagaaggaaggaagaaggaaggacacgtaacagggatttttacaaaaacagaattcggtatttcttggagactactttaagacagtttttggtttctgtaagtctgtgacttattacttattcctttaattccaataaaattttcttcatttttgttatttttaaaacattaagaagaaaaaaatgatattgatataaggtagatggtgaagtttagcaaaagtttagtttataatgatatctctcaaaatagcaaactgaagtttaaaattcttaagctataattttaaaggaatttagattaaacttttaatatgttgttggctaagtataatacaaaataaaaactaaataaatcttggttttgccacatattagctgtgtaatatagacaatttacttctctgttattgtttcctcagaatgagggcagtaacttgtagccgtctgaaaagattgttataagcatggagttagttgctgtatataaagcagttagaccagtacctgacaatattacatgctaagtaagtgcttgctattactgttgctgttattattaattataattgtgtgctctattctgccttcaggaattaatgaccaagttaataactgagacacctgaccagccaatcccatttctcattgaccatcttcagtctaaacaagggaaccgtggacaacttcaaagaactttgtctggatctgcagctctatgggcagaaagtgaaaaatcagaatccaaaggaacaagaagggatttcagaagctatgataaaccttggcaattaaatgcaaagaagcctaaaaaatcaaaaagtgaccttgctgtgtctaatatttctccaccatcaccggactccaaatcattgccaaggtcagtagagcatccaaagtggaactggaggactaaaccacaaagccgtgattttgatgaattgaatcacatccttcaggagagcaagaagctggggaaagcccttgagaatctctctcgaagtattgcaatttcagatgaactcgataaggaaacagtgacatttaattcttctcttctgaggccccgtgtgattggagaatggattggtagagaagaaaatgatgctgatcccctagctgctgaaatgctacagcctccaattccaagaagcaaaaatgaccaatgggaaagtgaagatagtggctctagtcctgcaggaagcttaaagatggagcctaagaacaaaggattaaaacagcagcaacagcaacataagaaactcctggccgcaatgctctctcaagattcttttgagtccatccacagccctaccccatctgtaacagaagaagatattgataatgaagatgatgcaatggaattgctggaggatcttaatgatttaagaatggagggagtaacaaccctggtaccttctgggagcaaatttaaccaaggccgtcctacttaccctgctgagcctcaggccaaggtcacactgaacatctgttcaaggtgtgccaggcttcaaggagacaacctggaagaaaggacagaagagtcactaccaatactccattctccagatgaaaaaatcccagattcattcgattccttgcctgggactgaagaagcactaatggaggagggtgacgaatttgagaaagcatctaaactaacaggacctggagaagcctccagtggagtaggacactcactgaaaaactacatggaagaagatgaatccttaaagcaattgcaggtagttcatcaaccatggatcttgccaagtgacacagaaagtgaaggagtggaagcagaacaagagaaacgttccgctgatcttcttctttgcgttccatgctcttcttgtcctacgctggtctactctggtttgtgaaacagagagaagaagttgcaagtggtccttaaagaaatgcagttattcaaatccttatgtatagttctaattttatttactatgtgtaatcatttagagaatggttatttttataatctcaataataaacaagtactatcgtagccagggggtgcccaagtatgtaatcagagaacactaatcctggcaaaggattgtggggtggtcaggaggccggctgccttttgacatggttagagtcctgggtttagattactttataaatagttattaagattaatatttgatatattaaatattgcctgattcaaataactttgcttaaaatttttctgtattttaacttgtctagggttttctacttcttctatttttataatattttctcattttttagattactaaacattctacttatccacatgtgccaagatgtgccatttaggtctctgcagaaattagctgtttggtatcatcacctgccatacatgttgtgtgcagcagtgagaagtatattctctaccactgctctttctcatgattattttctctattcctattaaaatgaataattgatatgttaattaagtaaagcaaatcaataaggaatgaaatgcatggcccaaaacatagaaaatgaaaatcgtttgaccatttatccaattattgaacccaattaagatgatccattttaaatttaatatatgctcgcttttggaatgtgttatgcattgatgttaagtgaatggatctaagtaaatctattgatatctctaaaaaaaaaaaaaaaaaa

SEQ ID NO: 12903 - DNA, 1443 bp, Homo sapiens
aaccattgtgatggtctagataagtgtacatgcttaggccttctgaagcagcatttgaagctgcagtcctgaaaaccatgcaggccggaagagtagataaagaaatatttatttgagatggcacatgtttcttcagaaactcaagatgtttcccccaaagatgaattaactgcttcagaagcctccactaggtctccattgtgtgaacacaccttccctggggactcagacttacggtcaatgattgaagaacatgcttttcaggttttgtcacaaggatccttgttagaaagtccaagttacacagtttgtgtctctgagccagataaagatgatgattttctttctctgaactttcccaggaaactttggaaaatagtggaaagtgaccaattcaagtctatttcatgggatgagaatggaacttgcatagtgattaatgaagaactcttcaagaaagaaattttggaaacaaaggctccttacagaatatttcaaactgatgctatcaaaagttttgttcgacagctcaacctttatggatttagtaaaattcaacagaattttcaaagatctgcctttctagccacctttctgtcagaagagaaagaatcgtctgtcttaagcaagttaaagttctattataatccaaatttcaagcgtggctatccccaacttttagtaagagtgaagagaagaattggtgttaaaaatgcttcacctatatctactttattcaacgaagatttcaacaagaagcattttagagcaggggctaacatggagaatcataattctgccttagctgctgaagctagtgaagaaagtttattttcagcctctaaaaatttaaatatgcctctaacaagggaatcttctgtcagacagataattgcaaattcatctgtccccattagaagtggtttccctcctccttcaccttcaacctcagttggaccatcagaacaaattgcaacagatcaacatgctattttaaatcagttgaccactattcatatgcactctcatagtacctacatgcaagcaaggggccacattgtgaattttattacaaccacaacttctcaataccacatcatatctcccttacaaaatggttattttgggctgacagtggaaccatctgctgttcccacacgatatcctctggtatcagtcaatgaggctccatatcgtaacatgctaccagcaggcaacccgtggttgcaaatgcctacgatcgctgatagatcagctgcccctcattccaggctagctcttcaaccatcaccactggacaaatatcaccctaattacaactgatctgccattaaaagaggaccagattatgaatgacaacagagactaacatttacattgacaaaaaaccctaaaaatttctgcaattatcttattgaacaataaaattgcatgtttacttct

SEQ ID NO: 12904 - DNA, 1058 bp, Homo sapiens
taagtgtacatgcttaggccttctgaagcagcatttgaagctgcagtcctgaaaaccatgcaggccggaagagtagataaagaaatatttatttgagatggcacatgtttcttcagaaactcaagatgtttcccccaaagatgaattaactgcttcagaagcctccactaggtctccattgtgtgaacacaccttccctggggactcagacttacggtcaatgattgaagaacatgcttttcaggttttgtcacaaggatccttgttagaaagtccaagttacacagtttgtgtctctgagccagataaagatgatgattttctttctctgaactttcccaggaaactttggaaaatagtggaaagtgaccaattcaagtctatttcatgggatgagaatggaacttgcatagtgattaatgaagaactcttcaagaaagaaattttggaaacaaaggctccttacagaatatttcaaactgatgctatcaaaagttttgttcgacagctcaacctttatggatttagtaaaattcaacagaattttcaaagatctgcctttctagccacctttctgtcagaagagaaagaatcgtctgtcttaagcaagatacgcttcaccaaaatgaaactttccagatcttcaacttatgaaaacaggtatttatgttgcaacttacatttaaaagatgagtcgaattactcataatccttagaagttagcttgtccgcatctgaaaattcacttttaccttgaagttcaatctgtctctgggaaagactagattggaagaataaaattcaagaatgtgatgttttagtaatggaaaagccaagagcgtcaggtggcaaaagtccttctgttactcaagaaaatgctctgaaaaattccttttctcttttttttttgtaaagattaactccacctcaccaccacaatgaggtatttttctcagcaattgacacctgtttactcagttactccctgtaactatgttatgctgtgaagtaggcaatacagttgttaaagaagaataaaaaaaaaaaaaaaaaaaaaa

SEQ ID NO: 12905 - DNA, 5597 bp, Homo sapiens
agggagcgcccgtagccagcgcccccgtaaagaaataaggaggcgcccggcttcccgcccaggcccagggccccagtgcagcctggacacagtattcaaagttttggcgtctgagcattgttatgcgttattttcaagctttgctaacggtttttaaacctttgagatgtttccattaattggaaaaacaatcatctttgataactttcctgatccttctgatacatgggaaatcactgagacaattggcaaaggaacttatgggaaagtttttaaagtattgaataagaaaaatggccaaaaagcagcagtcaaaattcttgatccaattcacgatattgacgaagagattgaagcagaatataacatcttaaaagcactttctgaccaccctaatgtggtcagattctatgggatatactttaagaaggataaagtaaatggagacaagctgtggttggttcttgagctctgcagtggaggatcagtgactgaccttgtgaaaggatttctgaagaggggtgaaagaatgagtgagcctctaattgcctatattttacatgaagcactaatgggacttcaacatttgcataacaacaaaactatccacagagatgtgaaaggcaataacattctattgaccacggaaggtggagtgaaactagtagattttggtgtgtctgcacagctcaccagtacccggcaccgtcggaacacatccgtaggaacaccgttttggatggctcctgaggtgattgcatgtgaacagcaattggataccacttatgacgccagatgtgacacttggtccctgggtatcacggccattgagctgggtgatggagatcctccactagctgaccttcatcccatgagagcactcttcaaaataccaaggaatccacccccaaaactaaggcagcctgagctatggtcagcagaattcaatgacttcataagcaagtgcttgactaaagattatgaaaagcgtccaacagtgtcagaacttttacagcataaattcattactcaaattgagggcaaagatgtgatgctacaaaaacaactaacggaattcattggcatccatcaatgcatgggaggcacagaaaaggccagacgtgaacgtattcacacgaagaaagggaacttcaaccgacctctaatatccaatctgaaggatgtagatgatttagcaaccctagaaattttggatgagaatacagtctcagagcaacttgagaagtgttattccagagatcagatctacgtctatgtgggagacatactcattgctcttaacccttttcagagtctgggtctttactccacaaagcattccaaactatatattggatcaaagagaactgccagtcctcctcacatttttgcaatggctgacttaggatatcaatctataataacatataattcagatcagtgcattgttatttctggagaaagtggtgctggaaagactgaaaatgctcatcttttagttcagcagctgacagtgcttggaaaggctaataacagaaccttgcaagagaagattttacaagtgaacaatttggtagaagcctttggcaatgcctgcactattataaatgacaattctagcagatttggaaaatacttagaaatgaaattcacctcttctggagcggtagtgggagcacagatttctgaatatctcctggaaaaatcccgagttatccaccaagctattggagaaaaaaattttcatattttttactacatttatgctggtttggctgaaaagaagaaactagcccattacaaactgcctgaaaataagcctcccaggtacctacaaaatgaccacctcagaacagtacaagacatcatgaataatagtttctataaatcccagtatgaattaattgagcaatgtttcaaagtcataggttttacaatggagcaacttggtagtatatacagcatactcgctgcaatcttgaatgttggcaacattgaattttcttctgtggcaactgaacaccagattgacaagagccacatttctaatcatacagccctggagaactgtgtttctttgctttgcattcgggcagatgagctacaagaagctctcacctcccactgtgtggtcactagaggagaaacaattatacgacccaatactgtagaaaaagctaccgatgtcagggatgccatggctaaaactttatatggacgtctctttagttggatagtcaattgcattaacagtttgttgaagcatgactcatcaccaagtgggaatggtgatgagctgagcattggcattcttgatatatttggttttgaaaatttcaaaaaaaattccttcgagcagctgtgcattaacattgcaaatgaacaaattcagtattattataatcaacatgtgtttgcatgggaacagaatgaatacctaaatgaagatgtggatgctagagttattgaatatgaggataactggcccctcttagatatgtttctgcaaaagccaatgggtttactttccctacttgatgaagaaagtagatttcccaaggccactgaccagactcttgtagaaaaatttgaaggtaacctgaaatcacaatacttctggagacccaaaagaatggaacttagttttggaattcaccattatgcaggaaaggtcctctataatgcaagtggattcttagccaaaaacagagacactcttcctactgacattgtgctacttttgaggtcatccgacaacagtgtaattaggcaactagtcaaccaccctctgaccaaaacaggtaatctgccacattctaaaactaaaaatgttataaactatcaaatgaggacttcagaaaaattaatcaacctggcaaagggcgacactggagaagccacacgtcatgccagagagacaaccaacatgaaaacacaaacggttgcatcatattttagatattccctgatggatttgttgtctaaaatggtggtgggccaacctcattttgtccgttgcatcaaaccaaatagtgagcgtcaggcaagaaaatatgacaaagagaaagttctgctacagcttcggtacacaggaattctggaaacagcaagaattcgaagactaggattctcccatcggatactttttgctaactttataaagcggtactaccttctctgctacaagtcgagcgaggagccccgcatgagccctgacacctgtgccaccattttggaaaaagctggtctcgataactgggctcttggaaaaacaaaagtgttccttaagtattatcacgtggagcagttaaatctaatgcgaaaggaagctattgacaagcttattttgattcaagcttgtgtcagagcattcttgtgttcaagaagataccaaaaaatacaggagaaaaggaaagaaagcgctataataatacagtcagctgcaagaggacaccttgtcgggaaacaaagaaaagaaattgttgacatgaaaaacacagcagtaacaaccattcaaacttctgatcaggaattcgactacaagaaaaactttgaaaatacaagggaatctttcgtgaagaaacaagcagaaaatgcaatctctgctaatgaaagattcatttcagctccaaataataaaggaagtgtatctgtagtgaagacttccactttcaaacctgaagaggaaaccaccaatgctgtggagagtaacaacagagtgtatcagactccaaaaaaaatgaataatgtgtatgaggaagaggttaagcaagaattttaccttgtagggccagaagtaagccccaaacagaagtttgtcaaagacctggaagagaacagcaatctaaggaaagtggagaaagaggaagctatgatccagagttactatcagaggtacacagaggagaggaattgtgaagagtcaaaagcagcatatctagaaaggaaggccatatcagaaaggccaagctacccagtgccttggttagctgaaaatgagacttcctttaaaaaaactttggaacctacacttagccaaaggtcaatttatcaaaatgcaaacagcatggaaaaagaaaagaagacatctgtagttacccagagtgcaccgatatgcagccaggaggaaggcagaggccgtctgaggcatgagacagtcaaagagaggcaagttgaaccagtgacacaggcccaggaggaagaagataaagcagcggtattcattcagagcaaataccggggttacaagagaaggcagcagttgaggaaggacaagatgtcttcttttaagcatcagaagattgtcacaacaccaacagaagtagcaagaaacactcataatttgtattcctatcccacaaaacatgaggaaatcaataacatcaagaagaaggataacaaagactcgaaagcaacttcagaaagagaagcatgtggtttggcaattttttcaaaacagatatcaaagttatctgaagaatatttcattctgcagaaaaaattgaatgaaatgattttgtcacagcaactgaagtcactttatctgggtgtctcgcaccataagccaattaatagacgagtttcttctcagcagtgcctctcaggtgtctgtaaaggagaggagccaaaaatattgagacccccaagacgaccccggaaacccaaaacattaaataaccctgaagactccacatactattatctacttcataagtcaatccaagaagaaaaacgaagaccaaggaaagacagtcagggaaaattattagatttggaagatttctattataaggaatttttgcccagtcgttctggaccaaaggaacatagccctagtttaagagaacgaagaccacagcaagaactccagaatcaatgtattaaggctaatgaaaggtgctgggcggcggagagccccgagaaggaggaggagagagagccagcagccaacccctacgacttcaggaggctcctgcgcaaaacctcccagcgccggcgcctcgtccagcagtcctaaccgttcaacgaggcagtcaccgccgtcggaaggcgctggagcctgcggggcagcaggggccaagcaggcactctggggctggcaccagcaggcactgaagctgcggccctgatctccgcagaggctgcctgctgcgctcggccctcaagtgcccgggccggccttcgtgctccgaaacaagagacctgggagccctcgggaaacctcccccgacgctctctctcggaactcccgcaccctcctttctcaccagcccgccagttgtggcaaccctgtccttgttcccctaatctatcactttgttctttttttttgtgactcctgtggactccactgcgcctgggatctcgccaacccctctctcatttggggtgactgaattcacagatttttttttttattggaaacggcttttcttggccaacagaacacttgctagcggttgaatcttagagaaaaaagcccgggaggggtggggagaatttcgaagatgtatttcatctcaagcttgctctttctcttcctttggttattaaggtcactaaataaaggaagtgccttggaaaaaaaaaaaaaaaaa

SEQ ID NO: 12906 - DNA, 3778 bp, Homo sapiens
ggcggcggcggcggcggcggcagctgcggcgggagaagatggtggcgctggaggcagcagcggctggagcggagctttattcccaggcttggcaccagcgctgtcactagcgccgcctgctcccgcgggcccgcggacccagctgtcaggcaagcccagtggagcaaaatgagagcgcagtgagccgggcccagcttctctcctagccgttccgactcccaccatgaaccacttggaggggtctgcggaggtggaggtgaccgacgaggcggcaggtggggaggtgaacgagtcggtggaggccgacctggagcaccccgaggtggaagaggaacagcagcagccgccgcagcagcagcactatgtgggccgccaccagcgcgggcgagccctcgaggacctccgcgcccagctcggccaggaggaagaggagcgcggggaatgcctggcgcgctcagccagcacggagagcggcttccacaaccacacggacaccgccgagggcgacgtgatcgccgcggcccgcgacggctacgatgcggagcgcgcgcaggaccccgaggacgagagcgcctatgctgtgcagtaccggcccgaggccgaggagtacacggagcaggcagaggccgagcacgccgaggccacgcaccgccgcgcgctgcccaaccacctgcacttccactcgctggagcacgaggaagccatgaatgcggcctactcaggctacgtctacacgcaccggctcttccaccgcggtgaggacgagccctactccgagccctatgccgactacggcggcctccaggagcacgtgtacgaggagataggggacgcgcccgagctggacgcacgcgacggcctgcggctctacgagcaggagcgcgacgaggcggccgcgtaccgccaggaggccctgggcgcgcggctgcaccattacgacgagcgctccgacggcgagtccgacagccccgagaaggaggccgagttcgcgccctacccgcgcatggacagctacgagcaggaggaggacatcgaccagatagtggccgaggtgaagcagagcatgagctcgcagagcctcgacaaggcagccgaggacatgcctgaggccgagcaggacctggagcgtccccctaccccggccgggggtcgccccgacagccccgggctgcaggcgccggcggggcagcagcgggcggtgggccccgcgggcggcggcgaggcggggcagcggtacagcaaggagaagcgcgatgccatctcgctggccatcaaggacatcaaggaggccatcgaggaggtgaaaaccaggaccatccgttcgccttacacccccgacgagcccaaagagcccatctgggtcatgcgccaggacattagccccaccagggactgtgacgaccagaggccgatggacggagattctccgtctcctggcagctcctcccccttgggtgcagagtcatcaagcacatctcttcaccccagtgaccctgtggaagcgtccactaataaagagtcaagaaaaagcttggcttcattcccaacctacgttgaagttccgggaccctgcgaccccgaagacttgatcgatggaatcatttttgccgccaattaccttggctccactcagctgctctcagacaaaactccttccaaaaacgtgcgcatgatgcaggcccaggaagccgtaagcaggatcaagatggcccagaaattagccaaaagcaggaagaaggctcctgaaggcgaatctcagccaatgactgaagtggatctcttcatttctacccagagaatcaaagtgctgaacgccgacacacaggagacaatgatggaccaccctctgaggaccatttcctacattgcggacattgggaacatcgttgtgctgatggcccgccggcggatgcctcgctccaactcccaggagaacgtggaagcgtcccacccatcccaggatgggaaaaggcagtacaagatgatctgccacgtcttcgagtctgaggatgctcagctgattgcacagtccatcggacaggcatttagcgtggcataccaggaattcctcagggccaatgggattaaccccgaagatctcagccagaaggagtatagtgacctgctcaatacccaggacatgtacaacgatgacctgatccacttctccaagtcggaaaactgtaaagatgttttcatagagaagcagaaaggagaaatcctaggtgtggtgattgtggagtctggctggggatccatcctccccaccgtgatcattgccaacatgatgcatggtggccctgcggagaaatctgggaagctgaatatcggtgaccagatcatgtccattaatggcaccagcctggtgggcctgcctctgtccacctgccagagcattattaagggcttaaagaatcagtcccgagtcaagctgaatatcgtgagatgtcctccggtgaccaccgtgttaatcagaagaccagaccttcgctaccagctcggtttcagcgtccagaatggaattatctgcagcctcatgcgagggggaatagctgagagaggaggcgtccgtgtggggcaccggatcattgaaatcaatggacagagcgtcgtggccaccccccacgagaagatcgtccacattctctccaatgctgttggggagattcatatgaagacaatgccagccgcgatgtacaggctgctgacggcccaggagcagcctgtttacatctgaccgcggccacacgcggtggcatgcatggaggactctcctcttcgtggttgtgtttctcgtgctgcatccctgtgtccactgagactttcccctctcgcgcccagcatttggttttacacaggaagagaagaatccacaaggacctctttactctctccgatttgcttttttttttttttttttttcaataccagggaagtttcgtatgcactcccttgaggatggagagcagccagcacccacctggtactgacccaggaccatcctggagggctttctgggtgtgtccagggggtgggctgtcactgcttgagggagaatcctcccttcccaggaggtgcagacttcttaaaaggagctcgcggggcagcaaagcagctgattcagcagtgcctaaaacccagttgctgatccctgctctctgagtttatctgtgggaatgtggtagtacccagggccagcccacgtcattaaggttatgcactgcctgccatgtagttggggcaccatacattatttcttcccagaatctctgagccaaccttaaacctcttctattgctagttctaatttcaacgtatgtgtgttttctaatacgagccttctcaccccaggataaaaggggaaataactgccttgggcaaggacaccatagtgtcacagagagcttggcaattcatggggcatctgaagctttaccaggttgtcctcaagttatcaaccattagataaacacaggcaggtactgtctgcttctctctctctcacacacacacacacacacacagtcccatttgcatatcacccttccctgctcccaccaccagtgagacaagctgaagattaggcacacagatcccctggaaacccacctctctggaaggccccttccctggcaggtggccaggcaggcgggggctgctcagcctcatcctgagagacctgccctctctgcgctgaggcccagcccctccagcaccactttggcttaaagcatcctcctcctggactcccctccctgccgaacacacatcccaggag

SEQ ID NO: 12907 - DNA, 3302 bp, Homo sapiens
gggtgcctgacagtgtggatatgacatcagccatggccagaggggcttatggcaggcctggctctgatttttgccatggaacagagggcaaggacttaccttctgagcataacgtttctgtagaaggagtggcacaggacaggagtcccgaggcaactctgtgcccccagaagacctgcccctgtgacatatgtggcctacgtttgaaagacattttgcatttggctgaacaccagacaacacatcccaggcagaaaccatttgtgtgtgaggcatatgtgaaaggctctgagttcagtgcaaaccttccccagaaacaggtgcagcagaacgtacacaaccctatcagaacggaggagggccaggcttcccctgtaaagacctgcagagaccacacatcagatcagctttccacctgcagggagggtgggaaggactttgtggccacagcagggtttctgcagtgtgaggtcactcccagcgatggggagccgcacgaggccaccgaaggtgtggtggattttcacattgcactaaggcataacaagtgctgtgaatctggggatgccttcaataacaaatccactcttgttcagcaccagagaatccacagcagagaaaggccttatgaatgcagcaaatgtggaatcttcttcacttacgccgctgacctcactcaacaccagaaagttcacaatagaggaaaaccgtatgagtgctgtgaatgtggaaaattcttcagccagcactccagccttgttaaacatcgcagggttcacaccggtgaaagccctcacgtgtgtggtgactgtgggaaattcttcagccgaagctccaacctcattcagcataagagggttcacactggtgaaaagccatatgagtgcagcgactgtgggaagttcttcagccagcgttccaacctcattcatcataagagggttcatacgggcagaagtgcccatgagtgcagtgaatgtgggaaatctttcaactgcaactccagcctaattaaacattggagagttcacactggagaaagaccttacaagtgtaacgaatgtgggaaattcttcagccacattgccagcctcattcaacatcagatagttcacactggcgagcggcctcacgggtgtggtgagtgtgggaaagccttcagccgaagctctgacctcatgaaacatcagcgagttcacactggtgagcggccttatgaatgcaatgaatgtgggaagttatttagccagagctccagcctcaatagccatcggagacttcacactggtgaacggccttaccagtgcagtgaatgtgggaaattctttaaccaaagctccagcctcaataaccaccggagacttcacaccggcgagcggccttatgagtgcagcgaatgtgggaaaaccttcaggcagaggtccaatctgaggcagcacctgaaagttcacaaaccagacaggccttacgaatgcagcgaatgtgggaaagccttcaaccaaaggcctaccctcattcggcatcagaagattcacatcagagaaaggagcatggagaatgtgctccttccctgttcacagcacacaccagagataagctctgagaacagaccttatcagggcgctgtcaactacaagttgaaacttgttcatccaagtacccaccctggggaggttccctaggaatgctagctgtgttggaagctttctggagacaagttacattctcttactgtagagtttatcagcgttttttcactgctggggttgtgatagaagccatgtcagcaccacacactgcagctctccaaagagtgtgtccaccactccactgtgctcagggaaggcagacctctcctctctctttccaatccctaaagggaattaggagtagtctgaagccttgggaagatgtcattcccgccctgtatggctggtttagccatggacatgaccagcttttggctgtgaagacctgagcagggttttgccaacagcttgttctagagaaggtttccctttttctgggacattgttggtctcatgttatgcctgtgaaggatttgtccagccttcatgttactctacacaacaacttatctcctgtgtattgccctggttcatgtgatgataatggccttatgataaagccgcctttagtcttccatgttctgatcactgtgtggggtggttcaagagcagagttaagatctaccaaactgaaggggtctccagattatcttggaggggacaggaggatggcagagaaacaactgtcaatccagatttgacctcatttgcattgccaccaaggcctcctaggaaaaattgtaggaatttatgggtataatattgtggtctgaatggcgtgaatttttatcccgaggagggggcagttgtgacaacctccagtgcatgtgggaacagcatgaattgggtcccttattcccagggggtgccccatattccccaatactgtaaagcagatgctgtttagcacctgccaaggagccatatgccctgaagttcagcattaggcaggtatctcttaactgtaagacataccaggcccagctgggaccataatttgtacagaaacactggatgtgattaatagggagtaggcgagattatagcaaaccagcagaaatggaactctgctaaatgtgcatccgtgaatgctcccttgaatgtggctgtgcaggattcagggtttgcagaaattctcaggacctcagacctctgtcctatgactaatgttactggcagagcaaataatctaaaggttttggttttgtggattaccatctccgtgctgtgcatctgaaggccagtgctgtgctggcaggaaaatagggactgagaaaaagcagatcctatactatagggactgtagtatctatgacgtagccagccattctttgctcccaaggcaagaagaaagagatgacagagtcaatatagggttgccaaatcggattttctaaaatgagtaggaagttggatttttatgtgcaacagtttcttttaatgctttgttgatatgtgattgtcatgcaataattattcatatttggtaagttttgtacatatattatgtacactcagggaaccaataccataatcatgataatgaacgtatccatcacctgcaaagctacctcatgcccctttacattccctccttgccttccctaggaaaccgttgatttacattttttactttagatttgtttgccttttctagaattaacacaattggaatcataaagtatttatactctcaaaaaaaaaaaaaaaaaa

SEQ ID NO: 12908 - DNA, 13748 bp, Homo sapiens
agcagaggagtgagtcctggccgcgtccccgtcgctagggaaaccgatgcagctggaggccgcgcgcgatgcggctcgcggaggagcgggccgcgctcgcggcggagaacgcggatggggaacccggcgccgaccgacgactgcgactcctggggacctacgtggccatgagcctgcggccggctgcgggcgcctgggagcgttgcgcggggagtgctgaggcggagcagctgctccaggccttcctgggccgcgatgctgccgaggggccgcggccgctgctggtggtgcggcccgggcccaggggcctggcaatacgccccgggctggaggtgggacctgagtcgggcctggctggcgctaaggcgctttttttccttcgcaccgggcccgagcctccagggcccgacagcttccgcggcgcagtggtctgcggggacctgcccgcggcacctctggagcacctagccgcgctgttctcggaggttgttctacccgtcctggccaatgagaagaatcgcctaaactggccccacatgatatgtgaggatgtcaggcggcacgcccacagcctccaatgtgacctctcagttatacttgagcaagtgaagggaaaaactttgctgcctcttccagcaggctcagaaaaaatggagtttgcggattccaaaagtgagacagtcttggattctatagataagtcagtcatctatgccattgagtctgcagtgatcaaatggagctaccaagtccaggtggtactcaagagagagtcttcccagccactcttacaaggggagaatcccacccctaaggtggagttggagttctggaagagcaggtatgaagatctgaaatacatctataatcaactgagaacaataacggtgaggggcatggccaagctcctggacaagcttcagagtagctactttccagctttcaaagccatgtacagagatgttgttgcagctctagcagaggcacaggacatccatgtgcacctgataccgctccagcgccacctggaagctctggagaatgcagaatttccggaggtgaagccccagctgcggcccctgctccacgtggtctgtctgatttgggccacatgcaagtcctaccgctccccgggaaggctgactgtgctgctccaggagatttgcaaccttctcatccagcaggcctctaattatctcagcccagaagacctgctgagaagtgaggtagaagaaagtcagagaaaactgcaagtggtctcagacactttgagcttcttcaagcaagagtttcaggacagaagggagaatctccacacttacttcaaagagaaccaggaagtcaaggaatgggatttccagtcttctttggtctttgtgcgattggatggcttcctgggacgactgcacgtggtggagggtcttctgaagacggccctggatttccacaaactgggaaaggtggagttcagcggcgtcagagggaatgctctgagtcagcaggtccagcaaatgcatgaagaatttcaagagatgtacaggcttctctcaggatcctcctccgactgcctgtacctccaaagcacggactttgaaaatgacgtctctgaatttaaccagaaagtagaagatcttgaccgaagattggggactatctttattcaagcttttgatgatgcacctggcttggagcatgcctttaagctgctagacatagcaggaaacctccttgaaagaccgctggtagcgagggatacatctgataaatacctggtcctcatccaaatgttcaacaaagatctggatgcagtgaggatgatctacagtcagcacgtccaggaggaagcagaacttgggttctccccggtgcacaagaacatgcccaccgtggctggcggcctccgctgggcacaggagctgaggcagcgcatccagggtcctttcagcaactttggacgcatcacacacccttgcatggaatctgcagaaggaaagcgaatgcaacaaaaatatgaagatatgctgtcattgctagaaaagtatgagacaagactttatgaggattggtgccggacagtatcagagaagtcacagtacaatctttcccaaccacttctaaaacgtgacccagagacgaaggagatcactatcaactttaacccacagctgatttcagtgctgaaagaaatgagctatcttgaacccagagagatgaaacacatgcctgagacagcagcagccatgttctcctccagggatttctatcggcagcttgtggctaatttagagttgatggcaaattggtacaacaaggttatgaaaactctgctggaggtggaatttccattagtggaggaagagctgcaaaatattgatctccgcctcagagcagcagaggagactttgaactggaaaacagaaggcatttgcgattatgtcactgaaatcaccagtagtattcatgatcttgaacaaagaattcagaaaactaaagacaatgtggaagagatccaaaacatcatgaaaacatgggtgactccaatatttaagacaaaagatggaaaaagggaatcccttctttctctggatgatcggcatgatcgaatggaaaaatattacaatctcatcaaggaatctggccttaagatccacgcccttgttcaggaaaacctgggtctattttcagcagacccaacctccaatatctggaagacttatgttaactctattgacaatttgttgctgaatggattctttcttgccattgagtgctccctcaagtatcttctggaaaatactgagtgtaaggcaggacttaccccaatatttgaagcacaactgagtctagccatcccagagctagttttctatccgtctctggagtctggagtgaaggggggtttctgtgacattgttgagggtctcatcaccagcatttttaggataccatctctggtgccacggctttccccacaaaatggctctcctcactatcaggtcgacctggacggtataccagatttggcaaacatgcggcgcacactcatggagagagtccagagaatgatgggcctctgctgtggctatcagagcaccttcagccagtattcgtacctctatgtggaggaccggaaggaggttctgggtcagtttctgctgtacgggcacatcctcactccggaagaaattgaagaccatgtggaagatggcatcccagagaaccctcccctcctttctcagtttaaagtgcaaatcgactcctatgaaacgctctatgaagaggtgtgcaggctggaacccatcaaggtgtttgacggctggatgaaaattgatattcgaccctttaaggcatctctgctgaatattattaagaggtggagcctcctgttcaaacagcatcttgtggaccacgtcactcacagcttggccaacctggacgcgtttataaagaagagtgagagcggcttactcaagaaagttgaaaaaggagatttccaaggcttggttgagatcatgggacaccttatggctgttaaagaacggcagagtaacactgatgagatgtttgagcccttaaagcagactattgaattgctgaagacctatgaacaagaattgccagaaacagtgtttaagcagctggaggagctgcctgagaaatggaacaacataaaaaaggtggccattactgtgaagcagcaggtggccccactgcaggcaaatgaagtgacactcctccgccagaggtgcacagccttcgatgcagaacagcagcaattctgggagcaattccacaaagaagccccgttcaggtttgatagcatccaccctcatcaaatgctggatgccaggcacatcgagatccagcagatggaatccactatggcctccatttctgagtctgccagcttatttgaagtcaatgtccctgactataagcagctgaggcagtgcaggaaggaggtctgccagctgaaggagctctgggacaccattggaatggtgacctccagcatccatgcctgggagaccacaccctggaggaatatcaacgtggaagccatggagttggagtgcaaacagtttgcccggcatatccgaaacctggacaaggaggtcagggcctgggatgcattcacaggcctggaaagcactgtgtggaacacgctgagctccctgagggcagtagctgagctgcagaatccagccatccgggagcggcactggaggcagctgatgcaggccaccggtgtgagcttcactatggaccaggacaccaccctagcgcacctgctgcagctccagctgcaccactatgaggatgaggtccggggcattgtggacaaagctgcaaaagagatgggtatggagaaaaccttaaaggagctgcagactacctgggctggcatggaattccagtatgagccccacccacggaccaatgtccccctcctgtgctctgatgaggacctcatagaggttctggaggataatcaagttcaacttcagaacctggtgatgtccaagtatgttgctttcttcttggaggaggtgtcgggctggcagaagaagctgtccacagtggacgctgtcatctctatctggtttgaagtgcagcgaacatggactcacctggaaagcatattcactggatctgaagatattcgggcacagctaccccaggattctaaaaggtttgaaggcatcgacattgactttaaagagctagcttatgatgcccagaaaattccaaatgtagtgcaaaccaccaacaagccaggcctgtatgaaaagctggaggatattcagggcagattgtgcctgtgtgagaaggccctggcagagtacctcgacaccaagaggcttgccttcccgcggttttactttctctcctcctccgatctgttagacatcctttccaacggcacagctccacaacaggttcaacgtcacctttccaaactctttgacaacatggccaagatgcgattccagctagatgccagtggggaaccaaccaagacaagcctcggcatgtacagcaaagaagaggagtatgtggctttcagtgagccctgtgactgcagcgggcaggtagaaatatggctgaaccatgtccttggtcacatgaaggccactgtgaggcatgagatgacagaaggtgtaactgcctatgaagaaaagccgagggagcagtggctttttgaccacccagctcaggtggccctgacctgtactcagatctggtggacaacagaagtgggcatggcatttgccaggctggaggaaggctatgagagtgccatgaaggactattataagaagcaagtggcccagctcaaaacccttatcaccatgctgattggccagctctccaagggagaccggcagaagattatgactatatgcaccatcgatgtgcatgcccgggatgtggtagccaagatgattgctcagaaggtagacaatgcccaggctttcctctggctgtctcagctgcgccatcgttgggatgacgaggtcaaacactgctttgccaacatctgtgatgcccagtttttgtattcctatgagtacctgggaaacacacctcgcttggtgatcacacctttgactgacaggtgctacatcaccctcacccagtccctgcacctgaccatgagtggggctcccgcaggacctgcaggcacaggcaagaccgagaccaccaaggacctgggccgcgcactgggcatcctggtctatgtgttcaactgctcggagcagatggattacaagtcttgtggcaacatctacaaaggccttgctcagactggtgcctggggctgctttgatgagtttaatcgaatctccgtggaggtcttgtcagtggtggcagtgcaggtaaaaagcattcaagatgcgattagagataagaagcagtggttcagcttccttggggaggagatcagcctgaatccttctgtcggtatcttcatcaccatgaacccaggctatgctggccgcacagagctgccagagaatctcaagtctctcttcaggccttgtgcaatggtggttccagactttgaattgatctgtgaaatcatgctggtggcagaaggattcattgaagcccagtcattagccagaaagttcatcactctttaccagttgtgcaaagagcttctctccaaacaggatcactacgactggggcctacgggccatcaagtccgtgctggtggtggcaggatccctgaagagaggagaccctgaccggcctgaggaccaggtcctgatgcgctccttgcgggatttcaacatccccaagattgtgactgatgacatgcccatcttcatgggcctgatcggggacctctttcccgccctggatgtcccccggaggagagaccccaacttcgaagctttggttaggaaggcgatagtggatctgaagctccaggctgaggacaactttgtgctcaaggtggtccagctggaggagctcctggctgtgcggcactctgtatttgtggtgggtggcgctggtaccggcaagtcacaggtgctgaggtccttgcacaagacctatcagatcatgaaacggcgccccgtctggactgacctcaatcccaaagcagtcacaaatgatgagctctttggcatcatcaatccagccacaggagaatggaaggatggattgttctcttccatcatgcgggagcttgccaacatcacccatgatgggcccaagtggattttactggatggcgacatagatccaatgtggattgaatccctgaatactgtcatggatgataacaaggtgctgacattggccagcaatgagaggattcctctgaaccccaccatgaagctcctctttgagatcagccacctgcgcacagccactccagcaactgtctctagagcagggatcttgtacatcaacccggcagacttgggatggaaccctccagtgagcagctggattgagaagagggaaatccagacagagagagccaacttaaccattttgttcgacaagtatcttccaacctgcctagacacactcagaaccaggtttaagaagatcattcccatcccagagcagagcatggttcagatggtgtgtcaccttctggaatgtctcctgaccacggaggacatccctgcagactgccctaaggaaatttatgagcattattttgtgtttgctgccatctgggctttcggcggagcaatggtccaagatcagcttgtggactaccgggcagagttcagcaaatggtggctgactgagttcaaaacagtcaagtttccttcccaaggaaccatctttgactattacatcgacccagagaccaagaaattcgagccttggtccaagctcgtcccccagttcgaatttgaccccgagatgcccttgcaggcgtgtttggtgcacacgagtgagaccatccgtgtgtgctacttcatggagcggttgatggcgcggcagcggcctgtcatgctggtgggcacggctggcactggcaagtcggtgctggtgggagctaagctggccagccttgaccccgaggcatacctggtgaaaaacgtgccattcaactactacaccacgtcagcaatgctgcaggctgtcctggagaagcctctggaaaagaaggctggcagaaactatggccctccagggaacaagaaactcatctatttcattgatgacatgaacatgcctgaggtggatgcctacgggacggtgcagccccacaccatcatccggcagcatctggactatggccactggtatgatcggagcaagctgtccctaaaggagatcacaaatgtacagtatgtttcctgtatgaaccccacggcaggcagcttcaccatcaacccccggcttcagcgtcacttcagcgtgtttgtcctctccttcccgggggcagatgccctgtcctctatctacagcatcatcctcactcagcatctgaagctcggaaacttcccggcgtccctgcagaaatccatccccccactgatcgatctggccctcgccttccaccagaaaattgctaccaccttcctacccacaggaatcaaattccactacatcttcaacctcagagattttgccaacattttccagggcattctcttctcctcagtggaatgtgtgaaatccacatgggatcttataaggctctatctgcatgaatcaaatcgagtttatcgggataagatggtagaagaaaaggactttgatctttttgataaaatccagacagaagtgctcaagaaaacttttgatgatattgaagaccctgtggagcagacccaaagcccgaacctgtattgtcactttgcaaatggtattggggagcccaaatacatgcctgtacagtcttgggaacttttgacccagactctggtggaggccttggagaaccacaatgaagtcaacacagtgatggacctagttctctttgaggatgccatgcgccatgtctgccatatcaatcgcatcttggagtccccgcggggaaatgctctgctggttggtgtaggtgggagcggcaagcagagcctgacaaggctggcagctttcatcagctccatggatgtcttccagatcacactgcgcaaaggctaccagatccaggacttcaagatggacctggccagcctgtgtctgaaagctggagtgaagaatctcaacacagtgtttctcatgactgatgcccaagtggctgatgagaggttccttgtgctcatcaatgatcttttggcatctggggagatcccagatctctactctgatgatgaagttgaaaacatcataagcaatgtgaggaatgaagtcaagagccagggtctggttgacaacagagagaactgttggaagttctttatagatcggatccggcgacagctgaaggtgactctctgtttctcccctgtgggaaacaagctaagagtccgcagcaggaagttcccagccattgtgaactgcacagccatccactggttccacgagtggcctcagcaagcattggagtctgtcagcctccgcttcttgcagaacacagagggcattgagcccacagtaaagcagtcgattagcaaattcatggcctttgtccacacaagtgtcaaccaaacatcccagtcttatctgagcaatgaacagcgctacaactatacaactcccaagtcctttctggagttcatcagactctaccagagcttgttgcacaggcacagaaaagagctcaagtgcaagacagagcggttggagaacgggctgctgaagctgcatagcacctctgcccaggtggatgatctgaaagcaaagctggctgcccaggaagtagagctgaagcagaaaaatgaagatgcagacaaactgattcaggtcgtgggtgtggagactgacaaagtgagcagagagaaagccatggcagatgaagaggagcagaaggtggccgtcatcatgctagaggtgaaacagaagcagaaggactgtgaggaggacctggcaaaggctgagccagcactcacagcagcgcaggcagctctcaacaccctgaacaagaccaacctgacagagctgaagtcatttggctctccgcctctggccgtcagcaatgtcagcgctgcggtgatggtactgatggctcccaggggtagggtgcccaaggaccggagctggaaggctgctaaggtcaccatggccaaagtggatggcttcctggactcgctaataaacttcaacaaagagaacattcacgagaactgcctcaaagccatcaggccgtatctgcaagacccggagttcaatcctgagtttgtggccaccaaatcctatgcggctgcaggcctctgctcctgggtcatcaatattgtgagattttatgaggtgttctgtgatgtggaacccaagcgccaggcactgaacaaagccaccgcggacctcacagctgcccaggagaagctggctgccatcaaagccaagatcgctcaccttaatgaaaacctggcaaagctcacagccaggtttgagaaagcaacagcagacaaactcaaatgtcagcaagaagccgaagtgaccgcagtcaccatctcccttgccaaccgcctggttggaggactcgcttctgaaaacgtgaggtgggcagatgccgtgcagaacttcaaacagcaggaaaggacgttatgtggagacattttacttataacggctttcatttcctaccttggcttcttcacaaagaaataccggcagagcctcctggacagaacttggaggccctacctgagccagctgaaaactcccattccagtcaccccagccctggatcccctgaggatgctgatggatgatgctgacgtggctgcctggcagaacgagggcctcccagccgaccgcatgtccgtggagaatgccaccattctcatcaactgtgagcgctggccactcatggttgaccctcagctacaaggcatcaaatggatcaagaataaatatggtgaagatctccgggtcacgcagattggtcagaaaggctaccttcaaatcatagagcaggccctggaagctggagctgtggtgctgattgaaaatctagaggagtccattgatcctgttctgggacccctgcttgggagagaagtcattaaaaaaggacgattcattaaaattggagacaaagaatgtgaatacaatcccaagttccggctcatcctccacaccaagctggctaatcctcactaccagcctgagctgcaggctcaggccaccctgatcaacttcaccgtgaccagggatggcctggaggaccagttgctggccgctgtggtcagcatggagaggccagacttggagcagctgaagtccgatctcacaaagcagcagaatggattcaaaattaccctgaaaacgctggaagacagtcttctctctcgcctctcctccgcctctgggaacttcctgggagaaacagtgctggtggaaaacctagagatcaccaagcagactgctgccgaagttgagaaaaaggtccaggaggccaaggtgactgaagtgaaaatcaacgaggcccgagagcactaccggccagcagctgccagggcctcactgctctacttcatcatgaacgacctcagcaagatccatccaatgtaccagttttctctcaaggccttcagtatcgtcttccagaaggctgtggagagggctgctcctgacgaaagcctcagggagcgggtggccaacctaatagacagcataaccttctctgtgtaccagtacaccatccgcgggctctttgagtgtgataagctgacctaccttgcccagctcacctttcagattctcctcatgaaccgagaagtcaatgcagtggagttggatttcctgcttcgatctccagtgcagacgggcaccgccagccccgtggagttcctctcccatcaggcgtggggagctgtcaaggtactttcatcaatggaagaattctctaatctggatcgggacatagagggatctgctaagagctggaaaaagtttgtggagtccgaatgtcctgagaaagagaagctcccacaggagtggaagaacaagacagccctgcagcgcctctgcatgctgagagccatgcggcccgaccggatgacctatgctttgcgagattttgttgaagagaagttaggaagcaaatacgtggtgggaagagccctagattttgcaacctcatttgaagaatcgggaccagccactcctatgtttttcatcctgtctccaggggtggacccactgaaggatgtagaaagtcaaggaagaaaacttggatacaccttcaacaatcagaactttcacaacgtgtctttggggcaaggacaggaagtggtggctgaggctgcgctggacctcgctgccaagaaaggtcactgggttattttgcagaacattcacctggtggccaagtggctcagcaccctggagaagaagctggaggagcacagtgagaacagccacccagagttcagggtcttcatgagtgcagagccagcaccctcccctgagggccacatcatcccccagggcatcctggagaactccattaagatcaccaatgagccccccacgggcatgcatgccaacctgcacaaggccctggacaacttcactcaggacactctggagatgtgttctcgggagacggagtttaagagcatcctctttgctctttgttacttccatgcggtggtggcagaaagacgaaaatttgggccccagggatggaatcgctcatacccctttaacactggagacctcactatctctgtgaatgtcctctacaacttcctggaggccaacgcaaaggtcccctatgatgatttgcgctacctgtttggagagatcatgtatggaggccatatcacagatgactgggacagaagactctgcagaacctacctgggggaattcattcgaccagaaatgttagaaggagaactgtctttggccccagggttcccactcccaggcaacatggactacaatggttatcatcagtacatcgatgctgagctgcccccagaatccccctacctctatggcctccacccgaacgcagagattggcttcctgacccaaacctcagaaaagctcttccgcactgtgctggagctgcagcctcgggacagccaggccagagacggagcgggcgccacaagagaagaaaaggtcaaggcacttctggaagaaatattggagcgggtgacagacgagtttaacatcccagaactgatggccaaagtggaggagcgcaccccttacattgtagttgccttccaggagtgtggccggatgaatatcctcaccagagagattcagcgctcactgagggagctggagctcggcttaaagggggagctgactatgaccagccacatggagaacttacagaatgccctgtacttcgatatggtgccagagtcctgggctagacgagcctacccttccacagcaggcctggcagcctggtttccagacctcctcaacagaatcaaggagctagaggcttggacgggtgactttacaatgccctccactgtgtggctgacaggcttcttcaacccccagtcgttcctgactgccatcatgcagtccacggctcgcaagaatgagtggccactggaccagatggccctgcaatgtgacatgacgaagaagaacagagaagagtttaggagtcctcctcgggaaggggcctacatccatggcctcttcatggaaggtgcctgctgggacacacaggctgggatcattacagaggcaaagctgaaggatctgacaccccctatgcctgtgatgttcatcaaggccattcctgcagataagcaggactgccgcagtgtctattcctgtcctgtgtacaagactagtcagcggggacccacctacgtgtggactttcaacctgaagactaaggaaaacccatccaagtgggttctggctggagtagccttgcttctccagatttagcatcctgcagagccaccgagaaaataaaaaagctgggcttggaggctgcctagagggacaggtgggtgaagggtcaccacagacacttagaacggtaagaaaccatgagcactcacaattctgtagaattcctctagggaacttggagaggtgtgcctaaggtgaggctgagctgaaggaatgtgggcccaggtttcttaataaaatgatttactcttc

SEQ ID NO: 12909 - DNA, 4149 bp, Homo sapiens
ggaggcgacggtggagacggctgccctagtgggagaggcggcggcggcggccgaggaggaggagggggaagcggcggcggcaaaggaaaatgcttggacagaagagatgagtactatttccactaaggcctagaattgcctactgtacaaatagtcctgatcaggcaatatacgaatggcccaaggaagccaccaaattgattttcaggttttacatgacctgcgacaaaaattccctgaagtacctgaagttgttgtatccaggtgcatgttacagaataataataacctggatgcctgctgtgctgttctctctcaggagagtacaagatatctttatggtgaaggagacttgaatttttcagatgattctggaatttctggtctacgcaatcacatgacttctctcaacttggacttgcaatcacagaacatttaccaccatggaagagaaggaagtaggatgaatggaagtaggactctaacgcacagcattagtgatggacaacttcaaggtggccagtccaatagtgaactatttcagcaggagccacagacagcaccagctcaagttcctcaaggctttaatgtttttggaatgtccagttcctctggtgcttcaaattcagcaccacatcttggatttcacttaggcagcaaaggaacatctagcctttctcaacaaactcccagatttaatcccattatggtaactttagccccaaatatccagactggtcgtaatactcctacatctttgcacatacatggtgtacctccacctgtacttaacagtccacagggaaattctatctatattaggccttacattacaactcctggtggtacaactcgacagacacaacagcattctggctgggtatctcagtttaatcccatgaaccctcagcaagtttatcagccttcacagcctggtccctggactacttgtcctgcatctaatcctctgtcacatacctcatctcaacagccaaatcagcaaggccaccagacctctcatgtctacatgccaatcagttcacctactacttcacaaccaccaaccattcattcatctggtagctcacagtcttctgcccatagccaatataacattcagaatatttcaacaggacctcgaaaaaaccagattgaaatcaaacttgaacccccacaaagaaataattcttcaaaactgcgttcttctggacctcgaacctccagcacttcctcttcagtcaatagccagaccttaaacagaaatcagcccactgtttacatagctgccagccccccaaatacggatgagctgatgtcccgtagtcaacctaaggtctatatttcagcgaatgctgccacaggagatgaacaggtcatgcggaatcagcccacactcttcatatccacaaactctggagcatctgctgcctccaggaacatgtctgggcaagtgagcatgggtcctgcctttattcatcaccatcctcccaaaagtcgagcaataggcaataactctgcaacctctcctcgagtggtagtcactcagcccaatacgaaatacactttcaaaattacagtctctcccaataagccccctgcagtttcaccaggggtggtgtcccctacctttgaacttacaaatcttcttaatcatcctgatcattatgtagaaaccgagaatattcagcacctcacggaccctacattagcacatgtggatagaataagtgaaacacggaaactgagtatgggatctgatgatgctgcctacacacaagctcttttggtacaccagaaggccagaatggaacgacttcaaagagaacttgagattcaaaagaaaaagctggataaattaaaatctgaggttaatgaaatggaaaataatctaactcgaaggcgcctgaaaagatcaaattctatatcccagataccttcccttgaagaaatgcagcagctgagaagttgtaatagacaactccagattgacattgactgcttaaccaaagaaattgatctttttcaagcccgaggaccacattttaaccccagcgctattcataacttttatgacaatattggatttgtaggtcctgtgccaccaaaacccaaagatcaaaggtccatcatcaaaacaccaaagactcaagacacagaagatgatgagggagctcagtggaattgtaccgcctgtacttttttgaaccatccagccttaattcgctgtgaacagtgtgagatgccaaggcatttctgagccaaatggccctgtatcttctctaaaaccacatctaaagttcaagaaactagtctgtcatcgggaaaaagtttcactgctacataggattttgtcaaattgaaggtgtgacaagatggtgttctgctaatgttaaatgtcagcccacagagctaataatacctcagtataatgtcatgagcagttgaaattcatcacatgaaaagtaatctgctgaaagacttggttgcccactgcctaactgtgtacagtgttaccagtgtcccattatggataattctcaatatgttaacacctaggtgttcccaatacctttttcccctcatgtcactactgaattttgacaggaggaaggaatagaatgatagcttgttttatttgtaaagctttcagtgaaacactacatacacgaagaaaaggaacaaggtttaactatttaagaaccatttgctgccgcatagtgccattggatagggaagaacttcagaaatctgtggtactcttggccttgtctttgtcttccctgaacgtgtctccactctgtgaagccagcatctaggggctaaagatgcaaaggaaagcagcatgcattgtctgtacaaatgtgcagcgaaataccccaaagcttttcctactgtacagatctctcgagtctgctttaagtgatttcttttcttcttgattattttcttatatttctatatgtatagtgtaatagccttttgttaactaattttcttttttccttttagtaattaagcacgatcatgtccctttttaagccttacctgagaggaacaatgccttaaaataaaaaagcattaatgagatgaaagtatgcacagaataactttcctctacttattctgtactttgccctcatgagttccaatgttgtgtgaagacaggcagatgctgcacagtgaattgcagatgatattacagaagtgatgtctgtaggtcacattaaatactgacttgagcagtgggtgacacaacacagtgtttgtcttccacagggaagcttaaaacaaaagatatttttaacccactgacagaacaacaaggttaagcttcatctgcttggtgtcccacagaacttgcacaagcagttgttattgggaaagtacagtctcaaaaccagcaacagcagcagtacctacagccctttttttggagagaagtttaaatgctttactgttggggcagtccatttctaatcctgacttggtgacagtatcatgtgtatttataaaacaaggctagccatatttaggacaactgaagaaaagctggaaaaaaaaacaagcaaacttgaacactgaagcaacctcaagcatctctttattttgatgatatatttttgtaaggaaaatattcagatgatcaggaatgtatataactgaaatcaagaaaaagaacagtatgcatttaaaaagacagaattatgaaattatatgagtgcttagaatggggctaagggaagtgctgaaatagagcaaaggatggaagataatatagactaccacccactgtaaatgtttgcaagtggctgtgttttaaatgggattattacagttgatctctatgaatgtcagagccctaactttcaggctttgcattttgtatatgggaagaaatatgacaatcctaggtaattaaaccatagacccaaagcccttacgtttgatgcaatttatttttaaaataggccttgtttttcagcttcatctgcagttctatgtgaagattgataaatcagtttttacttgttttattaataaaacgtaatttggatatcttgagttgatggttttgtgatttagctgggtaaactatctttgtaacagataagttatttataaaaattaaaaaacttatattctaatgtg

SEQ ID NO: 12910 - DNA, 1337 bp, Homo sapiens
gtggtcgagccgcgcgcagggtgcgctcgtttgaactgcggtgacaccgagggttggggactcgaacccccgcttcgcagctcaggagcctgaggtccgaaagcttcgttccagagcccagcatgaatggatacgcggaatttccgcccagccccagtaaccccaccaaggagcccgtggagccccagcccagccaggtcccactgcaggaagatgtggacatgagcagtggctccagtggacatgagaccaacgaaaactgctccacggggcgggactcgcagggcagtgactgtgacgacagtgggaaggagctggggatgctggtggagccaccggatgcccgccagagtccagatacctttagcctgatgatggcaaaatctgaacacaacccatctacaagtggctgcagtagcgaccagtcttcgaaagtggacacacacaaagaactgataaaaacactaaaggagctgaaggtccacctccctgcagacaagaaggccaagggcaaggccagtacgctggccaccttgaagtacgccctcaggagcgtgaagcaggtgaaagccaatgaagagtattaccagctgctgatgtccagcgagggtcacccctgtggagcagacgtgccctcctacaccgtggaggagatggagagcgttacctctgagcacattgtgaagaatgccgatatgtttgcggtggccgtgtccctggtgtctgggaagatcctgtacatctctgaccaggttgcatccatatttcactgtaaaagagatgccttcagcgatgccaagtttgtggagttcctggcgcctcacgatgtgggcgtgttccacagtttcacctccccgtacaagcttcccttgtggagcatgtgcagtggagcagattcttttactcaagaatgcatggaggagaaatctttcttttgccgtgtcagtgtccggaaaagccacgagaatgaaatccgctaccaccccttccgcatgacgccctacctggtcaaggtgcgggaccaacaaggtgctgagagtcagctttgctgccttctgctggcagagagagtgcactctggttatgaagcccctagaattcctcctgaaaagagaatttttacaaccacccatacaccaaattgtttgttccaggatgtggatgaaagtcctgcagtcaggcgggcagcctttcgactattctcccattcggtttcgcgcccggaacggagagtacatcacgttggacaccagctggtccagcttcatcaacccatggagcaggaaaatctccttcatcattgggaggcacaaagtcagggtgggccctttgaatga

SEQ ID NO: 12911 - DNA, 6219 bp, Homo sapiens
gtggtcgagccgcgcgcagggtgcgctcgtttgaactgcggtgacaccgagggttggggactcgaacccccgcttcgcagctcaggagcctgaggtccgaaagcttcgttccagagcccagcatgaatggatacgcggaatttccgcccagccccagtaaccccaccaaggagcccgtggagccccagcccagccaggtcccactgcaggaagatgtggacatgagcagtggctccagtggacatgagaccaacgaaaactgctccacggggcgggactcgcagggcagtgactgtgacgacagtgggaaggagctggggatgctggtggagccaccggatgcccgccagagtccagatacctttagcctgatgatggcaaaatctgaacacaacccatctacaagtggctgcagtagcgaccagtcttcgaaagtggacacacacaaagaactgataaaaacactaaaggagctgaaggtccacctccctgcagacaagaaggccaagggcaaggccagtacgctggccaccttgaagtacgccctcaggagcgtgaagcaggtgaaagccaatgaagagtattaccagctgctgatgtccagcgagggtcacccctgtggagcagacgtgccctcctacaccgtggaggagatggagagcgttacctctgagcacattgtgaagaatgccgatatgtttgcggtggccgtgtccctggtgtctgggaagatcctgtacatctctgaccaggttgcatccatatttcactgtaaaagagatgccttcagcgatgccaagtttgtggagttcctggcgcctcacgatgtgggcgtgttccacagtttcacctccccgtacaagcttcccttgtggagcatgtgcagtggagcagattcttttactcaagaatgcatggaggagaaatctttcttttgccgtgtcagtgtccggaaaagccacgagaatgaaatccgctaccaccccttccgcatgacgccctacctggtcaaggtgcgggaccaacaaggtgctgagagtcagctttgctgccttctgctggcagagagagtgcactctggttatgaagcccctagaattcctcctgaaaagagaatttttacaaccacccatacaccaaattgtttgttccaggatgtggatgaaagggcggtccctctcctgggctacctacctcaggacctgattgaaaccccagtgctcgtgcagctccaccctagtgacaggcccttgatgctggccatccacaaaaagatcctgcagtcaggcgggcagcctttcgactattctcccattcggtttcgcgcccggaacggagagtacatcacgttggacaccagctggtccagcttcatcaacccatggagcaggaaaatctccttcatcattgggaggcacaaagtcagggtgggccctttgaatgaggacgtgtttgcagcccacccctgcacagaggagaaggccctgcaccccagcattcaggagctcacagagcagatccaccggctcctgctgcagcccgtcccccacagcggctccagtggctacgggagtctgggcagcaacgggtcccacgagcaccttatgagccagacctcctccagcgacagcaacggccatgaggactcacgccggaggagagccgaaatttgtaaaaatggtaacaagaccaaaaatagaagtcattattctcatgaatctggagaacaaaagaaaaaatccgttacagaaatgcaaactaatcccccagctgagaagaaagctgtccctgccatggaaaaggacagcctgggggtcagcttccccgaggagttggcctgcaagaaccagcccacctgctcctaccagcagatcagctgcttggacagcgtcatcaggtacttggagagctgcaatgaggctgccaccctgaagaggaaatgcgagttcccagcaaacgtcccagcgctaaggtccagtgataagcggaaggccacagtcagcccagggccacacgctggagaggcagagccgccctccagggtgaacagccgcacgggagtaggtacgcacctgacctcgctggcactgccgggcaaggcagagagtgtggcgtcgctcaccagccagtgcagctacagcagcaccatcgtccatgtgggagacaagaagccgcagccggagttagagatggtggaagatgctgcgagtgggccagaatccctggactgcctggcgggccctgccctggcctgtggtctcagccaagagaaggagcccttcaagaagctgggcctcaccaaggaggtactcgctgcacacacacagaaggaggagcagagcttcctgcagaagttcaaagaaataagaaaactcagcattttccagtcccactgccattactacttgcaagaaagatccaaggggcagccaagtgaacgaactgcccctggactaagaaatacttccggaatagattcaccttggaaaaaaacaggaaagaacagaaaattgaagtccaagcgggtcaaacctcgagactcatctgagagcaccggatctggggggcccgtgtccgcccggcccccgctggtgggcttgaacgccacagcctggtcaccctcagacacgtcccagtccagctgcccagccgtgccctttcccgccccagtgccagcagcttattcactgcccgtgtttccagcgccagggactgtggcagcacccccggcacctccccacgccagcttcacagtgcctgctgtgcccgtggacctccagcaccagtttgcagtccagcccccacctttccctgcccctttggcgcctgtcatggcattcatgctacccagttattccttcccctcggggaccccaaacctgccccaggccttcttccccagccagcctcagtttccgagccaccccacactcacatccgagatggcctctgcctcacagcctgagttccccagccggacctcgatccccagacagccatgtgcttgtccagccacccgggccaccccaccatcggccatgggtagggcctccccaccgctctttcagtcccgcagcagctcgcccctgcagctcaacctgctgcagctggaggaagcccctgagggtggcactggagccatggggaccacaggggccacagagacagcagctgtaggggcggactgcaaacctggcacttctcgggaccagcagccgaaggcgcctctgacccgtgatgaaccctcagacacacagaacagtgacgccctttccacgtcaagcggcctcctaaacctcctgctgaatgaggacctctgctcagcctcgggctctgctgcttcggagtctctgggctccggctcactgggctgcgacgcctccccgagtggggcaggcagtagtgacacaagtcataccagcaaatattttggaagcattgactcctcagagaataatcacaaagcaaaaatgaacactggtatggaagaaagtgagcatttcattaagtgcgtcctgcaggatcccatctggctgctgatggcagatgcggacagcagcgtcatgatgacgtaccagctgccttcccgaaatttagaagcggttttgaaggaggacagagagaagctgaagctcctacagaaactccagcccaggttcacggagagtcagaagcaggagctgcgcgaggtccaccagtggatgcagacgggcggcctgcccgcagccatcgacgtggcagaatgtgtttactgtgaaaacaaggaaaaaggtaatatttgcataccatatgaggaagatattccttctctgggactcagcgaagtgtcggacaccaaagaagacgaaaatggatcccccttgaatcacaggatcgaagagcagacgtaacccctgccccacctcagcccggcagccagcgaggtacaccaggtggtgcttggaagagatgaaagatcttcatggctgtttccactgaaatggacacatatgctcatgttgctttttttgttttagaaaaaaaaacaacatagttttctgaaggggcgacttaaaactgtggagagtggggagagttcggaaagaaatatgtttttatatataaaatatatatgtggagttttgtgggatggggaagagattttagttgttatttaacttgagaaagactaagcgcctcttagtgtcagggaagttgcctcagtgctcccagaagtcctgtgactgtgacgagacctctgtctgctgcaccagctggggactctggcttccagagctttcccagggtgtttggatcagatcaaattttgtcctctcttggggactgctttttatctgaattatcatttagtcaaggtagagtgtttttttatacataccaaatggagatagcagcctctcctagttttatttcaaaacgtttcacattaaatggtgtgaagcgttgtttggcaaaccaacagctttggcttctggtgtggtcaatatttcagtctgacataggttttgtttgtagtgaacaaagttgaaacatttgctctggactaaagaagcctagtggtttgtgtggccaactccatcggatgaatgcacacgcagacagaccctctgtatatttctgcattattcttgtctccttttcagaccatgatggccaatatggagattaaaatatgtcatcagtcatctctttatggtgacttccctttgcaaaccaggctgtgaccaacacatgtgagacccagtcctgtttggttttcttccgttggaaccacccagacatctgcttccacccagccaagcccacatcacatctcctggccgagagcagccactgccactcagtctgacagcttgcgactgcatctgtattttcaggggtgcagtgagctcacctctcccactgcaccctgggttgggtgcacagccctcattcttttcatgagcccgacctctctcggagcagcttcaggcctctgccagtgtccccagcacttttaggtcatttggacacttggggaaaagtgaggccagtctgcccggctttttacaaaacctcatgttgcattgtatattccaaagatggttcagaaaatttaatattggtccctggtggaaattcaaagttatcactgaagaacagttgacttaaaattggaccaagactatgaggcttaaaagggaccagggttttctttttttttttttttttttttttttttagatggagtttctttttgcccaggctggagtgcagtggcgccatcttggctcactgcaacctctgcctcccaggttcaagcgattctcctgcctcagcctcctgagtagctgggaccacaggcgactgccaccacacccagctaattttttgtatttttagtagagacagggtttcaccatgttggccaggctggtctcgaactcctgacctcaagcgatccacccacctcggcctcccaaagtgctgggattacaggcgtgagccaccacgcccaactgggaccagggttttctgttttttgatggaggtgaaatctctttgtaatccactaggttttcatcgtaaaaccatcttatgcctgactattaaacctattcttcataaacacaagaacactttaatttttcgttaatttacaaagtaacatcagctgcctatgcctatgataaggtagcagtctgcattcttatggccattagatgttacaaactccttgcctctaaagtcagatcatgaagggataggtgttcatctaaggttacagttatgttaccgaaacacaaaactgccaaaatcttactctgctgttatgaatgtttaccatcagcattattttatcatttaatatgtgctcactgattgttaactgtagcttcagcgcgtgccaagcagttgacttaataggatcatcttgtgaatttgtttacgtgatgccaagcatcaagtcatgttttctttagtgtgtgtgcttacacaggtgttaaacagtttttctctattttaaactgagccttctttttaatatattcccgaagagatatgtaaataagctctcagagtttctgtgatgatttgttgagccttgctggacaagtggtttgtttgtgtgcaaaccaaactttctttacccagtgcaatagatttgtttgactgcttgtgtctttttatgacctgtttgccttttagaaaattggtaaataaagcaagtatattttt

SEQ ID NO: 12912 - DNA, 2273 bp, Homo sapiens
agtgcccgcgcagcgttgagttgcacagcggtattctcaccaggccctgcaatcggtgggccacagtgccggccacagagatggtggaaggaccaggctgtactctgaatggagagaagattcgcgcgcgggtgctcccgggccaggcggtgaccggcgtgcggggaagcgctctgcggagtccgcagggccgcgccttgcggctcgcagcctccacggttgtggtctccccgcaggctgctgcactgaataatgattccagccagaatgtcttgagcctgtttaatggatatgtttacagtggcgtggaaactttggggaaggagctctttatgtactttggaccaaaagctttacggattcatttcggaatgaaaggcttcatcatgattaatccacttgagtataaatataaaaatggagcttctcctgttttggaagtgcagctcaccaaagatttgatttgtttctttgactcatcagtagaactcagaaactcaatggaaagccaacagagaataagaatgatgaaagaattagatgtatgttcacctgaatttagtttcttgagagcagaaagtgaagttaaaaaacagaaaggccggatgctaggtgatgtgctaatggatcagaacgtattgcctggagtagggaacatcatcaaaaatgaagctctctttgacagtggtctccacccagctgttaaagtttgtcaattaacagatgaacagatccatcacctcatgaaaatgatacgtgatttcagcattctcttttacaggtgccgtaaagcaggacttgctctctctaaacactataaggtttacaagcgtcctaattgtggtcagtgccactgcagaataactgtgtgccgctttggggacaataacagaatgacatatttctgtcctcactgtcaaaaagaaaatcctcaacatgttgacatatgcaagctaccgactagaaatactataatcagttggacatctagcagggtggatcatgttatggactccgtggctcggaagtcggaagagcactggacctgtgtggtgtgtactttaatcaataagccctcttctaaggcatgtgatgcttgcttgacctcaaggcctattgattcagtgctcaagagtgaagaaaattctactgtctttagccacttaatgaagtacccgtgtaatacttttggaaaacctcatacagaagtcaagatcaacaggaaaactgcatttggaactacaactcttgtcttgactgattttagcaataaatccagtactttggaaagaaaaacaaagcaaaaccagatactagatgaggagtttcaaaactctcctcctgctagtgtgtgtttgaatgatatacagcacccctccaagaagacaacaaacgatataactcaactatccagcaaagtaaacatatcacctacaatcagttcagaatctaaattatttagtccagcacataaaaaaccgaaaacagcccactactcatcaccagagcttaaaagctgcaaccctggatattctaacagtgaacttcaaattaatatgacagatggccctcgtaccttaaatcctgacagccctcgctgcagtaaacacaaccgcctctgcatcctccgagttgtgaggaaggatggggaaaacaagggcaggcagttttatgcctgtcctctacctagagaagcacaatgtggattttttgaatgggcagatttgtccttcccattctgcaaccatggcaagcgttccaccatgaaaacagtattgaagattggacctaacaatggaaagaatttttttgtgtgtcctcttgggaaggaaaaacaatgcaattttttccagtgggcagaaaatgggccaggaataaaaattattcctggatgctaatatctgtagattctctggcatttagtctcttcaaactgtgtataatgtttggtcctcctctgtttcatagaaaagtcatagaatatctatgatacattgaaaagttactgcaatatttgagaactgttctttttttttcttgtgtgtgccatctttccattgttggctacgtcttttcttttgccttgatgaacgttctatgtatttcatcggatatacagcatattccatttaggatgtgtatttaatgcatttagtaatgacgataaagtgtttttagtatgcttttagtctcttgtaactggggagaagcagtgttttttttttaggaaaggattatgcgacacaataaaataagatattctgtctgtagtg

SEQ ID NO: 12913 - DNA, 4692 bp, Homo sapiens
gggaagcagccgtcggcggctgccctgagccttcctggggaaggaggagggaggtaggcgcagagcgcggtccacgcctgctcgccccgaaccatgggaagatgagacaggaatctgtgccatccaaattgcttgatccagtgaatctgctaggaaaggtctctgaggcccccgtctgctgactgcatgacaaaccctaaaggaaatgccaatcgtgatggcccgggacctggaggaaacagcatcatcctcagaggatgaggaggtcataagtcaagaggatcatccatgcatcatgtggactggaggctgcaggagaattccagttttggtattccatgccgacgctattcttacaaaggacaacaatattagagtaattggagaacgttatcatttgtcttataagattgtacgaacggacagtcgcctagtacgcagcattctgacagcccatggatttcatgaagttcacccaagcagcactgactataacctaatgtggacaggatcccacctgaagcccttcttactgcgcaccctctctgaagcacaaaaagttaatcactttcccaggtcttatgaacttacccggaaggaccgactgtacaaaaacattattcgaatgcagcatacacatggattcaaggcttttcacatcctcccccagaccttcctcctgccagctgagtacgcggaattttgtaattcatattcgaaggaccggggaccttggatagtaaaaccagtggcatcttcaagggggcggggcgtctacctgatcaacaatccaaaccagatctccctggaagagaacattttggtctcccgttacattaacaaccccctgctcatagatgatttcaagtttgacgtgcgcctctatgtgctcgtgacttcctatgatcctcttgtcatctatctctatgaagaaggattggctaggtttgcaactgtgcgatatgatcaaggagccaagaacattcggaaccagttcatgcatctgacaaactacagtgtcaacaagaaaagtggagattacgtcagttgtgacgatccagaagtggaggattatggaaacaaatggagcatgagtgctatgcttaggtacctgaaacaagaaggcagagatacaaccgcattgatggcccatgtagaagacctgatcattaagactataatctctgctgaactagctattgctactgcctgtaaaacctttgttcctcatcgcagcagttgttttgaactctatggctttgacgtgctcatagattctactctgaagccatggttgttggaagtgaatctctctccttctttggcctgtgatgcgcctctggacctaaagattaaagccagtatgatttcagatatgttcactgttgtaggatttgtgtgccaagatcctgcccagcgggcatcaactcggccaatttatcccacctttgagtcttccaggcgaaaccctttccagaaacctcagcgttgccgtccactctctgccagtgatgcggaaatgaaaaacctcgtgggctcagcccgggagaaagggccagggaagttgggtggttctgtgcttggtctgtcaatggaggagatcaaagttttacgaagggtgaaggaggagaatgatcggcgaggtggatttattcgcatatttcctacatctgagacatgggaaatatatgggtcctacctcgagcataagacctcaatgaactatatgctggcaacacgcctcttccaggacagaatgactgctgatggagcgccagaattgaagatagagagtctgaattcaaaggccaagctgcatgctgcactttacgagaggaagctcctgtctctggaggtgcgaaaacgtagacgacggagtagcagattgagggcaatgaggccaaaatacccagtgattacccaaccagctgaaatgaatgttaaaactgagacagagagtgaagaggaggaagaagtcgcattagataatgaagatgaagaacaggaggcttcccaggaggagtctgcaggatttcttagagaaaatcaagccaaatatacaccctcattgacagctttggtagaaaatacacccaaagaaaattccatgaaagttcgtgaatggaataataaaggtggacactgctgcaaacttgagactcaggagctagagcctaaatttaacctgatgcagattcttcaagataatggcaatcttagcaaaatgcaggcccgaatagcattctctgcctatctccagcatgttcaaattcgcctgatgaaagacagtggcggtcagacgttcagtgccagttgggctgccaaagaggatgaacagatggagctggttgttcgtttcctcaagcgagcatcaaataacctccagcattcactgaggatggtattacccagtcgacgattggcacttctggaacgcagaagaatcctggcccaccagctgggtgactttatcattgtatacaacaaggaaacagaacaaatggctgaaaagaaatcaaagaagaaagttgaggaagaagaggaagatggggtgaatatggaaaactttcaggagttcatcagacaagcaagtgaggctgaactggaggaggtgttgactttttatacccaaaagaacaagtctgctagtgtcttcctggggactcactctaaaatttctaagaacaacaacaattattctgatagtggggcaaaaggtgatcaccctgagactataatggaagaagtgaaaataaagccacctaaacagcaacagacgacagaaattcattctgataaattatctcgatttaccacttcagcagaaaaagaggcaaaattagtttatagcaattcctcctctggtcctactgctactctgcagaaaattcccaacacccatttgtcatctgttacaacctctgacctctctccagggccttgccaccattcttctttatctcaaattccttcagctatccccagcatgcctcaccagccaacaattttactgaacacagtctctgccagtgcttctccctgcctacatcccggggcacagaacatcccaagccctactggcctgccacgctgtcgatcaggaagtcacaccattggtcccttttcttccttccaaagtgctgcacacatctatagccagaaactgtctcgtccctcttcagcaaaggcaggatcgtgctatctaaacaagcatcattcaggaatagccaaaacacaaaaagagggagaagatgcttctttatatagcaaacggtacaaccaaagtatggttacagctgaacttcagcggctagctgagaagcaggcagcgagacagtattctccatccagccacatcaacctcctcacccaacaggtaacaaacctgaatttggcaactggcatcataaacagaagcagtgcttcagctcccccaaccctccgacccatcatcagtcctagtggcccgacatggtctacacagtcagacccccaagctcccgagaatcactccagctctcctggaagcaggagcctgcagacagggggatttgcctgggaaggagaagtagaaaacaacgtgtacagccaggctacaggggtggtcccccagcacaagtatcaccccacagcaggcagctatcagcttcaatttgccctgcagcaacttgaacaacaaaaacttcagtcccggcagctcctggaccagagtcgagcccggcaccaggcaatctttggcagccagacactacctaactccaatttatggacaatgaataatggtgcaggttgtagaatttccagtgccacagctagtggccagaagccaaccactctgccacaaaaagtggtaccacctccaagttcttgcgcctccctggttcccaaacccccacccaaccacgaacaagtgctcagaagggcaacatcccagaaagcttccaaagggtcctccgcggaagggcagctgaatggactccagagcagccttaaccctgcagcctttgtgcccatcaccagctctacagatcctgctcacactaaaatatgaaccacaaacacacagagaaacaacctgttcaccactcctgggtgcatgattgagggtgaagcatccaccagcacttcaaggggtccatagtatttttttttttgctgcctcaaagtccccaaagccttcgagcagaagtggcagtagatggttgccaatcagccaatgcagactttcactgggacaacaagaaagcagatcttctgggttttgatggaacttggcagtggggacattcagctgatgcattatataccccgtcagagcacacttgtatcttttaccttccctttgccccatgcccccaaactgcttaggtcttctctgtccctttactgctgctgcacagagatgatataaaagaggctctttggctatttgcattttgcttcctcttcttttccagattacagtatgaagctttattttctttgtacaagcttaaaatttcaacatcatcatccgccaaagttgttcctcccttttcggaggatctagggggaaagaggagcattcatcacaagtttcctagagagaggagacaaatcggtgtgccattgacaacatgagccagggtaaaggcaccctttggaattactgatttcaaagattaataaagtaattctatttttaaaaaaaaa

SEQ ID NO: 12914 - DNA, 1344 bp, Homo sapiens
gagctccagcctccaggcacccgggatccagcgccgccgctcataacacccgcgaccccgcagctaagcgcagctcccgacgcaatggacccggcgctggcagcccagatgagcgaggctgtggccgagaagatgctccagtaccggcgggacacagcaggctggaagatttgccgggaaggcaatggagtttcagtttcctggaggccatctgtggagtttccagggaacctgtaccgaggagaaggcattgtatatgggacactagaggaggtgtgggactgtgtgaagccagctgttggaggcctacgagtgaagtgggatgagaatgtgaccggttttgaaattatccaaagcatcactgacaccctgtgtgtaagcagaacctccactccctccgctgccatgaagctcatttctcccagagattttgtggacttggtgctagtcaagagatatgaggatgggaccatcagttccaacgccacccatgtggagcatccgttatgtcccccgaagccaggttttgtgagaggatttaaccatccttgtggttgcttctgtgaacctcttccaggggaacccaccaagaccaacctggtcacattcttccataccgacctcagcggttacctcccacagaacgtggtggactccttcttcccccgcagcatgacccggttttatgccaaccttcagaaagcagtgaagcaattccatgagtaatgctatcgttacttcttggcaaagaactcccgtgactcatcgaggagctccagctgttgggacaccaaggagcctgggagcacgcagaggcctgtgttcactctttggaacaagctgatggactgcgcatctctgagaatgccaaccagaggcggcagcccacccttcctgcctcctgccccactcagggttggcgtgtgatgagccattcatgtgttccaaactccatctgcctgttacccaaacacgcctctcctggcagggtagacccaggcctctaaccatctgacagagactcggcctggacaccatgcgatgcactctggcaccaaggctttatgtgcccatcactctcagagaccacgtttccctgactgtcatagagaatcatcatcgccactgaaaaccaggccctgttgccttttaagcatgtaccgctccctcagtcctgtgctgcagccccccaaatatatttttctgatatagaccttgtatatggctttaatgccgcaaaatatttatttttccttaaaaaaggtgtcaacttggaaataatggtttaaaaacaggataagcattaaggaaaaacaaaaaaaaaaaaaaaaaaaaaaaaaaaaa

SEQ ID NO: 12915 - DNA, 3411 bp, Homo sapiens
cttctcttgtgtaatcagctgcctatttggaaattgggcagggtttgcgactggatgctaatgtcactgactagttttcagcctaccatccagaagtaacatgttcccagctttggaaacgcacctaaagcagactattcctgatccttatgaagactttatgtaccgtcacctccaatattatggctactttaaagctcagagaggcagtttaccaaactctgctacgcatcagcatgttcggaagaataaccctcaatgcctgttgaatggctctcttggggaaaaagatgatttgataccagacaccctgcaaaaggagaagcttctatggcctatcagtttatcttcagctgtgcacagacagatagaagccatcaacagagactttcactcttgcctgggctggatgcagtggcgcggcctcagctcactgcaacctccacctcccagattcaaggattctcctgcctcagctttccgagtagctgggattacagattcacatatgctgagtttaccacatcttaggagcagacagcttctttatgatgagttggatgaagtaaacccacgtcttcgagaaccccaagagctcttttccattttgtctaccaagaggccactgcaggctccaagatggccaattgaatgtgaggtcatcaaggaaaacatccatcatattgagtgggctccacctcaaccagaatatttctatcagcctaaaggaaatgaaaaggtaccagagattgtaggagagaaaaaaggaacagttgtctatcaattagattcagtgcctatagaaggttcctattttaccagttccagagtgggaggcaaacgaggaattgtcaaggaacttgctgtcacgttgcaaggaccagaagataatactctactgtttgaatcaaggtttgagagtgggaatctgcaaaaagctgtcagagtagacacctatgagtatgaactcaccttgcgaactgacctctacactaacaaacacactcagtggttttattttcgtgttcagaacaccagaaaagatgctacctatcgcttcaccattgtcaacttgctaaaacccaagagtctttatactgtagggatgaagccactcttgtactcccaattggatgccaacacccgcaatattggctggaggagagaaggaaatgaaatcaagtactacaagaacaacacggatgatgggcagcagcccttctactgtctcacgtggaccattcagtttccatatgaccaggacacttgcttctttgcacacttctacccatatacatacactgatttgcaatgctacctcctgtcagtggcaaacaaccctatccagtctcagttctgcaagctccaaactttatgcaggagcctagcaggaaataccgtttacttgctcaccatcaccaacccatcccagacccctcaagaggcagctgcaaagaaagctgtggtcttgagtgccagagttcaccctggagaaagtaatggctcctgggttatgaaaggctttttggacttcatccttagcaactccccagatgcccagctcctcagagatatttttgtcttcaaggtgcttcccatgttaaatccagatggtgtgattgtggggaattatcggtgttccttggccggaagggatttgaacaggcattataaaaccattctgaaggagtctttcccttgtatttggtacaccaggaacatgatcaaaagacttcttgaagaaagagaggttctgttgtattgtgatttccatggccacagtcgtaagaataatatcttcctgtatggctgtaataacaacaatcgcaaatactggcttcatgaacgagtctttcctttaatgttatgcaaaaatgcaccagataagttctcttttcacagttgtaattttaaggtccaaaaatgcaaagaaggaacaggacgagttgttatgtggcggatgggaatcctaaacagctacaccatggagtctacctttggcgggtccaccctgggtaataaaagagacacccactttaccatcgaagatctgaagtccttaggttatcatgtctgtgacacccttctggacttttgtgatcctgaccaaatgaagttcactcagtgtctagcagagcttaaggagcttttacgacaggaaatccacaagaaattccatgaacttggacaagatgtagatttagaaggaagttggagtgacatctctttgtctgacattgaatccagcaccagtggctctgacagttctctctcagatggtcttcctgttcacctagcaaacatagcagatgagctgactcagaaaaagaagatgtttaagaagaaaaaaaagaagtcacttcagactaggaaacagcgaaatgagcagtatcagaaaaaaaatttgatgcagaagttaaagttaacagaagatacctcagaaaaggcaggatttgcttctactctgcaaaagcagccaacctttttcaaaaactcagagaattccagttttttaccaatgaaaaatgaaaacccaaggttaaatgagacaaatttaaatagaagagacaaagacacccccctggacccatcaatggccaccctgattctgcctaagaataaagggagaatgcagaataagaagccaggctttacagtatcatgctctccaaagagaaccataaactccagccaagagccagctccaggtatgaagccaaactggcctaggagcagatatcctgccacaaagagaggctgtgctgccatggcggcatacccatccttgcacatatacacatacccgtaggtgagcctgggctgtgccacacaagcacttcatcgggggttttgagattagacacattttataatgggggagatgtatgactgggaactgcatttacttgtggtatactgtgttgtgcactcatgcactgaccttacactttgtacttacactgtgggcatgtggtcaagatgcatacctcatgaattcaactattttttcataaaatgaaattttattatgatgtgtaaaaatgctttatcagaaactgaagtgtgttctcatggcacacttcatggcagcacagatatacctcattttaaccaatagatattctctctaaaattatgtgcaaatcaatttttaaaaatcaaaatctatgttaaacacattttggcagtgtgctataataaaaaaaagtgttgtgtcaaagctttctagtgacggtcagtcctactgctgtatgtcaggtttgctcacaatgaggtattcccacatagaaataacaatgcatgtattacccagaatttaatgttgcgtaccttatgttcaatgaggttttgtaatttttttaggctgatgattaaaattctttctctctaaaaaaaaaaaaaaaaaaaaaa

SEQ ID NO: 12916 - DNA, 5372 bp, Homo sapiens
acagcttgcaacactcggcatcttttctggaggcgcctccttcagcagccgcagatggcatccggctgcgggctcggggctcgcaattgattctcccccttgcccacctcgagtccacggacgcacctctcccttcccctcctcccttcgcgcttctgggtctgagcccagctcgcgaccgccgggcagaggatcagtcgcggcggccgaggctgagcagcagcgctctcgctccctgacctggggagaagcgcccacccgggagagctgatccccggctgcctccagcgccccccaccttttgcactccaagccgggggctccagagaccccgctccccaggcgccactatgctggacccttcgtccagcgaagaagaatcggatgagatcgtggaggaggagagcggcaaggaggtgctcggctcggccccgtccggcgcgcgcctgtctcccagccgtaccagcgagggctcggccggcagcgccgggctggggggcggcggcgccggcgccggagccggggtgggtgcaggcggcggcgggggcagcggcgcgagcagcggcggcggggccggggggctgcaacccagcagccgcgctggcggcggccggccctccagccccagcccgtcggtggtgagcgagaaggagaaggaagagttggagcggctgcagaaagaggaggaggagaggaagaagaggctgcagctgtatgtgttcgtgatgcgctgcatcgcctacccctttaatgccaagcagcccaccgacatggctcgccggcagcagaagatcagcaaacagcagctgcagacagtcaaggaccggtttcaggctttcctcaatggggaaacccagatcatggctgacgaagccttcatgaacgctgtgcagagttactatgaggtgttcctgaagagcgaccgtgtggcccgcatggttcagagtggaggctgttccgccaacgactcccgggaggtcttcaagaagcacattgagaagagagtgcgcagcctgcctgagattgacggcctcagcaaggagactgtgctgagctcctggatggccaaatttgatgccatctaccgtggagaagaggacccgcggaagcagcaggcccggatgacagccagcgcagcctccgagctgattctgagcaaggagcaactctatgagatgttccagaacattcttgggatcaagaagttcgaacatcagctcctttacaatgcctgccagctggacaatccagatgagcaagcagcccagatcagacgagagctggatggacgtctacaaatggcagaccaaatagccagggaacgcaaatttcccaagtttgtatccaaagaaatggaaaacatgtacattgaggagctgaagtcatctgtcaacctgctcatggccaacttggagagcatgccggtatccaaaggcggggagttcaagctccagaaactcaaacgcagccacaatgcttccatcatcgacatgggcgaggagagtgagaaccagctctccaagtcagatgtcgtgctgtctttctcattggaggtggtaattatggaagtccaaggcctcaaatctttggctccaaatcgcatcgtatattgcacaatggaggtggaaggaggagagaaactacagactgatcaggccgaggcttctaaaccaacctggggcacccagggtgacttctccacaacccatgcactgccagctgtgaaggtgaagctgttcacagagagcacaggcgtcctggcgttggaggacaaggagcttgggcgggttattctccatcccaccccgaacagccccaaacagtcagagtggcacaaaatgacagtctccaaaaactgccccgaccaagatctcaaaatcaaacttgctgtccgaatggataagcctcaaaacatgaagcattctgggtatttatgggccatcggtaagaatgtctggaagagatggaagaaaaggttttttgtattggtgcaggtcagtcagtacacgtttgccatgtgcagttatcgggagaagaaagcggagcctcaggaacttctacaattggatggctacactgtggattacaccgacccccagccaggtttggagggtggccgagccttcttcaatgctgtcaaggagggagacaccgtgatatttgccagtgacgatgaacaagaccgcatcctgtgggtccaggccatgtatcgggccacggggcagtcacacaagcctgtgcccccgacccaagtccagaaactcaacgccaagggaggaaatgtacctcagctggatgcccctatctctcaattttacgcagatagagctcaaaaacatggcatggatgaatttatctcttccaacccctgtaactttgaccacgcttccctctttgagatggtacaacgccttactttggatcacagacttaatgattcctattcttgcctgggctggttcagtcctggccaggtgtttgtactagacgagtattgcgcccgaaatggagtccgggggtgtcaccgacatctctgctacctcagagacttgcttgaacgggcagaaaatggcgccatgatcgaccccacccttcttcactacagctttgccttctgtgcatcccatgtccatgggaacaggcctgatggaattggaactgtgactgttgaagaaaaggaacgttttgaagaaatcaaagagaggctccgagttctgctagaaaatcagattacacattttaggtattgctttccatttggtcgacctgaaggtgctttgaaagctactctctcactcttggaaagggttttgatgaaagatattgttaccccagtgccacaagaggaggtaaaaacagttatccgtaaatgtctggaacaggctgcgttagtcaactattctcggctctcagagtatgccaaaatcgaagggaaaaagagagaaatgtatgagcatcctgtcttctgcttggcctcccaagtgatggatttaaccattcaaaatgtaggccggttaatcactcctgccaaaaagcttgaagatacaatacgtcttgctgaactagtcattgaagttcttcagcaaaatgaggagcaccacgcagaggcctttgcgtggtggtcagatttaatggtggagcatgcggagacgttcctgtcactctttgcagtagacatggatgcagccttagaggtgcaacctccagacacatgggacagttttccactatttcagctgctgaatgattttctccgtactgactataatttgtgcaatggaaaatttcacaaacacctgcaagacctgtttgccccacttgttgttagatatgtggatctgatggagtcctcaattgcacaatccattcacaggggctttgagcgggagtcatgggaaccagtcaataatgggtcaggcacctcagaagatctgttttggaaacttgacgcccttcagaccttcattcgggacctgcactggcctgaagaagagtttggaaagcacctggaacaacggctgaagttgatggcaagtgacatgatcgaatcttgtgtcaaaagaaccaggattgcatttgaagttaagctgcaaaaaaccagtcgatcaacagattttcgagtcccacagtcaatatgcaccatgtttaatgttatggttgatgccaaagctcaatcaacaaaactttgcagcatggaaatgggccaagagcatcaataccattcaaaaatagacgaactaattgaagaaactgttaaagaaatgataacactcttggttgcaaagttcgttactatcttggaaggagtgctggcaaaattatccagatatgacgaagggactttgttttcttcttttctgtcatttaccgtgaaggcagcttccaaatatgtggatgtacctaaacccgggatggacgtggccgacgcctacgtgactttcgtccgccattctcaggatgtcctgcgtgataaggtcaatgaggagatgtacatagaaaggttatttgatcaatggtacaacagctccatgaacgtgatctgcacctggttgacggaccggatggacttacagcttcatatttatcagttgaaaacactaattaggatggtaaagaaaacctacagagatttccgattgcaaggggtcctggactccaccttaaacagcaagacctatgaaacgatccggaaccgtctcactgtggaggaagccacagcatcagtgagtgaaggtgggggactgcagggcatcagcatgaaggacagcgatgaggaagacgaagaagacgattagaccatttggtcctagagtctgctgggacagagtcctgtaatcagtgcatgtccttagtctgttagttaaacccattaggaattttctgtcaactaccatgcccatgagatgtttatcaatacaactgccattttagctatgtggtaccaagattagcaaatgaccttcatatccactgatttcctgatgtccatgtctatatgtttacaagcaatatggagcaccattctttaaatactgttcatggagaatacatagtctaaccactaggcgtgtccctgttatcagcaaagatcaatgatgcttcattcatgtactatgtatgcattggtggtaaatggatgtgagggcaagtacatcaagtacattcactctgtttcacgtatgtggatgccagttaattaaatgagtacgtaaataaattaattaaaacacatagatctgctttgtgtttttatttttattttttgaaaaacaaaaggcaagtctccaacaattaacttttgatgctttctgttcccctaaaaccaaaaaatgaaccccttgtgtcgttgttaacccatcctttcatttactcatataattagccaaaaaaaaaaggatggctacataccaatggattgattctcttaattgccacggcaagggggcgatcctatcatgacttaacatcaagcgcgcagttcaaaactactgtcttctgtcaaagttttctcctcttaaatgttattttgcttttacgtctcaactgtgtatgtaaaaaaaacgaatatttaaattacaaccctagactaaaaatgtgtttataataagatgtggatatttccttcagtagattgtaaccataatttaaattattttgttccacactgttttttatatctgtcatgtacattgcattttgatctgtaactgcacaaccctggggtttgctgcagagctatttctttccatgtaaagtagtggatccatcttgcttttgccttatataaagcctacagttatggaagtgtggaaaactgtggcttctcaataaatattcagatgtcctaagaatataaaaaaaaaaaaaaaaaa

SEQ ID NO: 12917 - DNA, 5489 bp, Homo sapiens
acagcttgcaacactcggcatcttttctggaggcgcctccttcagcagccgcagatggcatccggctgcgggctcggggctcgcaattgattctcccccttgcccacctcgagtccacggacgcacctctcccttcccctcctcccttcgcgcttctgggtctgagcccagctcgcgaccgccgggcagaggatcagtcgcggcggccgaggctgagcagcagcgctctcgctccctgacctggggagaagcgcccacccgggagagctgatccccggctgcctccagcgccccccaccttttgcactccaagccgggggctccagagaccccgctccccaggcgccactatgctggacccttcgtccagcgaagaagaatcggatgagatcgtggaggaggagagcggcaaggaggtgctcggctcggccccgtccggcgcgcgcctgtctcccagccgtaccagcgagggctcggccggcagcgccgggctggggggcggcggcgccggcgccggagccggggtgggtgcaggcggcggcgggggcagcggcgcgagcagcggcggcggggccggggggctgcaacccagcagccgcgctggcggcggccggccctccagccccagcccgtcggtggtgagcgagaaggagaaggaagagttggagcggctgcagaaagaggaggaggagaggaagaagaggctgcagctgtatgtgttcgtgatgcgctgcatcgcctacccctttaatgccaagcagcccaccgacatggctcgccggcagcagaagatcagcaaacagcagctgcagacagtcaaggaccggtttcaggctttcctcaatggggaaacccagatcatggctgacgaagccttcatgaacgctgtgcagagttactatgaggtgttcctgaagagcgaccgtgtggcccgcatggttcagagtggaggctgttccgccaacgactcccgggaggtcttcaagaagcacattgagaagagagtgcgcagcctgcctgagattgacggcctcagcaaggagactgtgctgagctcctggatggccaaatttgatgccatctaccgtggagaagaggacccgcggaagcagcaggcccggatgacagccagcgcagcctccgagctgattctgagcaaggagcaactctatgagatgttccagaacattcttgggatcaagaagttcgaacatcagctcctttacaatgcctgccagctggacaatccagatgagcaagcagcccagatcagacgagagctggatggacgtctacaaatggcagaccaaatagccagggaacgcaaatttcccaagtttgtatccaaagaaatggaaaacatgtacattgaggagctgaagtcatctgtcaacctgctcatggccaacttggagagcatgccggtatccaaaggcggggagttcaagctccagaaactcaaacgcagccacaatgcttccatcatcgacatgggcgaggagagtgagaaccagctctccaagtcagatgtcgtgctgtctttctcattggaggtggtaattatggaagtccaaggcctcaaatctttggctccaaatcgcatcgtatattgcacaatggaggtggaaggaggagagaaactacagactgatcaggccgaggcttctaaaccaacctggggcacccagggtgacttctccacaacccatgcactgccagctgtgaaggtgaagctgttcacagagagcacaggcgtcctggcgttggaggacaaggagcttgggcgggttattctccatcccaccccgaacagccccaaacagtcagagtggcacaaaatgacagtctccaaaaactgccccgaccaagatctcaaaatcaaacttgctgtccgaatggataagcctcaaaacatgaagcattctgggtatttatgggccatcggtaagaatgtctggaagagatggaagaaaaggttttttgtattggtgcaggtcagtcagtacacgtttgccatgtgcagttatcgggagaagaaagcggagcctcaggaacttctacaattggatggctacactgtggattacaccgacccccagccaggtttggagggtggccgagccttcttcaatgctgtcaaggagggagacaccgtgatatttgccagtgacgatgaacaagaccgcatcctgtgggtccaggccatgtatcgggccacggggcagtcacacaagcctgtgcccccgacccaagtccagaaactcaacgccaagggaggaaatgtacctcagctggatgcccctatctctcaattttacgcagatagagctcaaaaacatggcatggatgaatttatctcttccaacccctgtaactttgaccacgcttccctctttgagatggtacaacgccttactttggatcacagacttaatgattcctattcttgcctgggctggttcagtcctggccaggtgtttgtactagacgagtattgcgcccgaaatggagtccgggggtgtcaccgacatctctgctacctcagagacttgcttgaacgggcagaaaatggcgccatgatcgaccccacccttcttcactacagctttgccttctgtgcatcccatgtccatgggaacaggcctgatggaattggaactgtgactgttgaagaaaaggaacgttttgaagaaatcaaagagaggctccgagttctgctagaaaatcagattacacattttaggtattgctttccatttggtcgacctgaaggtgctttgaaagctactctctcactcttggaaagggttttgatgaaagatattgttaccccagtgccacaagaggaggtaaaaacagttatccgtaaatgtctggaacaggctgcgttagtcaactattctcggctctcagagtatgccaaaatcgaagagaatcaaaaggatgcagaaaatgtaggccggttaatcactcctgccaaaaagcttgaagatacaatacgtcttgctgaactagtcattgaagttcttcagcaaaatgaggagcaccacgcagagccacatgttgataaaggagaagcctttgcgtggtggtcagatttaatggtggagcatgcggagacgttcctgtcactctttgcagtagacatggatgcagccttagaggtgcaacctccagacacatgggacagttttccactatttcagctgctgaatgattttctccgtactgactataatttgtgcaatggaaaatttcacaaacacctgcaagacctgtttgccccacttgttgttagatatgtggatctgatggagtcctcaattgcacaatccattcacaggggctttgagcgggagtcatgggaaccagtcaagagtttaaccagtaacctacccaatgtgaacctacccaatgtgaaccttcccaaagtaccaaatctaccagttaacatccctctaggcatcccacaaatgcctactttttcggcaccgtcatggatggctgctatatatgatgcggataatgggtcaggcacctcagaagatctgttttggaaacttgacgcccttcagaccttcattcgggacctgcactggcctgaagaagagtttggaaagcacctggaacaacggctgaagttgatggcaagtgacatgatcgaatcttgtgtcaaaagaaccaggattgcatttgaagttaagctgcaaaaaaccagtcgatcaacagattttcgagtcccacagtcaatatgcaccatgtttaatgttatggttgatgccaaagctcaatcaacaaaactttgcagcatggaaatgggccaagagcatcaataccattcaaaaatagacgaactaattgaagaaactgttaaagaaatgataacactcttggttgcaaagttcgttactatcttggaaggagtgctggcaaaattatccagatatgacgaagggactttgttttcttcttttctgtcatttaccgtgaaggcagcttccaaatatgtggatgtacctaaacccgggatggacgtggccgacgcctacgtgactttcgtccgccattctcaggatgtcctgcgtgataaggtcaatgaggagatgtacatagaaaggttatttgatcaatggtacaacagctccatgaacgtgatctgcacctggttgacggaccggatggacttacagcttcatatttatcagttgaaaacactaattaggatggtaaagaaaacctacagagatttccgattgcaaggggtcctggactccaccttaaacagcaagacctatgaaacgatccggaaccgtctcactgtggaggaagccacagcatcagtgagtgaaggtgggggactgcagggcatcagcatgaaggacagcgatgaggaagacgaagaagacgattagaccatttggtcctagagtctgctgggacagagtcctgtaatcagtgcatgtccttagtctgttagttaaacccattaggaattttctgtcaactaccatgcccatgagatgtttatcaatacaactgccattttagctatgtggtaccaagattagcaaatgaccttcatatccactgatttcctgatgtccatgtctatatgtttacaagcaatatggagcaccattctttaaatactgttcatggagaatacatagtctaaccactaggcgtgtccctgttatcagcaaagatcaatgatgcttcattcatgtactatgtatgcattggtggtaaatggatgtgagggcaagtacatcaagtacattcactctgtttcacgtatgtggatgccagttaattaaatgagtacgtaaataaattaattaaaacacatagatctgctttgtgtttttatttttattttttgaaaaacaaaaggcaagtctccaacaattaacttttgatgctttctgttcccctaaaaccaaaaaatgaaccccttgtgtcgttgttaacccatcctttcatttactcatataattagccaaaaaaaaaaggatggctacataccaatggattgattctcttaattgccacggcaagggggcgatcctatcatgacttaacatcaagcgcgcagttcaaaactactgtcttctgtcaaagttttctcctcttaaatgttattttgcttttacgtctcaactgtgtatgtaaaaaaaacgaatatttaaattacaaccctagactaaaaatgtgtttataataagatgtggatatttccttcagtagattgtaaccataatttaaattattttgttccacactgttttttatatctgtcatgtacattgcattttgatctgtaactgcacaaccctggggtttgctgcagagctatttctttccatgtaaagtagtggatccatcttgcttttgccttatataaagcctacagttatggaagtgtggaaaactgtggcttctcaataaatattcagatgtcctaagaatataaaaaaaaaaaaaaaaaa

SEQ ID NO: 12918 - DNA, 5248 bp, Homo sapiens
acagcttgcaacactcggcatcttttctggaggcgcctccttcagcagccgcagatggcatccggctgcgggctcggggctcgcaattgattctcccccttgcccacctcgagtccacggacgcacctctcccttcccctcctcccttcgcgcttctgggtctgagcccagctcgcgaccgccgggcagaggatcagtcgcggcggccgaggctgagcagcagcgctctcgctccctgacctggggagaagcgcccacccgggagagctgatccccggctgcctccagcgccccccaccttttgcactccaagccgggggctccagagaccccgctccccaggcgccactatgctggacccttcgtccagcgaagaagaatcggatgagatcgtggaggaggagagcggcaaggaggtgctcggctcggccccgtccggcgcgcgcctgtctcccagccgtaccagcgagggctcggccggcagcgccgggctggggggcggcggcgccggcgccggagccggggtgggtgcaggcggcggcgggggcagcggcgcgagcagcggcggcggggccggggggctgcaacccagcagccgcgctggcggcggccggccctccagccccagcccgtcggtggtgagcgagaaggagaaggaagagttggagcggctgcagaaagaggaggaggagaggaagaagaggctgcagctgtatgtgttcgtgatgcgctgcatcgcctacccctttaatgccaagcagcccaccgacatggctcgccggcagcagaagatcagcaaacagcagctgcagacagtcaaggaccggtttcaggctttcctcaatggggaaacccagatcatggctgacgaagccttcatgaacgctgtgcagagttactatgaggtgttcctgaagagcgaccgtgtggcccgcatggttcagagtggaggctgttccgccaacgactcccgggaggtcttcaagaagcacattgagaagagagtgcgcagcctgcctgagattgacggcctcagcaaggagactgtgctgagctcctggatggccaaatttgatgccatctaccgtggagaagaggacccgcggaagcagcaggcccggatgacagccagcgcagcctccgagctgattctgagcaaggagcaactctatgagatgttccagaacattcttgggatcaagaagttcgaacatcagctcctttacaatgcctgccagctggacaatccagatgagcaagcagcccagatcagacgagagctggatggacgtctacaaatggcagaccaaatagccagggaacgcaaatttcccaagtttgtatccaaagaaatggaaaacatgtacattgaggagctgaagtcatctgtcaacctgctcatggccaacttggagagcatgccggtatccaaaggcggggagttcaagctccagaaactcaaacgcagccacaatgcttccatcatcgacatgggcgaggagagtgagaaccagctctccaagtcagatgtcgtgctgtctttctcattggaggtggtaattatggaagtccaaggcctcaaatctttggctccaaatcgcatcgtatattgcacaatggaggtggaaggaggagagaaactacagactgatcaggccgaggcttctaaaccaacctggggcacccagggtgacttctccacaacccatgcactgccagctgtgaaggtgaagctgttcacagagagcacaggcgtcctggcgttggaggacaaggagcttgggcgggttattctccatcccaccccgaacagccccaaacagtcagagtggcacaaaatgacagtctccaaaaactgccccgaccaagatctcaaaatcaaacttgctgtccgaatggataagcctcaaaacatgaagcattctgggtatttatgggccatcggtaagaatgtctggaagagatggaagaaaaggttttttgtattggtgcaggtcagtcagtacacgtttgccatgtgcagttatcgggagaagaaagcggagcctcaggaacttctacaattggatggctacactgtggattacaccgacccccagccaggtttggagggtggccgagccttcttcaatgctgtcaaggagggagacaccgtgatatttgccagtgacgatgaacaagaccgcatcctgtgggtccaggccatgtatcgggccacggggcagtcacacaagcctgtgcccccgacccaagtccagaaactcaacgccaagggaggaaatgtacctcagctggatgcccctatctctcaattttacgcagatagagctcaaaaacatggcatggatgaatttatctcttccaacccctgtaactttgaccacgcttccctctttgagatgggctggttcagtcctggccaggtgtttgtactagacgagtattgcgcccgaaatggagtccgggggtgtcaccgacatctctgctacctcagagacttgcttgaacgggcagaaaatggcgccatgatcgaccccacccttcttcactacagctttgccttctgtgcatcccatgtccatgggaacaggcctgatggaattggaactgtgactgttgaagaaaaggaacgttttgaagaaatcaaagagaggctccgagttctgctagaaaatcagattacacattttaggtattgctttccatttggtcgacctgaaggtgctttgaaagctactctctcactcttggaaagggttttgatgaaagatattgttaccccagtgccacaagaggaggtaaaaacagttatccgtaaatgtctggaacaggctgcgttagtcaactattctcggctctcagagtatgccaaaatcgaagaaaatgtaggccggttaatcactcctgccaaaaagcttgaagatacaatacgtcttgctgaactagtcattgaagttcttcagcaaaatgaggagcaccacgcagaggcctttgcgtggtggtcagatttaatggtggagcatgcggagacgttcctgtcactctttgcagtagacatggatgcagccttagaggtgcaacctccagacacatgggacagttttccactatttcagctgctgaatgattttctccgtactgactataatttgtgcaatggaaaatttcacaaacacctgcaagacctgtttgccccacttgttgttagatatgtggatctgatggagtcctcaattgcacaatccattcacaggggctttgagcgggagtcatgggaaccagtcaataatgggtcaggcacctcagaagatctgttttggaaacttgacgcccttcagaccttcattcgggacctgcactggcctgaagaagagtttggaaagcacctggaacaacggctgaagttgatggcaagtgacatgatcgaatcttgtgtcaaaagaaccaggattgcatttgaagttaagctgcaaaaaaccagtcgatcaacagattttcgagtcccacagtcaatatgcaccatgtttaatgttatggttgatgccaaagctcaatcaacaaaactttgcagcatggaaatgggccaagagcatcaataccattcaaaaatagacgaactaattgaagaaactgttaaagaaatgataacactcttggttgcaaagttcgttactatcttggaaggagtgctggcaaaattatccagatatgacgaagggactttgttttcttcttttctgtcatttaccgtgaaggcagcttccaaatatgtggatgtacctaaacccgggatggacgtggccgacgcctacgtgactttcgtccgccattctcaggatgtcctgcgtgataaggtcaatgaggagatgtacatagaaaggttatttgatcaatggtacaacagctccatgaacgtgatctgcacctggttgacggaccggatggacttacagcttcatatttatcagttgaaaacactaattaggatggtaaagaaaacctacagagatttccgattgcaaggggtcctggactccaccttaaacagcaagacctatgaaacgatccggaaccgtctcactgtggaggaagccacagcatcagtgagtgaaggtgggggactgcagggcatcagcatgaaggacagcgatgaggaagacgaagaagacgattagaccatttggtcctagagtctgctgggacagagtcctgtaatcagtgcatgtccttagtctgttagttaaacccattaggaattttctgtcaactaccatgcccatgagatgtttatcaatacaactgccattttagctatgtggtaccaagattagcaaatgaccttcatatccactgatttcctgatgtccatgtctatatgtttacaagcaatatggagcaccattctttaaatactgttcatggagaatacatagtctaaccactaggcgtgtccctgttatcagcaaagatcaatgatgcttcattcatgtactatgtatgcattggtggtaaatggatgtgagggcaagtacatcaagtacattcactctgtttcacgtatgtggatgccagttaattaaatgagtacgtaaataaattaattaaaacacatagatctgctttgtgtttttatttttattttttgaaaaacaaaaggcaagtctccaacaattaacttttgatgctttctgttcccctaaaaccaaaaaatgaaccccttgtgtcgttgttaacccatcctttcatttactcatataattagccaaaaaaaaaaggatggctacataccaatggattgattctcttaattgccacggcaagggggcgatcctatcatgacttaacatcaagcgcgcagttcaaaactactgtcttctgtcaaagttttctcctcttaaatgttattttgcttttacgtctcaactgtgtatgtaaaaaaaacgaatatttaaattacaaccctagactaaaaatgtgtttataataagatgtggatatttccttcagtagattgtaaccataatttaaattattttgttccacactgttttttatatctgtcatgtacattgcattttgatctgtaactgcacaaccctggggtttgctgcagagctatttctttccatgtaaagtagtggatccatcttgcttttgccttatataaagcctacagttatggaagtgtggaaaactgtggcttctcaataaatattcagatgtcctaagaatataaaaaaaaaaaaaa

SEQ ID NO: 12919 - DNA, 2694 bp, Homo sapiens
gtcgcttcaatatttcaaaatggatccggttctgtggcgggtgcgagagtgaggctgtgggggacctccaggccgaacctccgcgaagcctcgcggcttctgcgtgccctggccccgggaggataaggatttcccttccctcctacttgcgcgcggagccgagctcttgttgagctatggagtcgccaaccaaggagattgaagaatttgagagcaactctctgaaatacctgcaaccggaacagatcgagaaaatctggcttcggctccgcgggctgaggaaatataagaaaacgtcccagagattacggtctttggtcaaacaattagagagaggggaagcttcagtggtagatcttaagaagaatttggaatatgcagccacagtgcttgaatctgtgtatattgatgaaacaaggagactcctggatacagaggatgagctcagtgacattcagtcagatgctgtgccttctgaggtccgagactggctggcctccaccttcacgcggcagatggggatgatgctcaggaggagcgacgagaagccccggttcaagagcatcgttcacgcagtgcaggctgggatatttgtggagagaatgtatagacggacatcaaacatggttggactgagctatccaccagctgttattgaggcattaaaggatgtggacaagtggtcctttgacgtcttttccctcaatgaggccagtggggatcatgcactgaaatttattttctatgaactactcacacgttatgatctgatcagccgtttcaagatccccatttctgcacttgtctcatttgtggaggccctggaagtgggatacagcaagcacaaaaatccttaccataacttaatgcacgctgccgatgttacacagacagtgcattacctcctctataagacaggagtggcgaactggctgacggagctggagatctttgctataatcttctcagctgccatccatgactacgagcataccggaaccaccaacaatttccacattcagactcggtctgatccagctattctgtataatgacagatctgtactggagaatcaccatttaagtgcagcttatcgccttctgcaagatgacgaggaaatgaatattttgattaacctctcaaaggatgactggagggagtttcgaaccttggtaattgaaatggtgatggccacagatatgtcttgtcacttccaacaaatcaaagcaatgaagactgctctgcagcagccagaagccattgaaaagccaaaagccttatcccttatgctgcatacagcagatattagccatccagcaaaagcatgggacctccatcatcgctggacaatgtcactcctggaggagttcttcagacagggtgacagagaagcagagctggggctgcctttttctcctctgtgtgaccgaaagtccactatggttgctcagtcacaagtaggtttcattgatttcatcgtggaacccaccttcactgtgcttacggacatgaccgagaagattgtgagtccattaatcgatgaaacctctcaaactggtgggacaggacagaggcgttcgagtttgaatagcatcagctcgtcagatgccaagcgatcaggtgtcaagacctctggttcagagggaagtgccccgatcaacaattctgtcatctccgttgactataagagctttaaagctacttggacggaagtggtgcacatcaatcgggagagatggagggccaaggtacccaaagaggagaaggccaagaaggaagcagaggaaaaggctcgcctggccgcagaggagcagcaaaaggaaatggaagccaaaagccaggctgaagaaggcgcatctggcaaagctgagaaaaagacgtctggagaaactaagaatcaagtcaatggaacacgggcaaacaaaagtgacaaccctcgtgggaaaaattccaaagccgagaagtcatcaggagaacagcaacagaatggtgacttcaaagatggtaaaaataagacagacaagaaggatcactctaacatcggaaatgattcaaagaaaacagatgattcacaagagtaaaaaagacctcatagacaataaaagaggctgccagtgtcttgcatcattctagctgagcttcttcattctccttcttctccttcttccacaaagacccatatctggagaaggtgtacaactttcaaacacaagccccccaccccctgacccttggccttccctcacaccatctccttccaggggatgaatctttgggggttggtttgaggtcttagaactctgggggatattcccctgagcaaaacaaacaacgtgagatttttactcaaacagaaacaaaacatgaaggggcatcctcaaaatcctttgctaatgacctggctttcaaggcatctgtctggcctgatgagaatggacatcctggatatgctgggagaggcctgaaaaaagccacacacacagtaattgccattttatgactgtcaatgccgttactttaaatgttgtcatttttgcactggctactgatgatacagccatgctgacattcatcaccgcaaagatgatgattccagtctctggttcctttcctgagtcaggaacatttgttttctccaatttcctttcagacttaaaattgttcttatgctttttttcccacttctgtaataca

SEQ ID NO: 12920 - DNA, 4259 bp, Homo sapiens
gagtccccggcgtgcagtggagcctcgctgggggaaatgacagcttggaccatgggcgcccgcggtctggacaagcgaggaagtttctttaagctcattgacacaattgcctcggagatcggagaactgaaacaggagatggtgcggacagatgtcaacctggaaaatggcctggaacccgctgaaacccacagcatggtaagacacaaggatggtggctattccgaggaagaggacgtgaagacctgtgcccgggactcaggctatgacagcctctccaacaggctcagcatcttggaccggctcctccacacccaccccatatggctgcagctgagtctgagtgaggaggaggcagcagaggtcctgcaggcccagcctccggggatcttcctggttcataaatctaccaagatgcagaagaaagtcctctccctccgcctgccctgtgaatttggggccccactcaaggaatttgccataaaggaaagcacatacaccttttccctggaaggctcaggaatcagtttcgcagatttattccggctcattgctttctactgcatcagcagggatgttctaccatttaccttgaagttgccttatgccatttcaacagccaagtcggaggctcagcttgaagaactggcccagatgggactaaatttctggagctccccagctgacagcaaacccccgaaccttccacctccccataggcctctttcctccgacggtgtctgtcctgcctccctgcgtcagctctgccttataaatggagtgcattctatcaaaaccaggacgccttcagagctggagtgcagccagaccaacggggccctgtgctttattaatccccttttcttgaaagtgcacagccaggacctcagtggaggcctgaaacggccgagcacaaggactcccaacgcgaatggcacggagcggactcggtcccccccacccaggcccccgccacccgctattaatagtctccacacaagccctcggctggccaggactgaaacccagacgagcatgccagaaacagtcaaccataacaaacatgggaacgtagctctgcctggaacgaaaccaactcccatccctccaccccggctgaagaagcaggcttcttttctggaagcagagggcggtgcaaagaccttgagcggcggccggccgggcgcaggcccggagctggagctgggcacagctggcagcccaggtggggccccgcctgaggccgccccgggggattgcacaagggccccgccgcccagctctgaatcacggcccccgtgccatggaggccggcagcggctgagcgacatgagcatttctacttcctcctccgactcgctggagttcgaccggagcatgcctctgtttggctacgaggcggacaccaacagcagcctggaggactacgagggggaaagtgaccaagagaccatggcgccccccatcaagtccaaaaagaaaaggagcagctccttcgtgctgcccaagctcgtcaagtcccagctgcagaaggtgagcggggtgttcagctccttcatgaccccggagaagcggatggtccgcaggatcgccgagctttcccgggacaaatgcacctacttcgggtgcttagtgcaggactacgtgagcttcctgcaggagaacaaggagtgccacgtgtccagcaccgacatgctgcagaccatccggcagttcatgacccaggtcaagaactatttgtctcagagctcggagctggacccccccatcgagtcgctgatccctgaagaccaaatagatgtggtgctggaaaaagccatgcacaagtgcatcttgaagcccctcaaggggcacgtggaggccatgctgaaggactttcacatggccgatggctcatggaagcaactcaaggagaacctgcagcttgtgcggcagaggaatccgcaggagctgggggtcttcgccccgacccctgattttgtggatgtggagaaaatcaaagtcaagttcatgaccatgcagaagatgtattcgccggaaaagaaggtcatgctgctgctgcgggtctgcaagctcatttacacggtcatggagaacaactcagggaggatgtatggcgctgatgacttcttgccagtcctgacctatgtcatagcccagtgtgacatgcttgaattggacactgaaatcgagtacatgatggagctcctagacccatcgctgttacatggagaaggaggctattacttgacaagcgcatatggagcactttctctgataaagaatttccaagaagaacaagcagcgcgactgctcagctcagaaaccagagacaccctgaggcagtggcacaaacggagaaccaccaaccggaccatcccctctgtggacgacttccagaattacctccgagttgcatttcaggaggtcaacagtggttgcacaggaaagaccctccttgtgagaccttacatcaccactgaggatgtgtgtcagatctgcgctgagaagttcaaggtgggggaccctgaggagtacagcctctttctcttcgttgacgagacatggcagcagctggcagaggacacttaccctcaaaaaatcaaggcggagctgcacagccgaccacagccccacatcttccactttgtctacaaacgcatcaagaacgatccttatggcatcattttccagaacggggaagaagacctcaccacctcctagaagacaggcgggacttcccagtggtgcatccaaaggggagctggaagccttgccttcccgcttctacatgcttgagcttgaaaagcagtcacctcctcggggacccctcagtgtagtgactaagccatccacaggccaactcggccaagggcaactttagccacgcaaggtagctgaggtttgtgaaacagtaggattctcttttggcaatggagaattgcatctgatggttcaagtgtcctgagattgtttgctacctacccccagtcaggttctaggttggcttacaggtatgtatatgtgcagaagaaacacttaagatacaagttcttttgaattcaacagcagatgcttgcgatgcagtgcgtcaggtgattctcactcctgtggatggcttcatccctgccttccttcctttctttttccttttttttttttttttttttttttttacaaagagccttcatgtttttatatatttcatagaaatttttatagcagttgcaggtaaactgtcaggattggttttaaaatatttttgtaactttaaaatattctataattatgcatgtgattttaacatttaatattcaaaaataaatctcttgctggatttgagagtattgcatttttaaagtctctcttctgtaactggatgttttggcaactttgtggggagagactgctggatttcttaaagcaacgtattcctgacactggccacagaatgcctttggaaatcggatgtactgttctcttgttcacgtttagtggtgttttgctgttttgttttttaaacaaatgatgctgagaataaggagagaaatgaatgtagagagaggtagagagagaaatatgaactctaacaaaggactgaggagtgcagtctgctggttcaggctcttcaaaagatgtagaaaaagagatagaaggaaccacctatgcttaaaatactgtaaatatgcagtgaggtttggcaaaatctattccatgtgtgatttgcttgtagaaacaattttgaaagccccttgaggaaaataaaaatcaagaagaacacttttctcccttttccatacaaattaaaacttaacagcatcaaattattgggaccagaaaccaagtaatgtataatgtggcttttgttgagttaaataagatgctatataatggagaagaatttgaaaatgcacaaaaaaatcaatctacattatcagaacctgcagtgaaattaaacttatgttaaataaaaccagtttgcaggtgcacaaactatgagggtcttgtatccacgtaacacaggtagttacaaaaacatgttattgtactgtgtaaagatgcatagtcatctcatttggttggctttgtaccttgtaccttttttagccttggcttttgttgaactagaaccctcagcacatactgtgttgtacttttgtaaatgattttttaaatggaattttgcacataatacattgtaatactgtatgataatcatgtgtgaaaataatttttgaaatatcaaaaaaaaaaaaaaa

SEQ ID NO: 12921 - DNA, 1988 bp, Homo sapiens
ggggagtgcctgtgtggctgagggacacgtccaagctgcagtcggctctgtggttgtggacacctggcagaaccatgccttctctagtctgggtcatccaaacacacgtggggtgcaggggccaggtggagccctcttgtcgtttttgttatctaacggtaattacggagtccagaaagagaattggaaatgccggcagtttaattaaagctgaatggcaggagaggggcatttggaggctccctccctgccttcactccccgtcctgccgcccaggcaggatgtcagatgaggagacgttgagctcatcaaacacccaatgagaagtcttacaacatcagaagctgtctgccaatgcgcctgcgacagcttatagaaactgctgccgcctcgaatcaacctctctccccaggcattgcacgtcagtaggtaaccaggtcattgctgtggtcatggacctcttcactgatggtgatatctttcaagacattgtggatgctgcctgtaagcgccgggtcccagtgtacatcatcctggacgaggcaggagtgaagtatttcctggagatgtgtcaggacctgcagctcactgacttccggattcggaacatccgtgtccgctctgtgacaggcgtcggcttctacatgcccatggggaggatcaaggggaccctgtcatcaaggttcctgatggtggacggtgacaaagtggccactggatcttacaggttcacctggagttcctcccatgtggacagaaacctcctcctgctcctgacaggacagaacgtagagccctttgacacggagttccgggagctgtacgccatctccgaggaggtggacttgtaccggcagctgagcctggcgggcagggttggcctccattactcctccactgtggctcgaaagcttatcaaccccaagtacgccttggtgtcaggctgccgccacccgcctggggagatgatgcgctgggctgcccggcaacagtgggaggcgggcggcaacccggaggggcaggaggagggcgccagcggtggcgagtcggcctggcgcctggagagcttcctgaaagacctggttacggtggagcaggtgctgccccccgtggagcccatccccttgggagagctgagccagaaggatggcaggatggtctctcacatgcacagagacctgaagcccaaatcccgagaggcacccagccgaaacggcatgggagaagcggcccggggggaggccgcccccgccaggcgcttcagcagcaggctcttcagtcgccgagccaagaggcctgcggcgcccaatggcatggccagctctgtctccaccgagacctctgaagtggagtttctgacggggaagaggcccaacgagaattccagtgctgacatctcaggtaaaacaagtcccagttctgccaagcctagcaactgtgtgatttcctgagctgcgggatggtggtgggcaggacgtgtggatgcctgcctgccctgccctgtgctgtggagagcgcaggtcgcacactgcaccagtttgcacatcagacgccaactggccttctgccctgcagcctccgtcctggcctcagggacgctggatcccaaatgagagggtccgaagcatctcagtcacacgcctccaccggactgtcggtggctgggcaggggtcagtgccacggcctccttgtttacatgaagtggaagcttgaccagtgtctgctcgcctttgtgccccaccccctccgctgattgccagatggggtgagggcccattctttaaacctttatggggtggggtgtctggggcagctgcagtggcttctcctttcccaggcttcctggtgcttctggttccccacgccactccccacccaagagattggtggaataaaagggaagagggcagggccctgagcctggaaaaaaaaaaaaaaaaaaaaaaaaaaaaaaaaaaaaaaaaaaaaaaaaaaaaaaaaaaaaaaa

SEQ ID NO: 12922 - DNA, 5653 bp, Homo sapiens
gacaaagagaactaatgctttgtgctgattcatatttgaatcgaggcattgggaaccctgtatgccttgtttgtggaaagaaccagtgacaccatcactgagcttcctaaaagttcgaagaagttagaggactatacactttcttttgaacttttataataaatatttgctctggtttttggaacccagggctgttagaggggtgagtgacaagtcttacaagtggccttattccaactccagaaattgcccaacggaactttgagattatatgcaatcgaaagtgacaggaaacatgccaactcaatccctcttaatgtacatggatgggccagaagtgattggcagctctcttggcagtccgatggagatggaggatgccttgtcaatgaaagggaccgctgttgttccattccgagctacacaagaaaaaaatgtcatccaaatcgaggggtatatgcccttggattgcatgttctgcagccagaccttcacacattcagaagaccttaataaacatgtcttaatgcaacaccggcctaccctctgtgaaccagcagttcttcgggttgaagcagagtatctcagtccgcttgataaaagtcaagtgcgaacagaacctcccaaggaaaagaattgcaaggaaaatgaatttagctgtgaggtatgtgggcagacatttagagtcgcttttgatgttgagatccacatgagaacacacaaagattctttcacttacgggtgtaacatgtgcggaagaagattcaaggagccttggtttcttaaaaatcacatgcggacacataatggcaaatcgggggccagaagcaaactgcagcaaggcttggagagtagtccagcaacgatcaacgaggtcgtccaggtgcacgcggccgagagcatctcctctccttacaaaatctgcatggtttgtggcttcctatttccaaataaagaaagtctaattgagcaccgcaaggtgcacaccaaaaaaactgctttcggtaccagcagcgcgcagacagactctccacaaggaggaatgccgtcctcgagggaggacttcctgcagttgttcaacttgagaccaaaatctcaccctgaaacggggaagaagcctgtcagatgcatccctcagctcgatccgttcaccaccttccaggcttggcagctggctaccaaaggaaaagttgccatttgccaagaagtgaaggaatcggggcaagaagggagcaccgacaacgacgattcgagttccgagaaggagcttggagaaacaaataagggcagttgtgcaggcctctcgcaagagaaagagaagtgcaaacactcccacggcgaagcgccctccgtggacgcggatcccaagttacccagtagcaaggagaagcccactcactgctccgagtgcggcaaagctttcagaacctaccaccagctggtcttgcactccagggtccacaagaaggaccggagggccggcgcggagtcgcccaccatgtctgtggacgggaggcagccggggacgtgttctcctgacctcgccgcccctctggatgaaaatggagccgtggatcgaggggaaggtggttctgaagacggatctgaggatgggcttcccgaaggaatccatctggataaaaatgatgatggaggaaaaataaaacatcttacatcttcaagagagtgtagttattgtggaaagtttttccgttcaaattattacctcaatattcatctcagaacgcatacaggtgaaaaaccatacaaatgtgaattttgtgaatatgctgcagcccagaagacatctctgaggtatcacttggagagacatcacaaggaaaaacaaaccgatgttgctgctgaagtcaagaacgatggtaaaaatcaggacactgaagatgcactattaaccgctgacagtgcgcaaaccaaaaatttgaaaagattttttgatggtgccaaagatgttacaggcagtccacctgcaaagcagcttaaggagatgccttctgtttttcagaatgttctgggcagcgctgtcctctcaccagcacacaaagatactcaggatttccataaaaatgcagctgatgacagtgctgataaagtgaataaaaaccctacccctgcttacctggacctgttaaaaaagagatcagcagttgaaactcaggcaaataacctcatctgtagaaccaaggcggatgttactcctcctccggatggcagtaccacccataaccttgaagttagccccaaagagaagcaaacggagaccgcagctgactgcagatacaggccaagtgtggattgtcacgaaaaacctttaaatttatccgtgggggctcttcacaattgcccggcaatttctttgagtaaaagtttgattccaagtatcacctgtccattttgtaccttcaagacattttatccagaagttttaatgatgcaccagagactggagcataaatacaatcctgacgttcataaaaactgtcgaaacaagtccttgcttagaagtcgacgtaccggatgcccgccagcgttgctgggaaaagatgtgcctcccctctctagtttctgtaaacccaagcccaagtctgctttcccggcgcagtccaaatccctgccatctgcgaaggggaagcagagccctcctgggccaggcaaggcccctctgacttcagggatagactctagcactttagccccaagtaacctgaagtcccacagaccacagcagaatgtgggggtccaaggggccgccaccaggcaacagcaatctgagatgtttcctaaaaccagtgtttcccctgcaccggataagacaaaaagacccgagacaaaattgaaacctcttccagtagctccttctcagcccaccctcggcagcagtaacatcaatggttccatcgactaccccgccaagaacgacagcccgtgggcacctccgggaagagactatttctgtaatcggagtgccagcaatactgcagcagaatttggtgagccccttccaaaaagactgaagtccagcgtggttgcccttgacgttgaccagcccggggccaattacagaagaggctatgaccttcccaagtaccatatggtcagaggcatcacatcactgttaccgcaggactgtgtgtatccgtcgcaggcgctgcctcccaaaccaaggttcctgagctccagcgaggtcgattctccaaatgtgctgactgttcagaagccctatggtggctccgggccactttacacttgtgtgcctgctggtagtccagcatccagctcgacgttagaaggaaaaaggcctgtgtcatatcaacacttatctaacagcatggcacaaaagagaaactatgagaattttattgggaatgcacattatcgaccaaatgacaaaaaaacttgattcactaattagggggaaaaaaggtcttggtggatgtcagtgcttactccccatgaaattaaattttacttcatcctttgagaagcgaatggtgaaagctactgaaataagctgtgattgtactgtacataaaacatatgaggaatctgcaaggaacactacagttgtgtaaagttgttctgttaacttttgtaccaaatagcaatacaaactagttggaacagttggaacttacatacatggggactggaaatctctattttgtccctgaataatatttttcttagaattgaccaaataagaagtggaatttttgcatacttgagcgctgctgaaaagaaatcatttgggttgggtggggcgggatgggggaaaagtatataatgcttgcacctcaggtaaaaatctgtaaatatctaagttgtaaacctgcttgttcaaatactgtgtgtattccttttctctaatgcagctcatcacttggagcagtttctgctattgtgctctttcatttaaaatgtatgtttttttttttttaaactgtcaatgattttgtattatgttgaatccacccaaatctattgttgtcttaaaattgttaatggaagtattgaccctctatgatatgtgctgcagatatcgaggtcagccattcggaagctggcagcattttatcgcaactttgagcatctcagatggggaaggcaccttcttcctcgcctctccagattgtcctggaacctccaggatccttgactgagggcgttgggatggcttgtaggatttttaagagagtgtgtctacagacaagcattttctctgtagagcagccacacgttgtataaacataaactgtatgtgcagttatttaaatttgtttctgtcaaattaatcatttttgttggacgattcagtggcgggggggttttgcctaaattagtatataaaaacaaaaatgctaaattatatctgtgaattgcaggtattggggaacagttttaagggaaattttggggggaacattttaggtttgtatttggtagtcttaatgtatctggcatttgggtgaactgtggacatactagagttgattatagacacattgattttgaataaggaactgctggccgagcccgctgggagtctagaaagagaaaatctgtttctagacctcagttattttcccatttttggttgttttgaagcagtaacatttttctcagtgcacatgcaatttgggttttagagaagatggccaccagctggcttcctagatattttaaacttttgttctttaatatgctgtccatggctgagtttattagtacatgggcttagtgaccacaaaatattttattaagaaactgtttcaaaaataaatttgcactgttcatttttctggcctcgctgttctccatagagcaagggtaatcctagaaaaaattttttttttttaaattatgcaacgtaagatgtcctccttgatagaagtcttagctcctgtgttacaagggagaactcatttgagatcagtctgttggcattgcaatgaagtgctttgtatcaggaaagtgtacactattgaccttttttcctgttcacaagctgagccatatgtacataatctagattttgttttcatagttttgcacttttatagcctatttttgaagattaacacatttgcaagatgattgactcaatctttgcctaatccaatgagtgttacagagagcttgctgtgactagaaccataaatcttaaagggggtatgtgataatagagggctggaatttaaacctgtatttaaaaaaaagaatcaccaaatctatttgaaaacaagtcgatttgtattatgctggaattttttgggctttcagatttctctttttaaccacatttctgaatgtataaaaataccaattattttcctacagccctttgtacttcaaaatatgtttttgtgtccatcagtattaactattggtatactactggttttatatttttttttctttgagacaacagtacatataatagaggtacaattcgttggatttttgtttatgtatttatttcattccagtttgatttattttaattgttgatacttaagttgtcgaacagtagacattacttgttttatttatgatatatttcagcttaaagttatgttattatatgtggaagtgtaaatatagatttggtgttttgcaaaaaaaaaaaaaaaaaaaa

SEQ ID NO: 12923 - DNA, 3452 bp, Homo sapiens
atttcgccgggttgcttttgtcttgcgggctcctgtcgggttcggtgtttccgctctgaagactgcgacgcgggctccgatgcagctcgctccctgccggatgggtcatgggattctaaacatgaggcagatagctgatcagcttccttgggttttgctgatgacacaagagagctttgcctgaagatggaaacactggagtcagaactgacctgccctatttgtctggagctctttgaggaccctcttctactgccctgcgcacacagcctctgcttcaactgcgcccaccgcatcctagtatcacactgtgccaccaacgagtctgtggagtccatcaccgccttccagtgccccacctgccggcatgtcatcaccctcagccagcgaggtctagacgggctcaagcgcaacgtcaccctacagaacatcatcgacaggttccagaaagcatcagtgagcgggcccaactctcccagcgagacccgtcgggagcgggcctttgacgccaacaccatgacctccgccgagaaggtcctctgccagttttgtgaccaggatcctgcccaggacgctgtgaagacctgtgtcacttgtgaagtatcctactgtgacgagtgcctgaaagccactcacccgaataagaagccctttacaggccatcgtctgattgagccaattccggactctcacatccgggggctgatgtgcttggagcatgaggatgagaaggtgaatatgtactgtgtgaccgatgaccagttaatctgtgccttgtgtaaactggttgggcggcaccgcgatcatcaggtggcagctttgagtgagcgctatgacaaattgaagcaaaacttagagagtaacctcaccaaccttattaagaggaacacagaactggagacccttttggctaaactcatccaaacctgtcaacatgttgaagtcaatgcatcacgtcaagaagccaaattgacagaggagtgtgatcttctcattgagatcattcagcaaagacgacagattattggaaccaagatcaaagaagggaaggtgatgaggcttcgcaaactggctcagcagattgcaaactgcaaacagtgcattgagcggtcagcatcactcatctcccaagcggaacactctctgaaggagaatgatcatgcgcgtttcctacagactgctaagaatatcaccgagagagtctccatggcaactgcatcctcccaggttctaattcctgaaatcaacctcaatgacacatttgacacctttgccttagatttttcccgagagaagaaactgctagaatgtctggattaccttacagctcccaaccctcccacaattagagaagagctctgcacagcttcatatgacaccatcactgtgcattggacctccgatgatgagttcagcgtggtctcctacgagctccagtacaccatattcaccggacaagccaacgtcgttagtctgtgtaattcggctgatagctggatgatagtacccaacatcaagcagaaccactacacggtgcacggtctgcagagcggcaccaagtacatcttcatggtcaaggccatcaaccaggcgggcagccgcagcagtgagcctgggaagttgaagacaaacagccaaccatttaaactggatcccaaatctgctcatcgaaaactgaaggtgtcccatgataacttgacagtagaacgtgatgagtcatcatccaagaagagtcacacacctgaacgcttcaccagccaggggagctatggagtagctggaaatgtgtttattgatagtggccggcattattgggaagtggtcataagtggaagcacatggtatgccattggtcttgcttacaaatcagccccgaagcatgaatggattgggaagaactctgcttcctgggcgctctgccgctgcaacaataactgggtggtgagacacaatagcaaggaaatccccattgagcctgccccccacctccggcgcgtgggcatcctgctggactatgataacggctctatcgccttttatgatgctttgaactccatccacctctacaccttcgacgtcgcatttgcgcagcctgtttgccccaccttcaccgtgtggaacaagtgtctgacgattatcactgggctccctatcccagaccatttggactgcacagagcagctgccgtgagcgtctggccacatggagctgctttctggggaacagtaaggttcaggccactatttaggggactgagaaagcacaggcttcatgagtgtaatgaaatctcaccagaagtgtcccgaaatcggctcagatagggctcaaaacaagagattcctctccttttactgtgtcttgtattaagtacgggctttaataatttctttaatttttttgtatttagaggaaaatctatagattatttataagagaaacataatcaggattacaacttttaggaattacttggttttgcacattaagaggcccataagtttatcagctatttacaaccttcatttcatcacaatctgtgggcttacaaaaaaacaaaaacttttgtagttttgtatgttactcatcttcttacctgatatcccatgatgatcccatggtaggtcttctcacctcgatggtgcataacaggatgtgtttgaacctagtaggggaggaaacaggctttcttactctggtttaatttgaagtgttttaattgtgatgtcaaaaagttgtatcagatcaactaaaatggagagcaagacagagaatgaaaagagttgattttggacctcggaccttgccgtggctaaatctttaccttctcatagctgatgggataatgttggaaagaaaggttgtgaatcctttggccacattttgccctgcttctctcagggttaagggttctggaagaacattaagaatgagatgcaattgaaaatagtcattttgaatcctattgattattcaaaaattcaggctgattgtcttttatcagaggtaggattctgttttatagtatagaatctactttatcccttccttttaatagttcctttagacctgtgaaatttcttcactacatttaatagttctcctatttcccgctcccccatatcaattttccttttgtctccggggctgagtaaataaacatgttctgtcacaaatagcagcaccactttggattgattttgctctccaggacatcagcacatggccctgatcagcactaccacatccaaacataagtcactgaaaaacacttaatatttatgagttggtaatgacaagggacattgtataaagtactatttgctagattcatgcctcaaaagttattataaacagacctttattaaacacatcttgaaagatgtagaagtccctctatagtctagtatagtttacaatagagttgtaagaccaaaaaaaaaaaaaaaaaaaaa

SEQ ID NO: 12924 - DNA, 3117 bp, Homo sapiens
tcgtagaactagggctgcaggaattgcgccgcgtcgacaaacccccatcctgggaaaaatggggaagctgatagctgatcagcttccttgggttttgctgatgacacaagagagctttgcctgaagatggaaacactggagtcagaactgacctgccctatttgtctggagctctttgaggaccctcttctactgccctgcgcacacagcctctgcttcaactgcgcccaccgcatcctagtatcacactgtgccaccaacgagtctgtggagtccatcaccgccttccagtgccccacctgccggcatgtcatcaccctcagccagcgaggtctagacgggctcaagcgcaacgtcaccctacagaacatcatcgacaggttccagaaagcatcagtgagcgggcccaactctcccagcgagacccgtcgggagcgggcctttgacgccaacaccatgacctccgccgagaaggtcctctgccagttttgtgaccaggatcctgcccaggacgctgtgaagacctgtgtcacttgtgaagtatcctactgtgacgagtgcctgaaagccactcacccgaataagaagccctttacaggccatcgtctgattgagccaattccggactctcacatccgggggctgatgtgcttggagcatgaggatgagaaggtgaatatgtactgtgtgaccgatgaccagttaatctgtgccttgtgtaaactggttgggcggcaccgcgatcatcaggtggcagctttgagtgagcgctatgacaaattgaagcaaaacttagagagtaacctcaccaaccttattaagaggaacacagaactggagacccttttggctaaactcatccaaacctgtcaacatgttgaagtcaatgcatcacgtcaagaagccaaattgacagaggagtgtgatcttctcattgagatcattcagcaaagacgacagattattggaaccaagatcaaagaagggaaggtgatgaggcttcgcaaactggctcagcagattgcaaactgcaaacagtgcattgagcggtcagcatcactcatctcccaagcggaacactctctgaaggagaatgatcatgcgcgtttcctacagactgctaagaatatcaccgagagagtctccatggcaactgcatcctcccaggttctaattcctgaaatcaacctcaatgacacatttgacacctttgccttagatttttcccgagagaagaaactgctagaatgtctggattaccttacagctcccaaccctcccacaattagagaagagctctgcacagcttcatatgacaccatcactgtgcattggacctccgatgatgagttcagcgtggtctcctacgagctccagtacaccatattcaccggacaagccaacgtcgttagtctgtgtaattcggctgatagctggatgatagtacccaacatcaagcagaaccactacacggtgcacggtctgcagagcggcaccaagtacatcttcatggtcaaggccatcaaccaggcgggcagccgcagcagtgagcctgggaagttgaagacaaacagccaaccatttaaactggatcccaaatctgctcatcgaaaactgaaggtgtcccatgataacttgacagtagaacgtgatgagtcatcatccaagaagagtcacacacctgaacgcttcaccagccaggggagctatggagtagctggaaatgtgtttattgatagtggccggcattattgggaagtggtcataagtggaagcacatggtatgccattggtcttgcttacaaatcagccccgaagcatgaatggattgggaagaactctgcttcctgggcgctctgccgctgcaacaataactgggtggtgagacacaatagcaaggaaatccccattgagcctgccccccacctccggcgcgtgggcatcctgctggactatgataacggctctatcgccttttatgatgctttgaactccatccacctctacaccttcgacgtcgcatttgcgcagcctgtttgccccaccttcaccgtgtggaacaagtgtctgacgattatcactgggctccctatcccagaccatttggactgcacagagcagctgccgtgagcgtctggccacatggagctgctttctggggaacagtaaggttcaggccactatttaggggactgagaaagcacaggcttcatgagtgtaatgaaatctcaccagaagtgtcccgaaatcggctcagatagggctcaaaacaagagattcctctccttttactgtgtcttgtattaagtacgggctttaataatttctttaatttttttgtatttagaggaaaatctatagattatttataagagaaacataatcaggattacaacttttaggaattacttggttttgcacattaagaggcccataagtttatcagctatttacaaccttcatttcatcacaatctgtgggcttacaaaaaaacaaaaacttttgtagttttgtatgttactcatcttcttacctgatatcccatgatgatcccatggtaggtcttctcacctcgatggtgcataacaggatgtgtttgaacctagtaggggaggaaacaggctttcttactctggtttaatttgaagtgttttaattgtgatgtcaaaaagttgtatcagatcaactaaaatggagagcaagacagagaatgaaaagagttgattttggacctcggaccttgccgtggctaaatctttaccttctcatagctgatgggataatgttggaaagaaaggttctgaatcctttggccacattttgccctgcttctctcagggttaagggttctggaagaacattaagaatgagattgcaattgaaaatagtcattttgaatcctattgattattcaaaaattcaggctgatttgtcttttatcagaggtaggattctgttttatagtatagaatctacttatccttccttttaatagttcctttagacctgtgaaatttcttcactacatttaatagttctcctatttcccgctcccccatatcaattttccttttgtctccggggctgagtaaataaacatgttctgtcataaaaaaa

SEQ ID NO: 12925 - DNA, 3352 bp, Homo sapiens
atttcgccgggttgcttttgtcttgcgggctcctgtcgggttcggtgtttccgctctgaagactgcgacgcgggctccgatgcagctcgctccctgccggatgggtcatgggattctaaacatgaggcagatagctgatcagcttccttgggttttgctgatgacacaagagagctttgcctgaagatggaaacactggagtcagaactgacctgccctatttgtctggagctctttgaggaccctcttctactgccctgcgcacacagcctctgcttcaactgcgcccaccgcatcctagtatcacactgtgccaccaacgagtctgtggagtccatcaccgccttccagtgccccacctgccggcatgtcatcaccctcagccagcgaggtctagacgggctcaagcgcaacgtcaccctacagaacatcatcgacaggttccagaaagcatcagtgagcgggcccaactctcccagcgagacccgtcgggagcgggcctttgacgccaacaccatgacctccgccgagaaggtcctctgccagttttgtgaccaggatcctgcccaggacgctgtgaagacctgtgtcacttgtgaagtatcctactgtgacgagtgcctgaaagccactcacccgaataagaagccctttacaggccatcgtctgattgagccaattccggactctcacatccgggggctgatgtgcttggagcatgaggatgagaaggtgaatatgtactgtgtgaccgatgaccagttaatctgtgccttgtgtaaactggttgggcggcaccgcgatcatcaggtggcagctttgagtgagcgctatgacaaattgaagcaaaacttagagagtaacctcaccaaccttattaagaggaacacagaactggagacccttttggctaaactcatccaaacctgtcaacatgttgaagtcaatgcatcacgtcaagaagccaaattgacagaggagtgtgatcttctcattgagatcattcagcaaagacgacagattattggaaccaagatcaaagaagggaaggtgatgaggcttcgcaaactggctcagcagattgcaaactgcaaacagtgcattgagcggtcagcatcactcatctcccaagcggaacactctctgaaggagaatgatcatgcgcgtttcctacagactgctaagaatatcaccgagagagtctccatggcaactgcatcctcccaggttctaattcctgaaatcaacctcaatgacacatttgacacctttgccttagatttttcccgagagaagaaactgctagaatgtctggattaccttacagctcccaaccctcccacaattagagaagagctctgcacagcttcatatgacaccatcactgtgcattggacctccgatgatgagttcagcgtggtctcctacgagctccagtacaccatattcaccggacaagccaacgtcgttagtctgtgtaattcggctgatagctggatgatagtacccaacatcaagcagaaccactacacggtgcacggtctgcagagcggcaccaagtacatcttcatggtcaaggccatcaaccaggcgggcagccgcagcagtgagcctgggaagttgaagacaaacagccaaccatttaaactggatcccaaatctgctcatcgaaaactgaaggtgtcccatgataacttgacagtagaacgtgatgagtcatcatccaagaagagtcacacacctgaacgcttcaccagccaggggagctatggagtagctggaaatgtgtttattgatagtggccggcattattgggaagtggtcataagtggaagcacatggtgagacacaatagcaaggaaatccccattgagcctgccccccacctccggcgcgtgggcatcctgctggactatgataacggctctatcgccttttatgatgctttgaactccatccacctctacaccttcgacgtcgcatttgcgcagcctgtttgccccaccttcaccgtgtggaacaagtgtctgacgattatcactgggctccctatcccagaccatttggactgcacagagcagctgccgtgagcgtctggccacatggagctgctttctggggaacagtaaggttcaggccactatttaggggactgagaaagcacaggcttcatgagtgtaatgaaatctcaccagaagtgtcccgaaatcggctcagatagggctcaaaacaagagattcctctccttttactgtgtcttgtattaagtacgggctttaataatttctttaatttttttgtatttagaggaaaatctatagattatttataagagaaacataatcaggattacaacttttaggaattacttggttttgcacattaagaggcccataagtttatcagctatttacaaccttcatttcatcacaatctgtgggcttacaaaaaaacaaaaacttttgtagttttgtatgttactcatcttcttacctgatatcccatgatgatcccatggtaggtcttctcacctcgatggtgcataacaggatgtgtttgaacctagtaggggaggaaacaggctttcttactctggtttaatttgaagtgttttaattgtgatgtcaaaaagttgtatcagatcaactaaaatggagagcaagacagagaatgaaaagagttgattttggacctcggaccttgccgtggctaaatctttaccttctcatagctgatgggataatgttggaaagaaaggttgtgaatcctttggccacattttgccctgcttctctcagggttaagggttctggaagaacattaagaatgagatgcaattgaaaatagtcattttgaatcctattgattattcaaaaattcaggctgattgtcttttatcagaggtaggattctgttttatagtatagaatctactttatcccttccttttaatagttcctttagacctgtgaaatttcttcactacatttaatagttctcctatttcccgctcccccatatcaattttccttttgtctccggggctgagtaaataaacatgttctgtcacaaatagcagcaccactttggattgattttgctctccaggacatcagcacatggccctgatcagcactaccacatccaaacataagtcactgaaaaacacttaatatttatgagttggtaatgacaagggacattgtataaagtactatttgctagattcatgcctcaaaagttattataaacagacctttattaaacacatcttgaaagatgtagaagtccctctatagtctagtatagtttacaatagagttgtaagaccaaaaaaaaaaaaaaaaaaaaa

SEQ ID NO: 12926 - DNA, 4724 bp, Homo sapiens
cgcctaagcggcggaactctggagagtgcggaacctaggatcctaggaaactgaaggcaacggaacctgggggcgatggaatccgggagcggtggaacccggagcctgtagaacttgaatctagaggaacctgacagcggcgccgagggggccacccggactctgtttggaacggaagcacagtgtccgccgcttcctggttgcgggtcagcgcccaggtcctgggctggccgccgggatgttgccctacacagtgaacttcaaggtgtcggcgcgcaccctcacgggggccctcaacgcccacaacaaggcggcggtggactggggctggcaaggtttaattgcttatggatgtcattcacttgtggtagtgattgattccattactgcccaaactcttcaagttttagaaaagcataaagctgatgttgtaaaggttaaatgggccagggaaaactatcaccataacattggctcaccatattgcttacggttagcttctgctgatgtcaatgggaagatcatcgtctgggatgtagcagcaggagtagctcagtgtgagatccaagagcatgccaagcctatccaggatgttcagtggttgtggaatcaagatgcttcccgcgatttactgcttgctatccacccgccaaattacattgtgctctggaatgccgacactggcaccaaactatggaagaagagctatgcagataacattctttctttttcttttgacccttttgatccctcacatttaactttgcttaccagcgagggtattgttttcatctcagacttctccccatccaagcctccctcaggccctgggaaaaaagtttacatatccagcccacactctagcccagctcataacaagctggccacagccacaggtgccaagaaagctctaaataaagtaaaaattttaatcactcaagagaaacctagtgctgaattcataactctcaatgattgccttcagttggcatacctgccttcaaaaaggaatcacatgttgttgctctatcctcgagagattttaatccttgaccttgaggtgaatcagacggtgggtgtgattgcaatagaacgcacaggagttccatttttacaggtaataccctgctttcagcgtgatggtttattttgtctacatgaaaatggttgtataactttacgtgttcgaagatcttataataacatttttaccacttcaaatgaggaaccagatccagatccagttcaggagcttacctatgatttacgaagccagtgtgatgcaatcagggtgacaaaaaccgtccgtcccttcagtatggtgtgctgtcctgtcaatgagaatgcagccgccctcgtagtgagtgatggcagggtcatgatatgggaactcaagtctgcagtttgtaatcgaaattcacggaacagtagttctggtgtgtcacctttatattcaccagtgtctttctgtggaattcctgtaggagtgctacagaataaactcccagacctttccttagataacatgattgggcaaagtgcaattgctggggaagaacatcccagaggttcaattctgcgggaagtgcacctcaagttcctgctgacgggactgctttcaggactgcccgcaccacagtttgctattcgtatgtgtccaccgttgaccacaaaaaacatcaagatgtatcagccactgctggctgttggtacaagtaatggttctgtcctggtgtaccatctcaccagtggtctgctacacaaagagttaagcatccactcatgtgaagtcaagggtattgaatggacaagtttgactagttttctttcttttgctacctcaacaccaaacaatatgggattagtgagaaatgaacttcaactggttgatcttccaacaggtaggagcattgcttttcgtggtgaaagaggcaatgatgaatctgccatcgaaatgattaaagtatctcatttgaagcagtatttggcagtcgtattcagagataaacccctggagctatgggatgttaggacttgtacccttcttagagagatgtccaaaaacttccctacaataactgctttggagtggtcaccatctcacaacttgaagagcctgagaaagaagcaacttgcaactcgagaggccatggcccgccagaccgtagtctcagacacagagctgagtattgttgaatcatctgtgatcagcttgctgcaggaggcagaaagtaaatctgaacttagtcagaacatctctgcccgggaacattttgtatttaccgatattgatggccaagtgtatcatctcactgttgaaggaaactcagtaaaagacagtgctcggattccaccagatggaagtatgggtagtattacctgcatcgcttggaaaggtgatacattagtgcttggagatatggatggaaatttaaatttctgggacttgaaaggcagagtatccagaggaatacccacacaccgaagttgggtgaggaagattcgttttgctcctggtaaaggaaatcaaaaattaatagcaatgtacaatgatggagctgaagtgtgggatactaaagaggttcagatggtgagcagtttaagaagtggcagaaatgtgacctttcgtatattggatgtggactggtgtacgtcagataaagtgatcttggcctcagatgatgggtgcatcagagtcctagagatgtctatgaagtctgcgtgctttagaatggatgaacaagagttaaccgagcctgtgtggtgcccctatctccttgttccaagggcctctcttgccttgaaagccttcttattacaccagccttggaatggacagtattctttggacatttctcatgttgactatccagaaaatgaagaaataaagaatctcctccaagaacagttgaattcattgtctaatgacataaagaaactgttgcttgatccagaattcactctcttgcagaggtgcctgcttgtttcaaggctctatggtgatgaatcggagctgcacttctggactgtcgctgcccactacctgcacagcttatcccaggaaaagtcagccagcacaacagctcctaaagaagctgctcctcgagacaaactgagcaacccactggatatatgctatgacgtgctctgtgaaaatgcctactttcagaaatttcagctagaaagggttaatctacaggaagtgaaacggtcaacttatgatcatacaaggaaatgtacagaccagctactgctcttgggtcaaacagacagagctgtgcagttgctgttggaaacaagtgcagataaccagcattattactgtgattcactgaaagcctgtttagtcactactgtcacctcgtcaggcccctctcagagcaccattaagttggtggcaacgaatatgattgccaatggcaaattggcagagggcgttcagttgctctgcctgatagataaggctgcagacgcctgccgctacctgcagacatacggcgagtggaatcgggctgcatggctggcaaaagtccgtttgaatcctgaggagtgtgccgatgttttaaggcggtgggttgaccacctttgttctccacaagtcaatcagaaatcaaaggctctcctggttctcctctctctgggctgcttttttagcgtggcagagacgcttcacagcatgagatactttgatagagcagccttatttgtggaagcttgcctcaagtatggagcatttgaagtcactgaggacacagagaaactcatcactgctatatatgcagattatgcccggagtttgaagaacctcggttttaagcagggagcagttctctttgcttcaaaagccggagcagctggcaaagacttattgaatgagcttgagtcccccaaggaagaacccattgaagagtgacagcttaataaatgccagggaatctgacctggaaggcagatgggagggggctggtctggctgtggccaccgtcacagtccaggatgaagaggagtacagggtcctgtgagctgtttgaccactgttctaagactatgtgtgcccaaaagcacataagcatctatgttgagagtaagtttgtatcctgcgttggtctcagaaagaacgtgaatgcttaagattttgaaagtacataatattttatactttgggagagagctttaagagtccctggaaatactttttaatttttttaacttaaaattcaagagactgaatcacttttctcattgattaaatgtaaagattattgagaaacctatagtaaatgaaatttgtgagatgttttctcaaatatatgctgtgcctgtacttatatacagtctttcaagagagatacaaacaaggcagaaacatttaaactagtattaaaggtagtttaccaaagcattttttgttttcttaccttgaaaacacagaaccgttaattccttggtttaagcagttgctaagttttgtaattttaggctcagaggaccataggaggttttaagatttatgtttagtccgataggtgaggtctttgatattttgaattttaactccttttatgatacatcacagtaacctcatttttgaagtctttctttgtactttaatgttctctctgttctaatagttgaagtatgagatgtaactattataaactgttgctgaaaacataaatgtctgtaacttacaaacatgataaataaattaaaaattccatcca

SEQ ID NO: 12927 - DNA, 3985 bp, Homo sapiens
aacaagcgacctgtttggcaaggaatacagcatccttctgagagcctcttctcgacactatcccacagaccaggacttcctcatgggaaagagcacttaggatcttgctatcagctgccctaaacttttgctgagccaaaataagactttgatgcagaactgaacaagatatttcatttttgtgtgttttaatcttcctggttgcagtcttagttgttcagccctgagaattttgagccacatttgttgctattatttttgcatgcacttttcaaaatgattgacttaagcttcctgactgaagaggaacaagaggccatcatgaaggttttgcagcgggatgctgctctgaagagggccgaagaagagagagtcagacatttgcctgaaaaaattaaggatgaccagcagctgaagaatatgagtggccaatggttttatgaagccaaggcaaaaaggcacagggacaaaatccatggcgcagatatcatcagagcatctatgagaaagaagaggccccagatagcagctgagcagagtaaagacagagaaaatggggcaaaggaaagctgggtgaataatgtcaacaaagatgctttccttcctccagagctggctggcgttgtagaagagccagaagaagatgcagcaccagcaagcccgagttccagtgtggtaaatccagcttccagtgtgattgatatgtcccaggaaaacacaaggaaaccaaatgtgtctccagagaagaggaagaatccgtttaatagctccaagttgccagaaggtcactcatcacaacaaactaaaaatgaacagtcaaaaaatggaagaactggtttatttcagacttcaaaagaggatgaattgtcagagtcaaaagaaaagtcaactgtcgcagatacttcaatccaaaagttagagaaatcaaagcagactttgccaggcctttcaaatgggtcccaaatcaaggctccaatccccaaagccaggaagatgatctacaaatcaactgatttaaacaaagatgataaccagtcttttcctagacaaaggacagactccctgaaagcgagaggggctccgagagggatcctcaagcgcaactccagttccagtagcacagactcagaaacccttcgttataatcacaactttgaacccaaaagcaaaattgtgtcacctggcctaaccatccatgagagaatttctgagaaggagcattctttagaagacaactcttccccaaactccctggagccattaaagcatgtgagattctctgcagtgaaggatgagcttccacagagtcctgggctaatccatggtcgggaagtaggagaatttagtgttttagaatctgacagattgaaaaatggaatggaagatgcaggggacacagaagagtttcagagtgaccctaagccttctcaatacagaaagccttcgctttttcatcaatcaacctcaagcccatatgtatcaaaaagtgaaacacatcagccaatgacttctggttcttttccaattaatgggctgcattctcattcagaagttttaactgcaagaccacagtctatggagaattcaccaaccatcaatgaacccaaagataaatcatcagaattaacaaggcttgaatctgtattacccagaagccctgctgatgaactgtctcattgtgttgagcctgagccatctcaggtgccaggtggcagttctagagaccgtcagcaaggttcagaagaagaacccagtcctgttttgaaaactttggaaaggagtgccgctaggaaaatgccttccaaaagtctagaagacatttcatcagattcatcaaatcaagcaaaagtagataatcagccagaagaattagtgcgtagtgctgaagatgatgagaaaccagatcagaagccagttacaaatgaatgcgtaccaagaatttccacagtgcctacacaacctgataatccattttctcaccctgacaaactcaaaaggatgagcaagtctgttccagcatttctccaagatgaggtgagtggcagtgtgatgagtgtttatagtggagactttggcaatctggaagttaaaggaaatattcagtttgcaattgaatatgtggagtcactgaaggagttgcatgtttttgtggcccagtgtaaggacttagcagcagcggatgtaaaaaaacagcgttcagacccatatgtaaaggcctatttgctaccagacaaaggcaaaatgggcaagaagaaaacactcgtagtgaagaaaaccttgaatcctgtgtataacgaaatactgcggtataaaattgaaaaacaaatcttaaagacacagaaattgaacctgtccatttggcatcgggatacatttaagcgcaatagtttcctaggggaggtggaacttgatttggaaacatgggactgggataacaaacagaataaacaattgagatggtaccctctgaagcggaagacagcaccagttgcccttgaagcagaaaacagaggtgaaatgaaactagctctccagtatgtcccagagccagtccctggtaaaaagcttcctacaactggagaagtgcacatctgggtgaaggaatgccttgatctaccactgctaaggggaagtcatctaaattcttttgttaaatgtaccatccttccagatacaagtaggaaaagtcgccagaagacaagagctgtagggaaaaccaccaaccctatcttcaaccacactatggtgtatgatgggttcaggcctgaagatctgatggaagcctgtgtagagcttactgtctgggaccattacaaattaaccaaccaatttttgggaggtcttcgtattggctttggaacaggtaaaagttatgggactgaagtggactggatggactctacttcagaggaagttgctctctgggagaagatggtaaactcccccaatacttggattgaagcaacactgcctctcagaatgcttttgattgccaagatttccaaatgagcccaaattccactggctcctccactgaaaactactaaaccggtggaatctgatcttgaaaatctgagtaggtggacaaatatcctcactttctatctattgcacctaaggaatactacacagcatgtaaaagtcaatctgcatgtgcttctttgattacaaggcccaagggatttaaatataacaaaatgtgtaatttgtgactctaatattaaataagatatttgaacaagctaggaaaattgaatttctgctgctgcttcaaagaaaaagctgccccagagcattaaacatggggtattgttaagaagcaaaatgttcttgtttgccatcatgtgtttcacaccacaattctgtgccacagttaagagggtctggtacccttgcaggacctttgtaggttgtgggaaaaagtcgcagaaagatactcaaagtggagcagggaatggagacagacatcagtgatgataaaaaaaaaaatggaccttaagaaactatttactctgtaatctctaataaaatatggaattccatattagggcaatgagactgaaactactggtgtttttctgccttgagaaaacaaacagttaaaacaagcctcaaatgtattttagtgccacccactggccataggtacaattcagttgttggcttgttttgacttaattctaaaataggtctcaagcctgtatttttatgagtttatttttttaaaaccctgcatatatatgattgtttttcttataactttactatatgaaagcagcataagagtagtcacaaacatgttttgcaacaaagttttaattagaatgtaagttgctcagttatactgttcttcttatgtatgtaaaattttcgtattttgtaaaaacccttagaataaattatcatttgatttaaattgtattagaaaattagcgtgacttctcattttaaataaaatattttaggaattctaaacatctaaaaa

SEQ ID NO: 12928 - DNA, 4620 bp, Homo sapiens
aacaactctgctcatggtgattacatgcaaaataacgagagcagcttaatagagcaagctccaatacctcaggacggacttaccgtggcacctcacagagctcagcgagaagctgtacacattgagaagataatgttgaaaggagtccagagaaaaagagctgacaaatactgggagtacactttcaaagtaaattggtctgatctttcagtcacaacagtaacaaaaacccaccaagaactacaggaatttctactgaagcttccaaaggaactgtcttcagagacttttgacaagaccatcttaagagccctgaatcagggttccttgaaaagggaggaacggcgacatcctgacctagagcccatcctaaggcagctattttcaagttcatcacaagcttttctacaaagtcagaaagtacacagcttctttcagtccatatcatcagactccctacacagtatcaataacttacaatcctctctgaagacttctaagatattagaacacttaaaagaagacagctctgaagcttcaagtcaagaagaagatgtgttgcagcatgccataatccacaagaagcatactgggaaaagtcccattgtgaacaatattggtacaagttgttctccattggatgggcttaccatgcaatattctgaacagaatggaattgtggattggaggaagcaaagctgtaccaccattcaacacccagagcactgtgtgacctcggctgaccagcattctgctgaaaaacggagtttatcttcaataaataagaagaaaggaaagccacaaacagaaaaggagaaaattaagaaaactgacaacagattgaatagtagaataaatggtattagactctccactcctcagcatgcccatggtggtactgtgaaagatgtgaatttggacattggctctggacatgacacatgtggagaaacatcttcggagagttacagttctccatctagtccccgacatgatggaagagaaagttttgaaagtgaagaagagaaagacagagacacagacagcaattctgaggattctgggaatccatcaacaactaggtttacaggttacggttctgtcaaccagactgtcactgtcaagccacctgttcaaattgcttcactaggaaatgagaatggaaaccttttagaagatcccttaaactcacccaagtatcagcatatttcttttatgccaacgttacactgtgtcatgcacaatggtgcccagaagtctgaagttgtcgttcctgcacccaaacccgctgatggcaaaaccatagggatgcttgttcctagtcctgttgctatttctgcaataagggagtctgcaaattcaacccctgttggaatactagggccaacagcttgcactggagaatcggaaaagcaccttgagttactggcttcccctttacctattccatcaaccttccttccacacagtagtactcccgctttgcatcttacagttcagaggctaaagttgccaccaccacagggatcttctgagagctgcacagttaacatcccacaacaaccacccggaagcctgagcatcgcatcaccaaacactgcctttattcctatccataacccaggtagtttcccaggctctcctgttgctaccacggaccccatcacaaaatctgcatcccaagtggtaggactcaatcaaatggtgcctcaaattgagggaaacacagggacagtccctcagcctaccaatgtgaaggtagttcttccagcagctggcctctcagctgctcagccaccagcttcctaccccttaccaggctctccccttgctgccggcgtgttacccagccagaactccagtgtgctcagcacagcagcaacttctccccagccagcgagcgcaggtatcagccaggcccaggcaactgttcctcctgcagttcctacccacaccccaggccctgccccgagcccaagccctgccttgacacacagtaccgcgcagagtgacagcacctcttacatcagtgctgtggggaacacgaacgctaatgggacagtagtgccaccgcagcagatgggctcaggtccttgtggttcttgtgggcgaaggtgcagctgtgggaccaatggaaaccttcagctaaatagttactattatcctaatccaatgcctggaccaatgtaccgagtcccttcattctttactctgccatccatttgcaatggcagctacctcaaccaagcacatcagagcaatggaaaccaacttcctttttttctgcctcagactccatatgcaaatggactggtacatgacccagtcatggggagccaagccaactatggcatgcagcagatggcaggatttgggagattctatcctgtatatccagcacctaacgtagttgccaacaccagtggttcggggcccaagaagaatgggaatgtctcatgttacaattgtggtgtaagcggacactatgcacaggactgtaagcagtcgtccatggaggccaatcaacaaggcacttacagactgagatacgcacctcccctccccccttctaatgatacgttggattctgcagactgaaacgagtaaagcttgcctacttaatacactcaagtgtggggagtcatggggtgtggaggggaggaaaggaaaggtattttgtttctttgtctatacatttcctagatttctatgcagttgggatttttcatttctcttgtaccaatgtccaaaacaagaaagaatgcaatgcttttgagcctctggtctcctggttcaacaacaggcttatatgtatgatacatgtaatttaaaccttcagacaaacttaaatgttggtgcgtgcttttttttttttttttacactgaatacttgctgtgtgcaatgtttactgaatctttaaaactgtgtatttgaccttttttttacaacactggtgacagtcatatggttttgaaaaaaaaaagaaattttgcttcttcccagcttttctcactttcaccctaaacgacacttcctccccagccagcctcactctgtctccggcccgcagcaggagcagccagcagtgcattcaccccacttttgtaaactgctctgcatataaaccaagggcagaatgtttcaccctgatcttatgggaggaatcaaactcccaaaatagtgtgtatatatgtaataaacagcgtcacgtaaatacatatatgcagtgcttgttgtccaaatagaaatgaaaataagtggaagagagaggaagaagtcaaaccatatgaaactgaaaaaatatgacgtacgaaatggacaaaaagctttttctgaaaccaactttttacttccatcatccttttttagcctgttgcttcagagagacacaaagtgaacacactggtgtgaatgtcgctctctgtgtgcttgtgtttgtaatgaaagtctacagccaattttacttgtctaccaccgtgttgtgctcaaagagacactacttgagtgaagatttcttctttccctgtaccagctgttacagtgttacgttgtgtttaaaatgtgtatggtttattgcaatctgaacagagctatgggtttctaccataagtcaggttgtttgttccctaacctgtctctcgtagcaaagtcacttttataacagtttaccactatgcttgattataatgtgaaaggcggaattctgagtgtgttaagatggtattaatcatgtcggtgtcatgtcactaagtttaatgctgctgtttttaaaaaaaaaaaaaagtttttttaaaaagccaatctatgtactaaattgcttccaggtaatttttgatttcctaaagtgcactgaggttatctggaagattgggtgtattttttggtgactgctgcattcatcagcaatgaacagtttccactgtatagtcctaggggtcagggggtgggggtttcattttccattcctcagcacagagcagaaatgatagatttttattgtttggagtaacgttggtatgcagcagaggaacgtaaacatttggtcttggttcagaagcctaacagattgctagacaagagaaaaaacttgaagaaaaaagaagcttaatttcatgcttcataagtagcatttatatttatagcaccaatgtacattttgaaactttctttcaggggtgggagttatggggaaggggtgggtgtgaaggggtagatgaaagctttaatttagaaagaaagttcaagtaaaggaaattattttgattaaatatattttatttgatctgggtatttttggaccacattattaaattaattgttaagctgcagttgagttgttcaagtgagagttttgataagccacttatgggccgcgttgtgaatcacttgccagttgtactttatggagcttattttatgatttaaaatactgtactgtacataggaggtatgttaccttctccttatttgtatgtttaccatatactttgatatttgaaatgttatgtactggaaaggccacttatatttctagaacagattggattttatgcaaccttttttccttgaattaacagcaataaaaaaatgaaaaacagcttaaaaaaaaaaaaaaaaaa

SEQ ID NO: 12929 - DNA, 4441 bp, Homo sapiens
ctctgaggagacactttttttttcctccctccttccctcctctcctcctcccttcccttcccctctcctcccctctctcctccttcccccctcggtccgccggagcctgctggggcgagcggttggtattgcaggcgcttgctctccggggccgcccggcgggtagctggcggggggaggaggcaggaaccgcgatggcgcctcagaagcacggcggtgggggagggggcggctcggggcccagcgcggggtccgggggaggcggcttcgggggttcggcggcggtggcggcggcgacggcttcgggcggcaaatccggcggcgggagctgtggagggggtggcagttactcggcctcctcctcctcctccgcggcggcagcggcgggggctgcggtgttaccggtgaagaagccgaaaatggagcacgtccaggctgaccacgagcttttcctccaggcctttgagaagccaacacagatctatagatttcttcgaactcggaatctcatagcaccaatatttttgcacagaactcttacttacatgtctcatcgaaactccagaacaaacatcaaaaggaaaacatttaaagttgatgatatgttatcaaaagtagagaaaatgaaaggagagcaagaatctcatagcttgtcagctcatttgcagcttacgtttactggtttcttccacaaaaatgataagccatcaccaaactcagaaaatgaacaaaattctgttaccctggaagtcctgcttgtgaaagtttgccacaaaaaaagaaaggatgtaagttgtccaataaggcaagttcccacaggtaaaaagcaggtgcctttgattcctgacctcaatcaaacaaaacccggaaatttcccgtcccttgcagtttccagtaatgaatttgaacctagtaacagccatatggtgaagtcttactcgttgctatttagagtgactcgtccaggaagaagagagtttaatggaatgattaatggagaaaccaatgaaaatattgatgtcaatgaagagcttccagccagaagaaaacgaaatcgtgaggatggggaaaagacatttgttgcacaaatgacagtatttgataaaaacaggcgcttacagcttttagatggggaatatgaagtagccatgcaggaaatggaagaatgtccaataagcaagaaaagagcaacatgggagactattcttgatgggaagaggctgcctccattcgaaacattttctcagggacctacgttgcagttcactcttcgttggacaggagagaccaatgataaatctacggctcctattgccaaacctcttgccactagaaattcagagagtctccatcaggaaaacaagcctggttcagttaaacctactcaaactattgctgttaaagaatcattgactacagatctacaaacaagaaaagaaaaggatactccaaatgaaaaccgacaaaaattaagaatattttatcagtttctctataacaacaatacaaggcaacaaactgaagcaagagatgacctgcattgcccttggtgtactctgaactgccgcaaactttatagtttactcaagcatcttaaactctgccatagcagatttatcttcaactatgtttatcatccaaaaggtgctaggatagatgtttctatcaatgagtgttatgatggctcctatgcaggaaatcctcaggatattcatcgccaacctggatttgcttttagtcgcaacggaccagttaagagaacacctatcacacatattcttgtgtgcaggccaaaacgaacaaaagcaagcatgtctgaatttcttgaatctgaagatggggaagtagaacagcaaagaacatatagtagtggccacaatcgtctgtatttccatagtgatacctgcttacctctccgtccacaagaaatggaagtagatagtgaagatgaaaaggatcctgaatggctaagagaaaaaaccattacacaaattgaagagttttctgatgttaatgaaggagagaaagaagtgatgaaactctggaatctccatgtcatgaagcatgggtttattgctgacaatcaaatgaatcatgcctgtatgctgtttgtagaaaattatggacagaaaataattaagaagaatttatgtcgaaacttcatgcttcatctagtcagcatgcatgactttaatcttattagcataatgtcaatagataaagctgttaccaagctccgtgaaatgcagcaaaaattagaaaagggggaatctgcttcccctgcaaacgaagaaataactgaagaacaaaatgggacagcaaatggatttagtgaaattaactcaaaagagaaagctttggaaacagatagtgtctcaggggtttcaaaacagagcaaaaaacaaaaactctgaaaagctctaaccccatgttatggacaaacactgaaattacattttagggaattcatcctctaagaattatgtttttgtttttaatcatatgttccaaacaggcactgttagatgaagtaaatgatttcaacaaggatatttgtatcagggttctacttcacttcattatgcagcattacatgtatatcacttttattgatgtcattaaaacattctgtactttaagcatgaaaagcaatatttcaaagtatttttaaactcaacaaatgtcatcaaatatgttgaattgatctagaaattatttcatatataaatcagaatttttttgcatttatgaacggctgtttttctactttgtaattgtgagacattttcttggggagggaaaattggaatggttcccttttttagaaattgaagtggtcttcatatgtcaactacagaaaaggaaaaaaatagaaattgaaggatttttatgaaattatattgcattactatttgcagtcaaactttgatccttgtttttgaaatcatttgtcaattcggaatgaaaaattataatgtaattttacattacataagttccttttacaattaaaaaatagcacttcttcatcttatgcctgtttgagaagatattaaattttcacattgttgacagtgaaatgctatgttggtttataagattacagaccatttgttttcatgtggataattttagtgcattgctcacccggtatgttttttttttttaacttgaacattttgcttgttttgtttttcttttttaattagataatcacacggaaaattaagctgttcatatctttaaattaggattgcaaaccaaggaaagaacgcatttgagattttaagatgtcacttataaggggagaagtgttcttaaaaagtcaaccagaaaactgttatgccttttatttgtttgcaaggatgtctttgtaatgtgtttcatgaatagaatatccaatagagataagctgacttgaatcattttgagcaattttgccctgtgttatatgtgtttcacgcacatatttgcagttggattttctccaacagaaagtggattcactactggcacattaacaagcaccaataggtttttattccaactccgagcactgtggttgagtaacatcacctcaattttttattatccttaaagatattgcattttcatattctttatttataaaggatcaatgctgctgtaaatacaggtatttttaattttaaaatttcattccaccaccatcagatgcagttccctattttgtttaatgaagggatatataagctttctaatggtgtcttcagaaatttataaaatgtaaatactgatttgactggtctttaagatgtgtttaactgtgaggctatttaacgaatagtgtggatgtgatttgtcatccagtattaagttcttagtcattgatttttgtgtttaaaaaaaaataggaaagagggaaactgcagctttcattacagattccttgattggtaagctctccaaatgatgagttctagtaaactctgatttttgcctctggatagtagatctcgagcgtttatctcgggctttaatttgctaaagctgtgcacatatgtaaaaaaaaaaaaaaaaagattattttaggggagatgtaggtgtagaattattgcttatgtcatttcttaagcagttatgctcttaatgcttaaaagaaggctagcattgtttgcacaaaaagttggtgattcccaccccaaatagtaataaaattacttctgttgagtaaactttttatgtcatcgtaaaagctggaaaaatccctttgtttctatttataaaaaaagtgcttttctatatgtacccttgataacagattttgaagaaatcctgtaagatgataaagcatttgaatggtacagtagatgtaaaaaaaattcagtttaaaagaacatttgtttttacattaaatgtttatttgaaatcaaatgattttgtacataaagttcaataatat

SEQ ID NO: 12930 - DNA, 4955 bp, Homo sapiens
tctcctcctaccggtcgggtgccccggggcgttccctctgccgctgcttctcggcgcggttcctacccggccgctccccgaggcgcgggctctggcggcctcgaccgactaggacgccccgtgcgccgcccgcgggccgccgcctccctgggcgcgcggggccagcatggagctcttccaagccaaggaccactacatcctgcagcagggcgagcgcgcgctgtggtgcagccgccgcgacggcggcctccagctccgacccgctactgatctacttcttgcctggaatcccatttgtttggggttggtagaaggtgttattgggaaaattcaacttcattcagatcttccatggtggcttattctaattcggcagaaagcattggtgggcaaactcccaggagaccatgaggtctgtaaagttaccaaaattgctgtgctctcactttctgaaatggaacctcaggatcttgagctagagctctgtaagaagcatcattttggtattaacaaaccagagaagatcataccatctcctgatgactcaaagtttctactgaagacctttacgcatattaaatccaatgtgtctgctcctaataaaaagaaagttaaggaaagtaaagagaaggagaagttggagaggagattacttgaagagttgctgaagatgttcatggactcagaatccttttattatagcttgacctatgacctgaccaattccgtgcagaggcagagcactggggagagggacggtcggcccctctggcagaaggttgatgaccgatttttttggaataaatacatgatacaagatcttactgagattggtactccagatgtggacttttggattatccccatgatccaaggttttgtgcagattgaagaacttgtggttaattataccgaatcatctgatgatgagaaaagcagcccagagaccccccctcaggagtccacctgtgtagatgatattcacccacgatttctagtggctctcatttcacgccgaagtaggcacagagcaggaatgcgctataaacgaagaggagtggataaaaatggaaatgttgccaattatgtggagactgagcagttgattcatgttcataatcataccctgtcatttgttcaaacacgaggctctgtgcctgtcttttggagccaggttgggtatcgatataacccaagaccgcggctggacagaagtgaaaaggaaactgttgcctatttctgtgcccatttcgaagaacaactgaacatttacaaaaaacaggttattattaacttggtagaccaggcaggaagagagaagattattggcgatgcttacctgaagcaagtgttgcttttcaacaactcacacctcacttacgtttcgtttgacttccatgagcactgccgaggaatgaagtttgagaatgttcagacactaacagatgccatttatgacattattcttgatatgaagtggtgttgggttgatgaagctggggtaatatgtaagcaggaagggatttttcgtgttaattgtatggactgcctggatcgcaccaacgtggtccaagctgccatcgcgagagtggtcatggaacagcagctgaaaaaattaggtgtgatgcccccggaacagccattacctgtgaaatgtaatcgcatctaccagataatgtgggccaataatggtgactccattagcagacagtatgctgggacagctgctctgaagggtgactttacaaggacaggagaaaggaagttagcaggagttatgaaagatggagtgaactcagcaaacagatattacctcaaccgatttaaggatgcttataggcaagctgttatagatttgatgcaaggcattccagtgacagaagatctttattccatatttaccaaggagaaagaacatgaagctttgcataaggaaaatcagagaagccaccaggaactaattagccagctcttacaaagttacatgaagttactactgcctgatgatgagaagttccatgggggctgggccctcattgactgtgaccctagcctcattgatgctactcacagagacgtggatgtgctgttactgctttctaactctgcctactacgtggcctattatgatgatgaagttgataaagtaaaccagtatcaacgactaagtctagaaaacctggaaaaaattgaaataggccctgaacccactctttttggtaagccaaagttctcctgcatgcgactgcactacagatacaaagaagcgagtggctatttccacacattgcgagctgtaatgcgtaatcctgaagaggatggaaaagatacccttcagtgcattgcagagatgctgcagatcaccaagcaagccatgggatcggatttacccataattgagaagaaacttgagaggaagagcagtaaacctcacgaagacatcattggtatcaggtctcaaaaccaaggttctttggcccagggaaagaattttttaatgagcaaattttcatctctaaatcaaaaagtgaagcagaccaaatccaatgtaaatattggcaacctccgaaagctaggaaactttaccaaacctgaaatgaaagttaactttctaaaaccaaacttaaaagtaaatctttggaaatcagatagtagtcttgaaactatggaaaacacaggagtgatggataaggttcaggcagagtctgatggggacatgtcttcagataatgactcataccactctgatgaattccttacaaattctaagtctgatgaagacaggcagctagctaactcattagagagtgtagggccaatagattacgttcttcctagttgtggtattattgcctcagcgcctcgattgggcagtcggtcccagtctcttagcagcacagatagtagcgttcatgctccttcagagattactgttgctcatgggagtgggcttggaaaaggccaggagtctcctttgaagaaaagtccttctgctggcgacgtacacatattgactggctttgccaagcctatggatatttactgccacagatttgtgcaagatgcacagaacaaagtgacccacctatcagagaccagatctgtgtctcagcaggctagtcaggaaagaaatcaaatgaccaatcaagtttcaaatgaaacccaatcagaatcaacagaacagacaccttctcggccatcgcaattagatgtctctctttctgcaacaggcccacagtttttgtcagttgagccagcgcattcagttgcatctcaaaaaacccccacctccgcttccagcatgcttgaacttgagacagggcttcatgtaactccttctccttcagagagcagtagcagcagagcagtctctccctttgccaagattcgaagttccatggtccaggttgctagtattacccaagctggattaacccatgggataaactttgcagtgtcaaaagttcagaagagtcctccagaacctgaaatcattaatcaagtccagcaaaatgaacttaaaaagatgtttatacaatgccagacacggataattcagatttagcttttagccataagaatccttccatggcttttatttaaaaatatgaaattttcacctcttggggtattttaattgtactgtctgaacccagggatcacaaattctgttcattggaaagggttttaaacggagtcggaacctgagtagatttccaaattttacagccaggactacagaagtgcatcattctagaatgtgtagacctgagtagcttatacactacagagcactttgcttatttgaaagtaattcagcaacaggtcactttgggatataacctgaacctttttttggagtggggtgggtagactacagtagacacaagggctggacatgcagatgcttaggggattagcgtttttcataatttgttctgtttgtcagttcattcctgtgtgttcttacctctacaaagtaaattacacatttagtttttagtgactttaacatgttactgaagcatttgaatataaagctattttagttttgatggcttaactgttccctgaggagttgagggttattgacactagagaaatgaattctcatttgatcctaattttccccgtattctacttgaacacattaaaaatactctgctgcctatacaatgtaaacctaggagcattaagacttgtcacacagtaaacctgatacatcagaggtgaataccagcacctattaggtttcattttgctgttttcaggaatgtaagaacacccatattggctactggaaattctagaagtcagtcaggttttaatttattccaggaggggcatcctcgacatcttatgtagatgatccacaacttcaaaatttagtctgggcctagtgcagtggctcacacctataatcccaacactttgggaggccaggagttttgagaccagcctgggaaacatctgtctctacaaaaaaatacaaaaattagctgggcatagtggtgcatgcctgtgtttctagctacgcaggaggattgcttgagcccatgagattgaggctgcagtgagctgtgatcgtgccactgacctccagcctgggggacagagcaagaccgtgtctcaaaaacaatttagtctgaaacacaattgtgctgaatctgtctgactataactctgaccacacagaaccagggctgcccctgtaatccccacagtaagaaagttgtatggcatattccaacaagtattggttcgtctggtgtctttagagctttactctgttgaagtgactgattctcaactgaacattatgtcgttactttgataagcattccacttttgttatttattagtgctatcttttttttttacgtgttaaatcttgtgattattaaaataaagtaccattgtaatttaaagtgaaaaaaaaaaaaaaaaaaaaaaaa

SEQ ID NO: 12931 - DNA, 7062 bp, Homo sapiens
gtgaggccctgccgggtcgggctgcgggcggccgggcgcgggcggcgggacagacgggcgcacgcgaggactgacggacggacgcaccgagggcggcgggcacgcacggcccgggccggcgctccaaggcccgcccgggagggccggggccgcgctcagaattttgatttggctgctgggctgctaccttgaaatccaagccctaaaaatgccagcttctttggacttagaagatgacctggataaatgataaaaattaagaaagagattttgaagttttcttattgtcctcttggcatatgcttctggaataatattcaccatggttttggatgaccttccaaacttagaagacatctatacttccttgtgttcatcaacaatggaagactcagagatggattttgactctggactagaagatgatgacacaaaaagtgatagtattttggaggattccacaatttttgtggccttcaaaggaaatatagatgataaagacttcaaatggaaattagatgcaatattgaaaaacgtgcccaatttgttacacatggagtccagcaagctaaaagtacagaaggtggagccctggaacagcgtgcgtgtgacattcaacatcccccgggaagcagcggagcggctacggatccttgctcagagcaacaaccagcagcttcgggatttagggattctctccgttcagattgaaggggaaggtgctattaacctggctttggctcagaaccgaagccaagatgtgagaatgaatggacccatgggagctggaaattcagttaggatggaggcgggatttcctatggcaagtggtccaggaataataaggatgaacaaccctgccactgttatgatacccccgggtggaaatgtgtcatcttccatgatggcaccaggccccaatccagagctgcagcccaggactcctcgccctgcttctcagtcagatgcaatggatccactcctctctgggctccatatacagcagcaaagtcatccctcaggatctttagctcccccacatcacccaatgcagcctgtctctgtgaacagacaaatgaacccagctaattttccccagctgcagcagcagcagcaacaacaacaacagcagcagcagcagcagcagcagcaacaacagcaacagcagcaacaacagttgcaggcaagacccccacagcaacatcagcagcaacagccacagggaattcgaccccagtttactgccccaactcaggtgcctgttcctccaggctggaaccagctgccttctggagcccttcaacctcctccagcccagggttctctgggcacaatgactgcaaaccaagggtggaagaaggctcccttgcccggcccaatgcaacagcaactccaggcaagaccatccttagccacggtacagacgccttcccaccctccccctccatatccctttggcagccagcaagcctcacaagcccacacaaactttcctcagatgagcaacccaggccagttcacagctcctcagatgaagagtttgcagggagggccctctagggtcccaactcccttgcagcagccccacctcaccaacaagtctcctgcctcctcaccctcctccttccagcagggatcccctgcatcctccccaacggttaaccaaactcagcagcagatgggaccaaggccacctcaaaataacccacttccccagggatttcagcagcctgtcagctctccgggtcggaatcctatggttcaacagggaaatgtgccacctaacttcatggtgatgcagcagcaaccaccaaaccaggggccacagagtttacatccaggcctaggaggaatgcctaaacgcctcccacctggcttctcagcaggacaggccaatccgaactttatgcaaggtcaggtgccttcgaccacagcaaccacccctgggaattcaggagcccctcagctgcaagcaaatcaaaatgtccagcatgcaggtggtcaaggagctggtcctcctcaaaaccagatgcaggtgtcccacgggccgccaaatatgatgcagcccagcctcatgggaattcatggcaacatgaacaatcagcaggctggtacttctggggttcctcaagtgaacctcagcaacatgcaaggccagccccagcagggcccaccatctcagctgatgggcatgcaccagcaaatcgtgccctcccagggccagatggtccagcaacaaggaaccttgaaccctcagaaccctatgatcctttcaagggcccagcttatgccacagggccagatgatggtgaaccccccgagccaaaatcttgggccctcgccccaaaggatgaccccacccaagcagatgctttcccagcagggcccacaaatgatggcgccacataaccagatgatggggcctcaggggcaggttttgctccaacagaacccaatgatagagcagattatgaccaatcaaatgcaggggaataagcagcagtttaacactcagaaccagtccaatgtcatgccgggaccagcccagataatgaggggaccaactccgaacatgcaaggaaatatggtgcagtttacgggacagatgtcaggacagatgctgccccagcaagggcctgtgaacaacagtccatctcaggttatgggcattcagggacaggtcctgcggccaccagggcccagcccacacatggcccagcagcatggtgatcctgctactacagcaaataacgatgtcagtttatctcagatgatgcctgatgttagcattcaacaaaccaacatggtcccccctcatgtgcaggccatgcagggaaacagtgcctcgggaaaccacttctcaggccatgggatgtctttcaatgcacctttcagtggagctcccaatggaaatcagatgtcctgtggtcaaaatccaggcttcccagtcaataaggatgtcacgctaacgagcccattgttggtcaacttattgcagagtgacatatctgcaggccattttggggtaaacaataagcaaaataataccaacgcaaataaaccgaagaagaagaaaccccctcggaagaagaaaaatagtcagcaagatctaaacaccccagatactcgcccagctggtctggaagaggctgatcagccaccgttgcctggagaacaaggaattaacttggataactcaggccctaaactgccagaattttcaaaccggccaccaggttatccttctcaaccagttgaacagaggccacttcagcagatgcctcctcaactcatgcagcatgtggcacccccaccacagccaccacagcagcagccacagccacaactgcctcagcagcagcagccaccacctcccagtcagccacagtctcagcagcagcagcagcagcagcaacaaatgatgatgatgctcatgatgcagcaggatcccaaatcagttaggcttccagtctctcaaaatgtccatcctccaaggggccccctgaaccccgactcccagagaatgcccatgcaacagagtggcagtgtgcctgtcatggtcagtctgcaaggacctgcctccgtgccaccatcacctgataaacaaagaatgccaatgcctgtgaatactcccttgggaagcaattcaaggaaaatggtctatcaggagagcccgcagaatccttccagctcgccactggcggagatggcctcactccctgaagcaagtggcagtgaagcaccatctgtcccaggaggcccaaacaacatgccttcacatgtagtacttccccagaatcagttaatgatgacagggccaaaacctggaccatcgcccctttcagcaactcaaggtgcaactccccagcaaccccctgtaaattccctgcccagctctcacggccaccacttcccaaatgtggctgcgccaacccagacatctaggcccaaaacaccaaacagagccagccccagaccctattatcctcagacacccaacaaccgccctcccagcacagaaccttcagaaatcagtctgtcaccagaaagactcaatgcctccatagcaggactcttccctccacagattaatattcctttacctcctaggccaaatttaaacaggggctttgatcaacaaggcctaaatccaacaactttgaaggccatcgggcaagcaccttcaaatcttaccatgaatccttccaattttgctaccccacaaactcacaaattagattctgtggtagtgaattctggaaagcagtctaattctggagcaacaaaacgggcaagtccaagcaacagtcgcaggtctagtcctgggtccagtaggaaaaccactccaagccctgggaggcaaaattcaaaagcccctaaacttactctggcctctcagacaaatgcagccctattgcagaatgtggagttgccgagaaatgtattggtcagtcccactcctctggccaatccccctgtacctgggagctttcctaacaacagtgggctgaatcctcagaattctactgtgtctgtggctgcagttgggggtgttgttgaggataacaaggagagcttgaatgtgcctcaggacagtgattgccagaattcccagagtaggaaggaacaggtaaacattgaactaaaagcagtccctgcccaagaagttaaaatggttgtccctgaagatcagtccaaaaaggatgggcagccttcggatcctaacaaacttcccagtgtcgaagagaacaaaaatttggtgtctcctgctatgagggaagcaccaacatcgttaagtcaacttcttgacaactctggagctcccaatgtgacaattaaaccccctgggcttacagatctggaagtaacacctccagtagtttctggggaggacctcaaaaaagcatctgtcattcccacactgcaggatctgtcttcttctaaagaaccttctaattccctaaacttacctcacagtaatgagctgtgttcatcccttgtgcatcccgaattgagtgaggtcagttctaacgttgcaccaagcatccctccagtaatgtcaagacctgttagctcttcctccatttccactcccttgcccccaaatcaaataactgtatttgtcacttccaatcccatcacaacttcagctaacacatcagcagctttgccaactcacttgcagtctgcattgatgtcaacagttgtcacaatgcccaatgcgggtagcaaggttatggtttctgagggacagtcagctgctcagtctaatgcccggcctcagttcattacacctgtctttatcaattcatcctcaataattcaggttatgaaaggatcacagccaagcacaattcctgcagccccactgacaaccaactctggcctgatgcctccctctgttgcagttgttggccctttacacatacctcagaacataaaattttcttctgctcctgtaccgcctaatgccctctccagtagtcctgctccaaacatccagacaggtcgacctttggtccttagctcacgagccacccctgttcagcttccttcccctccttgtacgtcttctccagttgtcccttctcatccccctgtgcagcaagtgaaagaattgaatccagatgaggctagccctcaggtgaacacctcagcagatcagaacactcttccctcttcacagtcaaccacaatggtttctccccttttgaccaatagtccagggtcctctggcaaccggcgaagcccagtctcgtctagtaagggcaaaggaaaagtggacaaaattggccaaattttgttgaccaaggcatgtaagaaagttacaggctctcttgagaaaggggaagaacaatatggtgcagatggagagactgaaggccaagggctagacaccacagctccggggctcatgggaacagagcagttatccacagagctggacagtaaaaccccaacgcccccagcacccactctgctaaaaatgacctctagccctgtgggcccgggcactgcctcagcaggacccagcttacctggcggtgctctccccaccagtgtacgctcgatagtaaccactctggtaccctccgagctcatctccgccgtaccgaccacaaaaagcaatcatggtggcatagcatctgagtcacttgcgggtggcctagtggaggagaaggtgggatcccatccagaacttctacccagcatagccccgtcgcagaatttagtctcaaaggaaacttcaaccacagcactgcaggcctctgttgccagaccagagctggaggtaaatgctgccatagtctctggacaaagcagtgagcccaaagagatagttgaaaagtccaaaatcccaggccgaagaaactcccgaactgaagagccaactgtggcctctgaaagtgtggaaaatggacatcgtaaacgatcttctcgacctgcttcagcctccagctctactaaagacataaccagtgcggtgcaatccaagcgaagaaaatccaagtaaacaagcaggactgcgacttgatacttggaaatgtgtgtgacttttacaaagagcaattttgagctgtgacttttttaaatcaatttctgtacagttagtaattttaataatgtggcccttttcctagtccctgcaacctgtttcataaagtgcaatggggaaagcaggactgttgagcccttttggtgttgcgagttgaagttcaaggtttctaaaatgttgtcttgtattgaaaggagctaatgccattataaatgttactagttttcacatttcctaagcagcctagagtacagggtgagcatttttagatctcctaatgatgtattgtgccgtggaagtactgtgtgtgaatagcagtagtgggggcaaaagcaatcttctcatttggaaatgttgtaaataattttattatatagtgttttggatgtatttgttgtagaaatggaccagtgaataaagagaatctaaggatttgtacaatgtgaaataacgtgttaaataaatgtcattgtcatagaacataaagttatgttattggtaaggga

SEQ ID NO: 12932 - DNA, 1623 bp, Homo sapiens
cgggaagtggcgggcggagtcccgggtccagtcgccgcctcagctaccgccgctgccgccgccgccgccgccaccgccagtggtgagaccccgacctggcgggtcagcgctgggcgtgcgtgcgggcaggcgggggcgctgacgagaagcaggaagagggtgcagtgccggcgtgggcggccggccgaggcggaggcgcaggaagggggcggcgagtcgtgcgaggctgcccttctcactcagcattatggatccaagcctgttgagagaaagggagctgttcaaaaaacgagctctttctactcctgtagtagaaaaacgttcagcatcttctgagtcatcatcatcatcgtcaaagaagaagaaaacaaaggtagaacatggaggatcgtcaggctctaaacaaaattctgatcatagcaatggatcatttaacttgaaagctttgtcaggaagctctggatataagtttggtgttcttgctaagattgtgaattacatgaagacacggcatcagcgaggagatacgcatcctctaaccttagatgaaattttggatgaaacacaacatttagatattggactcaagcagaaacaatggctaatgactgaggctttagtcaacaatcccaaaattgaagtaatagatgggaagtatgctttcaagcccaagtacaacgtgagagataagaaggccctacttaggctcttagatcagcatgaccagcgaggattaggaggaattcttttagaagacatagaagaagcactgcccaattcccagaaagctgtcaaggctttgggggaccagatactatttgtaaatcgtcccgataagaagaaaatacttttcttcaatgataagagctgtcagttttctgtggatgaagaatttcagaaactgtggaggagtgtcactgtagattccatggacgaggagaaaattgaagaatatctgaagcgacagggtatttcttccatgcaggaatctggaccaaagaaagtggcccctattcagagaaggaaaaagcctgcttcacagaaaaagcgacgctttaagactcataacgaacacttggctggagtgctgaaggattactctgacattacttccagcaaatagggaacagttttgccctggaacagagttacagatacacaatcaagagtgttcttgctgatgctcggggtctgaagactgtcttcctatctgcttcttgcggctgaggagaggagcagttcagtttacaaaacaagtgcaaattaccaaactcaaagcttatttgagtagaatgggctcatgggcaatgtgatgttccctgttaaccttctgttactccctgggagaaaggcgctgagcgtggcatgcaggtgtctttgctgtgtttttctccacttctaaatggttcctggttcctttcttcctcgtttgttactttagagcaagtttgcccatagtcttgaatgcaatatttgtttattccaaaagaacatatttataataaaatcactgtagaaggatttttaaaaaaaaaaaaaaaaaaaaaaaaaaaaaaaaaaaaaaaaaaaaaaaaaaaaaaaaaaaaattaaaaaaaaaaaaaaaaaaaaaaaaaaaaaaaaaa

SEQ ID NO: 12933 - DNA, 3145 bp, Homo sapiens
cgcagagggccggggctacggggcagcgccccgggcgatgaggggccggcgttgaccgggaagagcgggcaccgcggcagtggctccgaggggacccgcgatggcagcgccctgagaggaggctccaggcagggcgggctgcgctggcagcggccgctgaggtgctggccggccggctggctggcgacgggggcagaagcgacgagaggcgcgctcggcacccgcacccccgtgcccccgcctcagttgtctaaacttcgggctctcttccacccgctctgcgcgcccagagtcaacaacttcttcacccccctccgcccccgcccttccctccgtcagccccgggagctcgccgcgcgccggggaccaggaacctccagcgctgagatgtggccgtgaggcgttggcgggcggcgaggagaagctcggcggcgtcccggggccggagggccgtggggccggggcgcaggggcgcgagcaccccgcgcctctcccccgcctcctcctgccgtctccgccgctgcccgtgccttgcaagcagcagccggagctgccaagcgtcagggccgcggagatgtcgtcgtcgtcgccgccggcgggggctgccagcgccgccatctcggcctcggagaaagtggacggcttcacccggaaatcggtccgcaaggcgcagaggcagaagcgctcccagggctcgtcgcagtttcgcagccagggcagccaggcagagctgcacccgctgccccagctcaaagatgccacttcaaatgaacaacaagagcttttctgtcagaagttgcagcagtgttgtatactgtttgatttcatggactctgtttcagacttgaagagcaaagaaattaaaagagcaacactgaatgaactggttgagtatgtttcaactaatcgtggtgtaattgttgaatcagcgtattctgatatagtaaaaatgatcagtgctaacatcttccgtacacttcctccaagtgataatccagattttgatccagaagaggatgaacccacgcttgaggcctcttggcctcacatacagttggtatatgaattcttcttgagatttttggagagccctgatttccagcctagcattgcaaaacgatacattgatcagaaattcgtacaacagctcctggagctttttgatagtgaagatcccagagaacgtgacttcctgaagactgttctgcaccgaatttatgggaaatttcttggattaagagcattcatcagaaaacaaattaacaacattttcctcaggtttatatatgaaacagaacatttcaatggtgttgctgaacttcttgaaatattaggaagtattatcaatggctttgcattgccactgaaagcagaacataaacaatttctaatgaaggttcttattcctatgcatactgcaaaaggattagctttgtttcatgctcagctagcatattgtgttgtacagttcctggagaaagatacaacactaacagagccagtgatcagaggactgctgaaattttggccaaaaacctgcagtcagaaagaggtgatgtttttaggagaaattgaagaaatcttagatgtcattgaaccaacacagttcaaaaaaattgaagagccacttttcaagcagatatccaagtgtgtatccagttctcattttcaggttgcagaaagggcattgtacttctggaataacgaatatattcttagtttgattgaggagaacattgataaaattctgccaattatgtttgccagtttgtacaaaatttccaaagaacactggaatccgaccattgtagcactggtatacaatgtgctgaaaaccctaatggaaatgaatggcaagcttttcgatgaccttactagctcatacaaagctgaaagacagagagagaaaaagaaggaattggaacgtgaagaattatggaaaaaattagaggagctaaagctaaagaaagctctagaaaaacagaatagtgcttacaacatgcacagtattctcagcaatacaagtgccgaataaaaaaaaagcctcccacctctgccggataggcagagttttgtatgcttttttgaaatatgtaaaaattacaaaacaaacctcatcagtataatataattaaaaggccaattttttctggcaactgtaaatggaaaaatatatggactaaacgtagccctgtgctgtatcatggccatagtatattgtaacctttgtctaatcattggatttattgtgtcacttctgaagtttcacagaaatgaatgaattttatcatctatgatatgagtgagataattatgggagtggtaagaattatgacttgaattcttctttgattgtgttgcacatagatatggtagtctgctctgtatatttttcccttttataatgtgcttttcacactgctgcaaaccttagttacatcctaggaaaaaatacttcctaaaataaaactaaggtatcatccttacccttctctttgtctcacccagaaatatgatggggggaattacctgccctaacccctccctcaataaatacattactgtactctggaatttaggcaaaaccttaaatctccaggctttttaaagcacaaaatataaataaaagctgggaaagtaaaccaaaattcttcagattgttcctcatgaatatcccccttcctctgcaattctccagagtggtaacagatgggtagaggcagctcaggtgaattacccagcttgcctctcaattcattcctcctcttcctctcaaaggctgaaggcagggcctttccagtcctcacaacctgtccttcacctagtccctcctgacccagggatggaggctttgagtcccacagtgtggtgatacagagcactagttgtcactgcctggctttatttaaaggaactgcagtaggcttcctctgtagagctctgaaaaggttgactatatagaggtcttgtatgtttttacttggtcaagtatttctcacatcttttgttatcagagtaccattccaatctcttaacttgcagttgtgtggaaaactgttttgtaatgaaagatcttcattgggggattgagcagcatttaataaagtctatgtttgtattttgccttaaaaaaaaaaaaaaaaaa

SEQ ID NO: 12934 - DNA, 1664 bp, Homo sapiens
aattcataaacaagagctccagttccctggaacctgagtcgggagacctgcagctcactttctccctgtttgctggccagcagggtttgtggccgcctctgctgtgacgccacagcctggtgaggagggggctgcagttcctcaggaaactgccagtggacaaagtcataaacaagagttccagttccctggaacctgagtcgggaggcctgcaactcactttctccctgtttgctggcccagacaggcctgtgctagagggctggatagtgtggtagtgtggtggatagagtgctgcctctatccacaacgcagccatatgctgactgaagataactttgtgtctggaagagccctctgatttcttacactaatggccttacacgacatggaggattttacatttgatggaacaaagcgcttaagtgtcaactacgtgaagggaattcttcaaccgacagacacctgtgacatctgggataagatctggaacttccaagccaagcctgatgacctgcttatttctacctatcctaaagcaggaacaacatggactcaggagatagtggaattaatacaaaatgaaggtgatgtggagaaaagtaaacgggcaccgactcatcaacgatttcctttcctcgaaatgaaaatcccatccttaggatctggtttggaacaagctcatgcaatgccctcaccacggatcctgaaaacacatcttccctttcacttgctgccaccatccttgctagagaaaaactgtaagataatctatgtagcaagaaatcccaaggacaacatggtgtcctattaccatttccaaagaatgaataaagctcttcctgctccaggaacatgggaagagtattttgagacttttctggctgggaaagtgtgctggggctcctggcatgaacatgtgaaaggatggtgggaagccaaagacaaacaccgtattctctatctcttctatgaggacatgaagaagaacccaaagcatgaaattcagaagctggcagaatttattgggaagaaattagatgacaaagttctagataaaattgtccattacacttcgtttgatgtcatgaaacagaatccaatggcaaactattcatcgattcctgctgaaatcatggaccactccatttctccattcatgagaaaaggggcagtgggagactggaagaaacacttcaccgtggctcagaatgagagatttgatgaagattacaagaagaaaatgactgataccagactaactttccacttccagttctagtaaggaagaaaaactgaaaatgttttagtttattacccagtatatttgggtaataatgaaagtttaattctcataacaaatgatatcagattccagttatcagaatagtttactgtgtttgctcttattcactctactaaaaaattattttaaaaggctggaggcaaggtggtgacaggcagcagggtggcgacatggagagagggaagctcaataaatcactaggtacaatcctggtatcattgccaattatcatcatatttacattttctacaatcatgtgcttattaacatattggaaatgcttcagtcctcacatgataatacactaacattttcagattaagttttggttcaagttaattttttttttttttttttt

SEQ ID NO: 12935 - DNA, 3815 bp, Homo sapiens
gtgtcctctgctcctagaggcccaacatctgtggccctgtgacctgcaggtattgggagacccacagctaagacaccgggaccccctgaaagcctagaaatggacgacttgaaatatggagtgtatcctctcaaggaagcaagtggatgccctggggctgagaggaatcttctagtttactcttattttgaaaaggagacattgacatttagggatgtggccatagaattctctctggaggagtgggaatgcctgaaccctgctcagcagaatttatatatgaatgtgatgttagaaaactacaaaaacctggtcttcttgggtgttgctgtctctaagcaagacccagtcacctgtctggagcaagaaaaagagccctggaatatgaagagacatgagatggtggatgaacccccagctatgtgttcttattttaccaaagacctttggccagagcaagacataaaagattcttttcaacaagtaatactgagaagatatggcaaatgtgaacatgagaatttacagttaagaaaaggctccgcaagtgtagatgagtataaggtgcacaaagaaggttataatgagctaaaccagtgtttgacaactacccagagcaaaatatttccatgtgataaatatgtgaaagtctttcataaatttttaaatgcaaatagacataagacaagacgtactggaaagaaacctttcaaatgtaaaaaatgtggcaaatcattttgcatgcttttacacctaagtcaacataaaagaattcatattagagagaattcttaccaatgtgaagaatgtggcaaagcttttaaatggttctcaacccttactagacacaagagaattcatactggagagaaacccttcaaatgtgaagaatgtggcaaagcttttaagcagtcctcaacccttactacacataagataattcatactggggagaaaccatatagatgtgaagaatgtggcaaagccttcaaccggtcctcacaccttactacacataagataattcatactggagagaagccctacaaatgtgaagaatgtggcaaagcttttaaccagtcttcaacccttagtacacataagttcattcatgctggagagaaaccctacaaatgtgaggaatgtgacaaagcttttaatcgattctcataccttactaaacataagataattcatactggagaaaaatcttacaaatgtgaagaatgtggcaaaggctttaattggtcctcaacccttactaaacataaaagaattcatactggagagaaaccctacaaatgtgaagtgtgtggcaaagcctttaatgagtcctcaaaccttactacacataagatgattcatactggagagaaaccctacaaatgtgaagaatgtggcaaagcttttaaccggtccccacaacttactgcacataagataattcatactggagagaaaccttacaaatgtgaagaatgtggcaaagcttttagccagtcatcaatccttactacacataagagaattcacactggagagaaaccctacaaatgtgaagaatgtggcaaagcttttaaccgatcctcaaatcttactaaacataagataattcatacaggagagaaatcttacaaatgtgaagaatgtggtaaagcctttaaccaatcctcaactcttactaaacataggaaaattcatactagacagaaaccctacaactgtgaagaatgtgacaatacatttaaccagtcctcaaaccttattaaacaaaataattcatactggagagaaactctacaaatgtcaagaatgtgggaaagcctttaagcagtcctcaactcttactaagcattaaatattggccgggtgcggtggcttatgcaaaatggctcccagcattttgggaggctgaggtgggtggatcacaaggtcaggagatcgagaccatcctggccaacgtggtgaaaccctgtctctgctaaaagtgcaaaaattatctgggtgtggtggcacgtgcctgtgttcccatctactcgggaggcttaggcaggataatcacttgaacctgggaggtggaggttgcggtgggccgggattgtaccactgcactccagtttggcaacagagtgagactccgtctcaaaaaaaatttatactgtacaaaaaccccacaagtgtgaaaaacatggcaaagccttttaagaagccctcaattcttaacagacataagataatttatactggagagaaactctacaaatcagaaagatgtgactacttttgacaacgcctcaaacttttctaaccataaaagtaattatactggtgagaaatcctagaaatctgaagagtgagataaagcctttaaatggttgtcacacttcattgtaggtaagataattcatactggagaaaacgcctacatgtgtgaacaatatggcaaaacttaatgctcacactttattgctaggaaagcatttatacttgagataaattatacaaatataaagactgtgaaaaagccatcattatctgctcacattttactcaacaccagagagttcctgcttaataaaagcattataagtgcaattactgtcaaaagatctttcagaaaatataagcttttttagtgaagagtatttattttgaagttgaacatcacaaatataaaaagggttgtagtgcctttacttgtatcacagatctttttgtagacattttcttctagaggaaaactctgaagcagttgatcaaactttgttcaacatcagggaatttatattgaaaaattgtgcaaatataataaatttggaaaaacaatttttcaaaaactacagcttagaaatcaacagttatactagaatatattttttccagatgcagtaaaagtaaaatatttaatccataattaagtctatgcaaatatcagagaatttatggtagaaatatataaggtactgacacttcagatatactaaatcagagtgctaagtatagaaaatctgaaactaaagttggtagaaaagttatttgtatagaactttaagaggatcagaaggttttttgcagagttataattacattcaaagtatactttatttcttgaaaaatattacagattttttgaaaattgaataatgtcatcattcaactctgaaattatttcctgttgtttcttcattcctattggattcacatgtgaaagcatggggttaattgttgctacatcaaagagagagattcttttgtttgtttgttcgtttgttttttgagactgagtttcactctttcgcccaggctggagtgcattggcatgatctcggctcactacaacctctgccttctggtttcaagcggctcttctgcctcagcatcccaagtggctgggataacaggtgccagccaccatgcccagctgatttgtgtatttctagtggagatggggtttcaccatgttggccgggctggtcttgaactcctgacctcatgtgatccgcccgcctcagcctcccaaagtgctgggattacaggcttgagccaccacgcccagcctgtagcatattttaataggagaatacaatatataatagtagcagggttaagtaaggcatccatcatctgtagcatttctcctttgttttacaaacaatccaattctacactttaaaaaaaaatttttaaatgtacaattaaatttttatttaccacagtgttatttttatcgtcataataaaaattatatacgagtataaatgaaattcatttctaaattcttaataaatattttctcatgcaaaaaaaaaaaaaaa

SEQ ID NO: 12936 - DNA, 1561 bp, Homo sapiens
cggccctgcgccccagcccggccgcggcacctccgcctcgccgccgctaggtcggccggctccgcccggctgccgcctaggatgaatatcatggacttcaacgtgaagaagctggcggccgacgcaggcaccttcctcagtcgcgccgtgcagttcacagaagaaaagcttggccaggctgagaagacagaattggatgctcacttagagaacctccttagcaaagctgaatgtaccaaaatatggacagaaaaaataatgaaacaaactgaagtgttattgcagccaaatccaaatgccaggatagaagaatttgtttatgagaaactggatagaaaagctccaagtcgtataaacaacccagaacttttgggacaatatatgattgatgcagggactgagtttggcccaggaacagcttatggtaatgcccttattaaatgtggagaaacccaaaaaagaattggaacagcagacagagaactgattcaaacgtcagccttaaattttcttactcctttaagaaactttatagaaggagattacaaaacaattgctaaagaaaggaaactattgcaaaataagagactggatttggatgctgcaaaaacgagactaaaaaaggcaaaagctgcagaaactagaaattcatctgaacaggaattaagaataactcaaagtgaatttgatcgtcaagcagagattaccagacttctgctagagggaatcagcagtacacatgcccatcaccttcgctgtctgaatgactttgtagaagcccagatgacttactatgcacagtgttaccagtatatgttggacctccagaaacaactgggaagttttccatccaattatcttagtaacaacaatcagacttctgtgacacctgtaccatcagttttaccaaatgcgattggttcttctgccatggcttcaacaagtggcctagtaatcacctctccttccaacctcagtgaccttaaggagtgtagtggcagcagaaaggccagggttctctatgattatgatgcagcaaacagtactgaattatcacttctggcagatgaggtgatcactgtgttcagtgttgttggaatggattcagactggctaatgggggaaaggggaaaccagaagggcaaggtgccaattacctacttagaactgctcaattaagtaggtggactatggaaaggttgcccatcatgactttgtatttatatacaattaactctaaataaagcaggttaagtatcttccatgttaatgtgttaagagactgaaaataccagccatcagaaactggcctttctgccaataaagttgcatggtaaatatttcattacagaatttatgttagagctttcatgccaagaatgttttcttacaaaattctctttttattgaggtttcactaataagcagcttctacttttgagcctcaacttaaagcagaactgttttctactggatttttcattaacagcaagctttttcttttatgtaaaataaatctattgtgaattgaaaaaaaaataaaaagagaattttgtaagaa

SEQ ID NO: 12937 - DNA, 853 bp, Homo sapiens
ggcctctgtatcgtcgcgaatccgtcgcggaacctgtctttacccagagctaccatgagcaagcggaaccaggtatcgtacgtgcggccagccgagccggcgtttctggcccgcttcaaggaacgggtcggctacagggagggacccaccgtagagactaagagaattcagcctcagcccccagatgaagatggggatcacagtgacaaagaagatgaacagcctcaagtggtggttttaaaaaagggagacctgtcagttgaagaagtcatgaaaattaaagcagaaataaaggctgccaaagcagatgaagaaccaactccagccgatggaagaatcatatatcgaaaaccagtcaagcatccctcagatgaaaaatattcaggtttaacagcaagctcaaaaaagaagaagccaaatgaagatgaagtaaatcaggactcggtcaaaaagaactcacaaaaacaaattaaaaatagtagcctcctttcttttgacaacgaagatgaaaatgagtaagtgtaaatattttgaatttagtctactttgaaagtatatggagtgttcattaaaatcacattttttcctattataaagatactacaagttctttatagaaagtttaggaaatagagaaaaaaatttaataaactacatctattcatcaatacccctctgacttaaaatgccaactctatagaaattagctagtattaacattttgttatttcccttgtgtggttgtatatatatgtaaattatatttttaagcaaaatacattttttgtgtgtaaacaaaattttataaatacaactgtattgcaaaaaaaaaaaaaaaaaaaaaaaaaaaaaa

SEQ ID NO: 12938 - DNA, 3385 bp, Homo sapiens
ggctcccgcgggcgcgcggcggggaaggccagaggacctgggcgcgggcgatgtgcctcctgagcgtccaaaccgggggtgaggcgcggtcacgcccagcgggaaccgcaggcgccgaagcccgggtactgggcccagaatcccgcggaattttggatccgagggaggcgctggggcgcgggacctcgggcgtggggtcccgggcgctggatcggcgcggacgggaggcggcgctggtcccgcgggccagcgggtctcgggagggggcgcccgatcccgcgtctccggcgccgcttcccgggaagtttcaagtttgaaagtcctggcggagggtctgcggcttccgggaccggagtggctgagaggagggccccaagcggccggagcggcgccatggaggagggggcgccgcggcagcctgggccgagccagtggcccccagaggatgagaaggaggtgatccgccgggccatccagaaagagctgaagatcaaggagggggtggagaacctgcggcgcgtggccacagaccgccgccacttgggccatgtgcagcagctgctgcggtcctccaaccgccgcctggagcagctgcatggcgagctgcgggagctgcacgcccgaatcctgctgcccggccctgggcctggcccagctgagcctgtggcctcaggaccccggccgtgggcagagcagctcagggctcggcacctagaggctctccggaggcagctgcatgtggagctgaaggtgaagcagggggctgagaacatgacccacacgtgcgccagtggcacccccaaggagaggaagctcctggcagctgcccagcagatgctgcgggacagccagctgaaggtggccctgctgcggatgaagatcagcagcctggaggccagtgggtccccggagccagggcctgagctgctggcggaggagctacagcatcgactgcacgttgaggcagctgtggctgagggcgccaagaacgtggtgaaactgcttagtagccggagaacacaggaccgcaaggcactggctgaggcccaggcccagctacaggagtcctctcagaaactggacctcctgcgcctggccttggagcagctgctggagcaactgcctcctgcccaccctttgcgcagcagagtgacccgagagttgcgggctgcggtgcctggatacccccagccttcagggacacctgtgaagcccaccgccctaacagggacactgcaggtccgcctcctgggctgtgaacagttgctgacagccgtgcctgggcgctccccagcggccgcactggccagcagcccctccgagggctggcttcggaccaaggccaagcaccagcgtggccgaggcgagcttgccagcgaggtgctggctgtgctaaaggtggacaaccgtgttgtggggcagacgggctgggggcaggtggccgaacagtcctgggaccagacctttgtcatcccactggagcgagcccgtgagctggagattggggtacactggcgggactggcggcagctatgtggcgtggccttcctgagacttgaggacttcctggacaatgcctgtcaccaactgtccctcagcctggtaccgcagggactgctttttgcccaggtgaccttctgcgatcctgtcattgagaggcggccccggctgcagaggcaggaacgcatcttctctaaacgcagaggccaggacttcctgagggcttcgcagatgaacctcggcatggcggcctgggggcgcctcgtcatgaacctgctgcccccctgcagctccccgagcacaatcagcccccctaaaggatgccctcggaccccaacaacactgcgagaggcctctgaccctgccactcccagtaatttcctgcccaagaagacccccttgggtgaagagatgacacccccacccaagcccccacgcctctacctcccccaggagccaacatccgaggagactccgcgcaccaaacgtccccatatggagcctaggactcgacgtgggccatctccaccagcctcccccaccaggaaaccccctcggcttcaggacttccgctgcttagctgtgctgggccggggacactttgggaaggtcctcctggtccagttcaaggggacagggaaatactacgccatcaaagcactgaagaagcaggaggtgctcagccgggacgagatagagagcctgtactgcgagaagcggatcctggaggctgtgggctgcacagggcaccctttcctgctctccctccttgcctgcttccagacctccagccatgcctgctttgtgactgagtttgtgcctggtggtgacctcatgatgcagatccacgaggatgtcttccccgagccccaggcccgcttctacgtggcttgtgttgtcctggggctgcagttcttacacgagaagaagatcatttacagggacctgaagttggataaccttctgctggatgcccagggattcctgaagatcgcagactttggactctgcaaggaagggatcggcttcggggaccggactagcaccttctgtggcaccccggagttcctggctcccgaggtgctgacccaggaggcatacacacgggctgtggactggtgggggctgggtgtgctgctctacgagatgctggtgggtgagtgcccgttcccaggggacacagaggaagaggtgtttgactgcatcgtcaacatggacgccccctaccccggctttctgtcggtgcaagggcttgagttcattcagaagctcctccagaagtgcccggagaagcgcctcggggcaggtgagcaggatgccgaggagatcaaggtccagccattcttcaggaccaccaactggcaagccctgctcgcccgcaccatccagccccccttcgtgcctaccctgtgtggccctgcggacctgcgctactttgagggcgagttcacagggctgccgcctgccctgaccccacctgcaccccacagcctcctcactgcccgccaacaggccgccttccgggacttcgactttgtgtcagagcgattcctggaaccctgagggcatctcctggcacctctgtccccttcccccacagactgttagagcctctgctcgttcacccgtgcgccctgcctggaggtccaggccttgctgggtacttctgagcccttgggattcaaagtggcagccatggggccactgttgtgggctttgctcagtgtcactgggcaaagtgtgtcccttccccctccagctcgccctcttctacctcccagcgagacctggcccagaaagggtgccgcagcaaggagtgatatggtttgtctttttaagactggacttgctttatattaaatttgtaaaagtgtgcaaaaaaaaa

SEQ ID NO: 12939 - DNA, 3714 bp, Homo sapiens
tgtgagtgtgtgcgtgtgagagtgcgagtgtctgtgcgcgagtgagtgagcggcgggcgggcgcgagtgtggccgccgcggagcgcgagcaggacccggcgggcgcgctccccagcctccgtctccccgccggaaccatgtcgggcaggtcggttcgagccgagacgaggagccgggccaaagatgatatcaagagggtcatggcggcgatcgagaaagtgcgcaaatgggagaagaaatgggtgaccgttggtgacacatccctacgaatctacaaatgggtccctgtgacggagcccaaggttgatgacaaaaacaagaataagaaaaaaggcaaggacgagaagtgtggctcagaggtgaccactccggagaacagttcctccccagggatgatggacatgcatgacgataacagcaaccagagctccatcgcagatgcctcccccatcaaacaggagaacagcagcaactccagccccgctccagagcccaactcggctgtgcccagcgacggcaccgaggccaaggtggatgaggcccaggctgatgggaaggagcacccaggagctgaagatgcttctgatgagcagaattcacagtcctcgatggaacattcgatgaacagctcagagaaagtagatcggcagccgtctggagactcgggtctggccgcagagacgtctgcaatctctcaggtacctcgctcgaggtctcagaggggcagccagatcggccgggagcccattgggttgtcgggggatctggaaggagtgccaccctctaaaaagatgaaactggaggcctctcaacaaaactccgaagagatgtagacgatgctttaaagcctccgatccatgttccatggaaggtacatcagcaattaattctagagcaactttgccccagcgattcctcttgggtgcgaacagaactactaacgtttcaagtttaccaagtgcaaatccaagaagacccagaacggcgtcacttctcagacactgaagaactctgctgtgaagcaaaacactcaaacctttaagggactgtccttggggaggcaggcggggctgacagctcaggagtgtctgcacactgtctcggaagccaggattccatttgtgttgctgctgtattttccccccacttctctatgtaacgatataagctatcggagggtggtaccgatcaggaacgctttttggcggggctttccactgttcaaccgattccttccgctttctttttttgtgccttgtgcccttgaggtgacctctggcatgtatcctggtggttcttacatccccctctgcaaagtgccctcttggtttggttcgggcggcggctgccaccctactcaccgctctcctccctgccccaggacttcatcggagcaggcagggtggagcgaaggagctccttagcccacctggtttgcaggtgcagggggaccttaggcacgccccaagcaccaggcaccagggcccaaggacgcgcaggtgttggggcacagtccccaagggctcggccccttggatcaggctgggcactcgctgtgctctcccctccttggggcgtttaggactgggcgtctccaagcccaccatggcccagatggacgtgcaaagcccttggaattttctggcacttcctctctattgcccccaccaccaccacccccatcactgctttctcccagacctccgaatacgaaatggcttctctggctgactgcaaggctgtctccttaaggcactgagtgggcgggggaggctgggagccggcggcaggattagctggtgctgaactttctctcataggacgtcgcttggatttcaaatccacggtcacctgctgccctttgcctcccccgacgccccagcctgtgccccggagaggcaggatcgcagtggtcagaatccacgtgctttcctattctcaggctgttctgactctgagccaacagctggaccgtgtctcatccccagaacatgccgtctgtccccaccggggagtgggccttgatggccgggcctcgaaggccacaaacaaggcgtcgaggaattggaaagatttgcacaccctccagaaaggagagacgcaatctcccctccctcccatcccccaccttcgctggaacagcttcctctcactgaacggagacgcccccttggacgaactgcctaatcgtttggttctgaggcctggtttgctcttaattaatatatgaactcctcagaccttaaaccttttcctaagctttctttactgcactggagttctgactccctttgagttgtgtgttactgggggtggggtggggtcatgggttttgttgtttttgggggctaattggtgcatattcaggtaccacctttgacgtgtggctctttctcctgaccatcatgggaagtgtctgctggattccattttctaagagtttctgagggtgaggctcttatttttttttttaagggatcctgtctatttcctgcacttcgagaagaatcaaaatgttcctgaatttcaaatacctcatgcaaaatgtctcctgaaataagggaaaaaaaaaaaaccacaactttgaaaatcttaatgttgaagttagcaatgccgaaaggtttctgtcttaaaaaaaaaaatccttgtacttatcaattttgccccttaggcagtcagttttgttgagaactgtgtcctgcatcctggcgcagaacctacctgatgcggttcctctccacgcatctcgaggcggcgttacctccagattccgtagagttagagtcacatttttctttgcagcgaaactccatcttggtgagagatgaatttggatatttatttccttctctgtttttgggaaatgagaggctacaaccaagacagctgaaggagaatgaaacacacacatccacagaaacagagaggcgtaggtggccctgccgttgaccgcagcctctctggacaggcaaggggagttggcgcaggtgaggactcagacgacgtccaccgtcccaaggctgtcactagtatttctctgaagtgcctgaaggtaggaatgggccggcgattgggaccagctgggccccaccacggccacgccaggcaaagcgccagcagccctgcactccacgctggccaagaaggccttccacgcagaatgacaagactgcaaaaatccgatgtgcttccttccctggcgcagtcgctcctcgagccgctgccccccacccaccctgcacccctcgccctccccccaccacagaatctaagacctttcagcttcgagccagggggcgggggatcccgagcaaaagccttccgtggacatcaggccccgtggcctcaagggctcccagggcaaacctaattccccccaaaacgtgaagtcggggaagctgcggctacacattccacaaagtgctggcacttacacccacaacccggaaggctgtggaccgattcctctagggtggtgacctcccattagcaaacggtgtcatggtttggaatgttcattatcgccaagaacctggttagaggcataaagaccttttttcaccgttacctaattttttcccctttcaagaattttttttttttttggtgtgttgtacagcagtataatttttcacttatttattccatcagtagatatggtttgtacaatgtacaattgtttcatttcagaaaataaaaatttcaaatcatgaa

SEQ ID NO: 12940 - DNA, 8082 bp, Homo sapiens
ggacagcgctctcgacacggagcacccttctagcttcttcgtctccaggactgacgctcaggctcctctctcgccttagcccaacttgctttcccgcctcgcaaactccggtttccctccactcccaactcttttcactacacgtttcccctcctctatctcccacgccacgaaccccgatccccagactcctctctcccgccctcctccttcctctctcctcccttcaactcttcatccgcttccacctcagactctgcgcgcacccaattcagtcgcccgctcccgttcggctcctcgaagccatggcgggacctgggggctggagggacagggaggtcacggatctgggccacctgccggatccaactggaatattctcactagataaaaccattggccttggtacttatggcagaatctatttgggacttcatgagaagactggtgcatttacagctgttaaagtgatgaacgctcgtaagacccctttacctgaaataggaaggcgagtgagagtgaataaatatcaaaaatctgttgggtggagatacagtgatgaggaagaggatctcaggactgaactcaaccttctgaggaagtactctttccacaaaaacattgtgtccttctatggagcatttttcaagctgagtccccctggtcagcggcaccaactttggatggtgatggagttatgtgcagcaggttcggtcactgatgtagtgagaatgaccagtaatcagagtttaaaagaaggttggattgcttatatctgccgagaaatccttcagggcttagctcaccttcacgcacaccgagtaattcaccgggacatcaaaggtcagaatgtgctgctgactcataatgctgaagtaaaactggttgattttggagtgagtgcccaggtgagcagaactaatggaagaaggaatagtttcattgggacaccatactggatggcacctgaggtgattgactgtgatgaggacccaagacgctcctatgattacagaagtgatgtgtggtctgtgggaattactgccattgaaatggctgaaggagcccctcctctgtgtaaccttcaacccttggaagctctcttcgttattttgcgggaatctgctcccacagtcaaatccagcggatggtcccgtaagttccacaatttcatggaaaagtgtacgataaaaaatttcctgtttcgtcctacttctgcaaacatgcttcaacacccatttgttcgggatataaaaaatgaacgacatgttgttgagtcattaacaaggcatcttactggaatcattaaaaaaagacagaaaaaaggaatacctttgatctttgaaagagaagaagctattaaggaacagtacaccgtgagaagattcagaggaccctcttgcactcacgagcttctgagattgccaaccagcagcagatgcagaccacttagagtcctgcatggggaaccctctcagccaaggtggctacctgatcgagaagagccacaggtccaggcacttcagcagctacagggagcagccagggtattcatgccactgcaggctctggacagtgcacctaagcctctaaaggggcaggctcaggcacctcaacgactacaaggggcagctcgggtgttcatgccactacaggctcaggtgaaggctaaggcctctaaacctctacaaatgcagattaaggcacctccacgactacggagggcagccagggtgctcatgccactacaggcacaggttagggcacctaggcttctgcaggtacagtcccaggtatccaaaaagcagcaggcccagacccagacatcagaaccacaagatttggaccaggtaccagaggaatttcagagtcaagatcaggtacccgaacaacaaaggcagggccaggcccctgaacaacagcagaggcacaaccaggtgcctgaacaagagctggagcagaaccaggcacctgaacagccagaggtacaggaacaggctgccgagcctgcacaggcagggactgaggcagaggaacctgagtcattacgagtaaatgcccaggtatttctgcccctgctatcacaagatcaccatgtgctgttgccactacatttggatactcaggtgctcattccagtagaggggcaaactgaaggatcacctcaggcacaggcttggacactagagcccccacaggcaattggctcagttcaagcactgatagagggactatcaagagacttgcttcgggcgccaaactcaaataactcaaagccacttggtccgttgcaaaccctgatggaaaatctgtcatcaaataggttttactcacaaccagaacaggcacgggagaaaaaatcaaaagtttctactctgaggcaagcactggcaaaaagactatcaccaaagaggttcggggcaaagtcatcatggagacctgaaaagcttgaactctcggatttagaagcccgcaggcaaaggcgccaacgcagatgggaagatatctttaatcagcatgaggaagaattgagacaagttgataaagacaaagaagatgaatcatcagacaatgatgaagtatttcattcgattcaggctgaagtccagatagagccattgaagccatacatttcaaatcctaaaaaaattgaggttcaagagagatctccttctgtgcctaacaaccaggatcatgcacatcatgtcaagttctcttcaagcgttcctcagcggtctcttttggaacaagctcagaagcccattgacatcagacaaaggagttcgcaaaatcgtcaaaattggctggcagcatcagaatcttcttctgaggaagaaagtcctgtgactggaaggaggtctcagtcatcaccaccttattctactattgatcagaagttgctggttgacatccatgttccagatggatttaaagtaggaaaaatatcaccccctgtatacttgacaaacgaatgggtaggctataatgcactctctgaaatcttccggaatgattggttaactccggcacctgtcattcagccacctgaagaggatggtgattatgttgaactctatgatgccagtgctgatactgatggtgatgatgatgatgagtctaatgatacttttgaagatacctatgatcatgccaatggcaatgatgacttggataaccaggttgatcaggctaatgatgtttgtaaagaccatgatgatgacaacaataagtttgttgatgatgtaaataataattattatgaggcgcctagttgtccaagggcaagctatggcagagatggaagctgcaagcaagatggttatgatggaagtcgtggaaaagaggaagcctacagaggctatggaagccatacagccaatagaagccatggaggaagtgcagccagtgaggacaatgcagccattggagatcaggaagaacatgcagccaatataggcagtgaaagaagaggcagtgagggtgatggaggtaagggagtcgttcgaaccagtgaagagagtggagcccttggactcaatggagaagaaaattgctcagagacagatggtccaggattgaagagacctgcgtctcaggactttgaatatctacaggaggagccaggtggtggaaatgaggcctcaaatgccattgactcaggtgctgcaccgtcagcacctgatcatgagagtgacaataaggacatatcagaatcaccaacacaatcagatttttctgccaatcactcatctccttccaaaggttctgggatgtctgctgatgctaactttgccagtgccatcttatacgctggattcgtagaagtacctgaggaatcacctaagcaaccctctgaagtcaatgttaacccactctatgtctctcctgcatgtaaaaaaccactaatccacatgtatgaaaaggagttcacttctgagatctgctgcggttctttgtggggagtcaatttgctgttgggaacccgatctaatctatatctgatggacagaagtggaaaggctgacattactaaacttataaggcgaagaccattccgccagattcaagtcttagagccactcaatttgctgattaccatctcaggtcataagaacagacttcgggtgtatcatctgacctggttgaggaacaagattttgaataatgatccagaaagtaaaagaaggcaagaagaaatgctgaagacagaggaagcctgcaaagctattgataagttaacaggctgtgaacacttcagtgtcctccaacatgaagaaacaacatatattgcaattgctttgaaatcatcaattcacctttatgcatgggcaccaaagtcctttgatgaaagcactgctattaaagtatgcattgatcaatcagcagactctgaaggagactacatgtcctatcaagcctatatacgaatactggcaaaaatacaggcagctgatccagtgaaccggtttaagagaccagatgagctccttcatttgctgaagctcaaggtatttccaacacttgatcataagccagtgacagttgacctggctattggttctgaaaaaagactaaagattttcttcagctcagcagatggatatcacctcatcgatgcagaatctgaggttatgtctgatgtgaccctgccaaagaatcccctggaaatcattataccacagaatatcatcattttacctgattgcttgggaattggcatgatgctcaccttcaatgctgaagccctctctgtggaagcaaatgaacaactcttcaagaagatccttgaaatgtggaaagacataccatcttctatagcttttgaatgtacacagcgaaccacaggatggggccaaaaggccattgaagtgcgctctttgcaatccagggttctggaaagtgagctgaagcgcaggtcaattaagaagctgagattcctgtgcacccggggtgacaagctgttctttacctctaccctgcgcaatcaccacagccgggtttacttcatgacacttggaaaacttgaagagctccaaagcaattatgatgtctaaaagtttccagtgatttattaccacattataaacatcatgtataggcagtctgcatcttcagatttcagagattaaatgagtattcagttttatttttagtaaagattaaatccaaaactttacttttaatgtagcacagaatagttttaatgagaaatgcagctttatgtataaaattaactatagcaagctctaggtactccaatggtgtacaatgtcttttgcacaaactttgtaacttttgttactgtgaattcaaacattactctttggacagtttggacagtatctgtattcagattttacaacatggagtaaagaaacctgttatgaattagattacaagcagccttcaaaagaattggcactgggataagatttttcagaaaaagaaaaacatcggcaaactgtgtgtgatttttccaaagctatataaagaaccaaaggtttagtcaagaaacaaaaatcttaaagattattataacccagactaaggttgaacaacctgcatgcccagagaaaactatggcgacaaaggggaaaaggccaccactcgttttctcactgattcatgccaattaagcctacagttaaagaccagttttgttcttttcacccatttttaagctggttttctcctgataagaagaaaggaagaaagccccagacgcttggtttttctcagaacccccaaaagatgtgcaatagctgttgttacaaaccaccaaataatacagttgtgagcctgaatacaggactgaactcctatacacgtgtactgtagaatgagtattttttaataccttaaggtaggcgtcaaattctactccccaaagcagagatggattgatttatcaaaattattatctggccaacagtgtgactatcagacagcatcaaatatttgcccaatccaagattagactacacaaaagcttccttccagtattaaacaaaaagaattaaacataactatgaaaaaactttgctaatatctgtgtttttcagatttcattttttgtaaaatcagaaattaatctaaacatattcagtgataagttcatgtgtaacgacttaatgttaaaggttaaaaaaaagatttcacaaaatatacaactttcaccatatatataagcctgcaaaattagagtagtgaaagtcatgctagtccatcacccaaatatgttatagacgccatagacaggtgatgtttggtcacctatggtaactgctacctgatgaagagcataatttctgcatatccatcctcaataccatggtaaattctggggcaatagagaagcaacagaactgccacaaagtatacctcaatataattcctctagttctgcttctaaaatctgaggacagtgctagtgggaaaataattttcaaactacctggttaaccaaaatacaaaagcagctgactatgtgtgatttcataatagcacatttcttgacacttagtgctagaaatgaagatttggattttcctaacaacttacatcaagaatgtagtgtagctcattattgagaatttaggaaagcctgaatccattaattaaggaaataaatgtgactcacatttcttttactgtgacacaataatgtgatcctaaaactggcttatccttgagtgtttacaactcaaacaactttttgaatgcagtagttttttttttttaaaaacaaacttttatgtcaaattttttttcttagaagtagtcttcattattataaatttgtacaccaaaaggccatggggaactttgtgcaagtacctcatcgctgagcaaatggagcttgctatgttttaatttcagaaaatttcctcatatacgtagtgtgtagaatcaagtcttttaataattcattttttcttcataatatttactcaaagttaagcttaaaaataagttttatcttaaaatcatatttgaagacagtaagacagtaaactattttaggaagtcaacccccattgcactctgtggcagttattctggtaaaaataggcaaaagtgacctgaatctacaatgatgtcccaaagtaaccaagtaagagagattgtaaatgataaaccgagctttaaaggataaagtgttaataaagaaaggaagctgggcacatgtcaaaaagggagatcgaaatgttaggtaatcatttagaaaggacagaaaatatttaaagtggctcataggtaatgaatatttctgacttagatgtaaatccatctggaatctttacatcctttgccagctgaaacaagaaagtgaagggacaatgatatttcatggtcagtttattttgtaagagacagaagaaattatatctatacattaccttgtagcagcagtacctggaagccccagcccgtcacagaagtgtggaggggggctcctgactagacaatttccctagcccttgtgatttgaagcatgaaagttctggcaggttatgagcagcactagggataaagtatggttttattttggtgtaatttaggtttttcaacaaagcccttgtctaaaataaaaggcattattggaaatatttgaaaactagaaaatgatggataaaagggctgataagaaaatttctggctgtcagtagaagtgagataagatcctcagaggaaacagtaagaagggataatcattaagatagtaaaacaggcaaagcagaatcacatgtgcacacacacatacacatgtaaacattggaatgcataagttttaatattttagcgctatcagtttctaaatgcattaattactaactgccctctcccaagattcatttagttcaaacagtatccgtaaactaggaataatgccacatgcattcaatgggaccttttaagtactcttcagtttgttccaagaaatgtgcctactgaaatcaaattaatttgtattcaatgtgtacttcaagactgctaattgtttcatctgaaagcctacaatgaatcattgttcaaccttgaaaaataaaattttgtaaatcaaaaaaaaaaaaaaaaaaa

SEQ ID NO: 12941 - DNA, 2243 bp, Homo sapiens
agggcgcaggcgtggctcttggtcaggcggttacggccaggaggcgtcggagcctggcgtggtagggctgtgctgcgcggtccttcccattcaccctagtctggcgctcgccggcgtgggcgggccggaccttcgccgcttccaggaagggccacaacggccgtcggaccacggcgcggcggccagttcctttatagttttgttcagaaaaacatatggagacgtttatacccattgatttgacaactgaaaatcaagagatggacaaggaggaaaccaagacaaaaccaagacttttaagatatgaagagaaaaaatatgaagatgtgaaaccattagagactcaaccagctgaaatagcagaaaaggaaacattggaatataaaacagttagaacattctctgaatctttgaagtcagagaaaacagaagattaccttagagaaagtataattcaacaacatatggtttctccagagccagcttcccttaaggagaaagggaagtcaaggagaaaaaaggatcaaactcatgcttgtccaaatgttaggaaagccaggcctgtgtcctatgatagaacagaaccaaaagatgatgatgtgataagaaatattattaggctacgagaaaagcttggttggcaaactatattaccgcagcacagtttgaaatacggaagctccaaaattgcaattcagaagattactttaaagaaacctttggaagatgatggagaatttgtttattgccttcctcggaaaagtcctaaatccctttacaatccatatgatcttcaggttattaatatagttggtagtgtaaaggaagtagaactcatacctactttggaatggctatcagaaagaagacattactatttattacggcaattcaagatattttctgatttccgaatgaataaagcatttgttacctggaaattgaatgttaaaagaattaagacagagaagagcaggtcatttttgtaccaccatctttttttggctgatgacttgtttcaaacctgtttggtttatataagaggactttgtgaagatgcaattaatctcaaaaattataatgaccatgaaaataatctatctgccatatgccttgtaaagctggatagttctcgaacatattctctagatgaattttgtgaagagcagttacagcaagctacccaggcattgaaacaacttgaggacatcaggaataaagcaatttcagagatgaaaagtacttttctaaaggttgcagaaaagaatgaaatcaaagagtattttgagtcaaaactctctgaagatgacacaacacatttcaagctgcctaaatatagacgtttattagaaacatttttcaagtttgtaatgctggttgactacatatttcaggaactcattcgtcaacttatgaacactgcagtcacactacttttggaattatttaatggttctgctggaatgccattttcagtggaaaaaaagaatgaaaatcttatcaggtaaattacttttttgaagtcaaaaagtaacttacaattataatattttaacattgccacatatggaggaaatattcaataatttaagctagagtttgaaaattctccttgtggcagagtacatgtactcatttttgctattaacagaacttattatttggtaataccttacttaatatcggtgctataggatgcgcagtaaaatttgaatttcacataaatggtaaataattttagtatacttcaagtattacctatgttaaaattattgtttatctgaaattcagatttctctgataatttagcaaatatattttttatttgttatatctggcaattctgtgcctaagtatactctgtcttccaggttcagagttagtttttaaagatatgtgagaattctggaaggagctacaaagtccaattggaatttgagtcaattccaagaaatatctgttgaatattttcccaatgaaaaaactatctgaaaaacatttttaccttctaaacactactgttaaaaacaaagcatttttcttattttccacaactggatatatctactgtaactggtgaaacaggaatattaattgaaatgatggcatactttgtagctggtaaacaggactatgaattgaaatgttggcatactttaatttctatttatcaaaatttaataatattttaggctaattaaagttttataactaggtagctgaaaatatatcaattcaaaaaa

SEQ ID NO: 12942 - DNA, 3345 bp, Homo sapiens
ccttcaggcctgaatgtggcggctgcctctgcgaatggacggcgtgggaagagaatggcttctgcaaggaaagccagccgtcccatgcgtgatgtttttggtgacttcagtgatgtttccttggaagattcaacaatggaagaaatcagaaacttccagatcagtagaaatcttaccaaaatagcacctggtcatagcagatttctaaaaagaaaccaaactctagatgagaaacacttactcctgaaagagaaccctgtgctcgggagtggacccaggcttgcctcatgtagaccgcccaccactgcctccaggatccgagccaatgccgcactcatgaagctggcccagctggaaacccggatcatgaatcggaagctgcagaggaatttgtctgacacggaatctgactcaatgaccgccgatgctggtcttccaaagagagctgacagaatcctctctgggggtgcactcgaactcgcgtcccagaacacagacaaaacttcccagaatcaagcccgtgaacttcctgtcaccgaaaataatgcacagaacgcgaaggtcagtaggtttctaaagaagaaacaagcacctgttgaaaacatatcccctgaagcacctgctgggaaagagaggactttgcaaacccccaaacagaaagaacctgctagaacatttgattctccagacagtgacgaagaagaaatgaaagtattgctaggaagcttgatggactcttctagagaaaaaaacacgaatcaaggcttcagcagcgctaacgtcagcgaggaagaagaaagaaaactattttcggtcccatctcaactgagagcatttactgtacccagcgtggaactctccagcgcaaagccttctcagacatcacacctgccaacctccctggcagcagacagaacccttcacagcactcgctcaagagcagactacccacagagtcacgtttccagtgacaccgcctcccacacgccgtcagtttccatcacaggcgccttttcaaactcagtgtctttaaagatggggcatgtcaagcttgtgtcctccccgggaaggagtgaggctgagactgtggacgagccagtctcagaaggtgctgatgacagcctcgacgagtttagaataaatattttatcgcttgacggtctggctccagctgtcagtgagaactccgatttggaacaggaagaggaaagtgctcagagacaaaaaacagctggcaaaatcttcagagccgaggcgtccactgggcaggatgccccgaggcaggcccaggcgaggagctgggcatcacagggaaaggccgcctctgcagagggggatgagagcgaggtctcggagcatctcagtgccagctcggcttctgccatccagcaggacagcacttccagcatgcagccaccatctgaagcccccatggtgaacacagtcagctcagcttattcggaggattttgaaaactctccaagtctgacagcatctgagccaaccgcccattccaaggagtctcttgacagaacactggacgctttgtctgaatcctcttcaagtgtgaagacagaccttccacaaacagccgagtctaggaaaaagtcgggcaggcacgtgacaagagtgcttgtgaaggacacagctgtgcagacgccagatcctgccttcacctacgagtggaccaaggtggccagcatggcagccatggggcctgccctgggaggcgcctacgtggacccgacacccatcgccaatcatgttatcagtgcagatgcaatagaagccctgaccgcttacagcccggccgtgctggcactccatgatgtgctgaagcagcagctgagcctgacgcagcagttcatccaggccagccggcacctgcacgcctccctcctgcgctccctggacgcggactccttccactaccacaccctggaggaagccaaagagtacattaggtgccacagacctgccccactgaccatggaggatgccctggaggaggtgaacaaggagctgtgagcgccagcaggtggagcttgacgtgacgtcttaacaaaagcaaagcaccgcagcttcccagagttaccagcgcagcacttaagacaggatcttacggcggggtggggctcctggaccgtgaccggcgtcgtcttcctggggagtacgacttggaccgggaccgcgactgggaccgggagcggcttctggaggagcgcgacctgctccgacttctgcagggaagggtgcccaagggtcagcagcagccaggcgtcgtggggaggccacaggaaggggcctcaggcactgccctgaggcagcctctgcctacctagatctggagcgggagtaggaacgggagcaggagcgcgaccttgaccttgagtacgagcctgaagacttggaggatcttgagttggagcgggaggaagaacgccctcgactcttggatctgctccgagacctcgagggtccgctgtggggagaggcctgatgatcaggtgccccagtggatgggctgcacccagcccaccctggccctcaggttcctagaccaccccagatgcaggggctctggctgtggatgtggcgccatagccacagcaacggtaccaagttcctaaatagtgtggccgagcctgctgctgtgtgaattcaggccttgtggaaaacaccgccccataggcacaggctgtgtgagggtggacgtgatgagtgtatctggggtctgctcccacccatcacaagctgtggaccctggccccccggccactgcagacatctgcgcttttacctgttcctcttctcctggcctttcctccgccgggcccgcatttttgctcggaagaactcatagaggccgttctgctcccagccttcactgtaagacacggcattccgtgtgtgaccacgtgacacccacccacaaggaagtcgtgaaaaagtcatcaggagttaatccacagaaccttggagagtacatggccctgtggctgtgggctccgagcatgggcgcagtagagcttggttcagtgttcccacagggctgtcctcctgcagcccagtggctcctctggtgcccacgcccttgccaccctgctgttccgctgaggtggtggggacccatggtctgtggaactgggaaacaggaacactgactcatgggtggacaggcctgcagcccagcacaggaaggaggggtgaccactgggaagggtgggctgagggccctgtggcagccggctgcttgagacgtgccgccgtgccacaccttccctaacttcttctgatgtgtctccattaaaacgcccttcattgaaaaaaaaaaaaaaaaaaaaa

SEQ ID NO: 12943 - DNA, 1442 bp, Homo sapiens
gtattaaagggaccggagcggggcagttcccgacgccgcagcgctcgctttcccttccctcctctctggccctccctcctcccacccactggctccctcccccagcgctctccagtttctgtgccccaggagctacgcgacagtcttccaggattatggagtttctgagcgagaagtttgccctcaagagccctccgagtaaaaacagtgacttttacatgggcgcaggaggtcctctggagcacgttatggagacgctggacaatgagtccttttacagcaaagcgtctgcaggcaaatgcgtgcaggccttcggacccctgccccgcgccgagcatcacgtgcgcttggagaggacctcgccctgtcaggacagcagcgtgaactatgggatcactaaagtagaaggacagccccttcacaccgaactgaatagagctatggacaactgtaacagtctccgaatgtctcccgtgaaagggatgcaagagaagggagagctggatgaacttggggataaatgtgatacgaatgtatccagcagtaagaaacggaggcaccgaaccaccttcaccagtttgcagctagaggagctggagaaagtctttcagaaaactcattacccggatgtgtatgtcagagaacagcttgctctgaggacagagctcactgaggccagggtccaggtttggtttcaaaatcgaagggccaaatggagaaaaagggaacgttatggccaaatacaacaagcgaaaagccattttgctgccacctatgatatatcagttttgccaaggactgacagctacccacagattcagaacaatttgtgggcaggaaatgcaagtggtggttctgtggttacttcatgcatgttaccacgtgacacttcctcctgtatgacaccttattctcactcgcctcggacagattccagttacacggggttttcaaaccaccagaaccagttcagccacgtgcccctcaacaattttttcactgactctcttcttactggggcaaccaatggacatgcatttgaaacaaagccagagtttgaaaggaggtcttccagtatcgcagttcttcgaatgaaagccaaggagcacaccgccaatatttcatgggccatgtaacatacagtactcttttatttttcttttaatagcaaagttaaacattcttatttctcatatttaaaggataccacaataagctgctgtgtgtggaattgctaaaggtcaagatattcagtgagaccagcttaaatgaatagttgttatttaacattaaaatctaagaatgaacctctgaaaagactaaataggtttaccatgtgccagtctccacaaaccctgttttagtagtaaggttttctttttctattgtacaagtcaatgaaatatgatcacgcaacttattaaagaataaatgtgttaaac

SEQ ID NO: 12944 - DNA, 1641 bp, Homo sapiens
gagccaagctccgtcgcctggtcagaggcccgaagcagggctctggagttgcccagtgatcgggaagtcttgcacccgtttgttcgaagacatgccctccaccggaactccctagagggtggacacacagaaagtaacacaagtttgccaagcggcatccaggcttctctcacctccattagctctttaccttttgaggaggatgagcgggaggtggcactcactaagttaaccaagtctgtatctgctccccacatcagtagcccagaggaggctgctgaagatgcggacaccaagcagcaagatggaggttttgctgaaccttcagatatgcacagcaagagccaaggttccccaggatcttgctctcaactttgtggtgactctggaacagatgctggagcagaccatcccctggtggagatagttttagatgctgacaaccagcagggccctggatacatagacatccccaaagggaaagggaagcagtttgatgctcaaggacactgtcttcctgatggcaggactgagaacactccaggtgttgaaaccaaaggtcttaatttaaaaataccacgcgtcatagcacttgaaaaccccaggaccagatctcttcatagagcacttgaggaaaccccaaagggcatgcctaaagacttgaatgtgggtcagcaagctctttccaacagtggcatctcagaggttgagggtctctctcaacatcaggtgcctgaattgagctgtacgtcagctgctgatgccatcaacaggaactcaacaggccagcaaagccaaagcggttcaccttgcattatggatgacacagcatttaatagaggagtgaatgccttcccggaggctaaacataaagcaggcactgtgtgccccactgtgacccattccgttcattcccaggttttgaaaaaccaagagctgaaggcaggcacttccatcatggggtcccatctgacttctgcagagaccgttactctggacagcctgaaggctgtggaggttgtgaacttatctgtgtcttgcactgccacctgtctccctttctcatctgtgcccaaggagacccctgccagggctggattctcttccaaacagaccctgtttcccatcacccatcagcctttgggatcctttggagttgtttctacccattccagcacgttggatgaggaagtcagtgagaggatgtttagaggaagaggaagaaaatttggaagatggaattcacctggttgtctgtgtccatggcctggatgggaacagtgcagacctccggctggtaaagactttcatagaactggggctccctggaggaaaactggacttcctaatgtctgaaaagaatcagatggacacatttgcagattttgatactatgacggatcggttattggatgaaatcattcaacacattcagttgtacaacctctccatatcccgaattaggtaaaaggaaaccacaggtagttaatgctgggggaagaggggggacatttttgagtgtttgctgtataaaagcaataatatgatgccttctgtataccactgagctaagctaacttgtgacttttaataaattacttttaaagcagaagtaaaaaaaaaaaaaaaaaaaaaaaaaaa

SEQ ID NO: 12945 - DNA, 5360 bp, Homo sapiens
tgcttggtaacccggagggagagattggaaaccgcggagtttcctttgggaggctgcggccagccggggctgacttgttatgttgggctccggaggccgttaagagccgagagagacatgaggtgtctctgaagcccggtcgcctgggccatgaagaagatttttagtaagaagggcgagtcgcccttgggctccttcgcgcggcggcggaggagcagcgcgggaggcgggggcgagccgggggagggcgcctactcgcagcccggctaccacgtccgagaccgagatctcggcaagatccacaaagctgccagcgcgggtaatgtggcgaaagtgcagcagatccttttgctcaggaagaatggcttgaacgatagagacaagatgaacaggacggctctacatttggcctgtgccaatggtcatccagaagtagtaactctcctggtggacagaaaatgccagctcaatgtctgtgacaacgaaaacaggacagctctgatgaaggctgtacaatgccaggaagagaaatgtgcaactattctgctagaacatggtgctgatccaaatcttgcggatgtccatggcaacactgctcttcactatgctgtctataatgaggacatatcagtagcaacaaagctgcttttgtatgatgcaaatattgaagcaaaaaacaaggatgacctcacaccacttttacttgcagtaagtggaaaaaagcagcaaatggtggaatttttaataaagaaaaaagcaaatgtaaatgcagtagataagttggaaagcagtcaccaactaatttcagaatataaagaagaaaggatacctaaacattcttctcaaaatagtaattcagtggatgaaagctctgaagactccttaagcaggctttctggcaaaccgggtgttgatgattcatggcctacctcagatgacgaagacctcaattttgatactaagaatgtcccaaaaccaagcttagcaaagctaatgactgcttctcagcaatccaggaaaaatttagaagcaacatatggcactgtgagaacaggaaatagaactttgtttgaggatagagattccgatagtcaagatgaagttgtggttgaaagccttcctacaacatcaatcaaagtccagtgcttttctcatcctacctatcaatcacctgaccttcttccaaaaccttcccacaagtcgttagcaaaccctggtcttatgaaggaagaaccaacaaagccaggcattgcaaaaaaagaaaatggtattgatattattgaaagtgctccactagagcaaacaaataatgacaatttgacttatgttgatgaagtgcacaaaaataatagaagtgatatgatgtccgcattaggattaggacaagaggaagatatagaatcaccttgggattctgagagtatctctgagaattttccacagaagtatgttgatcctttagctggggctgcagacggaaaagaaaaaaatataggaaatgaacaagcagaagatgtgttttatataccttcttgcatgagtggatcaagaaactttaagatggctaaactagaggatacaagaaatgtaggcatgccagtagcccacatggagtctcctgagagatatcttcacttgaagcctaccattgaaatgaaagattctgttccaaataaagcaggaggaatgaaggatgtacaaacatccaaagcagctgaacatgacttagaagtagcatcagaagaagagcaagaaagggaagggagtgaaaataaccagccacaggttgaagaagaaaggaaaaaacacagaaataatgaaatggaagtatcagcaaacatacatgatggtgctactgatgatgctgaagatgatgatgatgatgatggattaattcaaaaaagaaagagtggagaaactgatcatcagcaatttcccaggaaggaaaataaagagtatgctagtggtcctgccttgcaaatgaaggaagtaaagagcactgaaaaagaaaaacggacctcgaaagaatctgtgaattcaccagtgtttgggaaggccagtttactaactggtggcctgctacaagtggatgatgacagcagtttaagtgaaatagatgaggatgaaggaaggcctactaagaaaacatctaatgaaaagaacaaggtcaaaaaccaaatacagtctatggatgatgttgatgacttaactcagtcatctgaaacagcctcagaggattgtgagctaccccactctagttacaagaattttatgttgctcattgaacaacttggaatggagtgtaaagattctgttagcctattgaaaatccaggatgcagctctttcatgtgaaagattattagaacttaaaaaaaatcactgtgaactacttacagtaaaaattaaaaaaatggaagacaaggttaatgtactacaaagggagctatctgaaacaaaagaaataaaatcacagttagagcatcaaaaagttgaatgggaacgagaactgtgctctttgagatttagcttaaaccaagaagaagagaagagaagaaatgctgatacgttgtatgaaaaaattagggaacagttaagaagaaaagaagagcaatataggaaagaagttgaagtgaaacaacagcttgaactgagtctccaaacactggagatggaattgaggactgtaaaaagtaatttgaatcaggtcgttcaagagcgaaatgacgctcagaggcaactttctcgagaacagaatgccagaatgttacaagatggaattctgaccaatcacctttccaaacaaaaggagattgaaatggctcaaaagaaaatgaattctgagaattctcatagtcatgaagaagaaaaagacctatcgcataaaaatagcatgttgcaggaagaaattgctatgctaagactagaaatagacacaataaaaaatcaaaaccaggaaaaagaaaagaaatgttttgaggaccttaaaattgtaaaagaaaagaatgaagaccttcagaagactataaaacagaatgaggaaacattaacacaaacaatatcccagtataatggacggcttagtgttctgacagctgagaatgcaatgctaaattctaaactggagaatgaaaagcaaagcaaggaaagactggaagcagaagttgaatcataccattctagattggctgctgctatacatgatcgtgatcaaagtgagacatcaaaaagagaactagaacttgctttccagagagcaagagatgaatgttctcgtttacaggacaaaatgaattttgatgtgtctaacctaaaagataacaatgagattctttctcaacaactatttaaaactgaaagtaaactcaatagcctagaaattgagttccatcacacgagagatgccctcagagaaaagactttgggtttagaacgggtacaaaaggacctaagccaaacacagtgtcaaatgaaggaaatggaacaaaagtatcaaaatgaacaagttaaagtgaataaatacattggaaagcaggagtctgtagaggagagattgtctcaactacaaagtgagaatatgttgcttcgacaacaactggatgatgcccacaacaaggctgacaataaagagaagacagtgattaatatccaagaccagtttcatgctattgtgcaaaaacttcaagctgagagtgaaaagcaaagtcttctgctagaagaaagaaataaggagttaatcagtgaatgtaatcacttaaaagaaagacagtatcaatatgaaaatgaaaaggcagaaagagaagttgttgtgagacaacttcaacaagaactagctgataccctaaaaaaacaatctatgtcagaggcttcactggaggttacgtcacgttatcgtattaatttagaagatgagacacaggatttaaagaagaaattaggtcaaatcagaaatcaattgcaagaagcacaggatcgacatacagaagctgtcagatgtgctgagaagatgcaagatcacaagcaaaagcttgaaaaagataatgccaagttaaaagttacagtcaaaaagcaaatggacaaaattgaggagcttcagaaaaacctgttaaatgcaaatttgtctgaagatgaaaaggaacaattaaagaaacttatggaattaaaacagtcactggaatgtaatttggatcaagaaatgaagaaaaatgttgaattagaaagagagataactggatttaagaacctcttaaaaatgacaagaaagaagttaaatgaatatgaaaatggagaatttagtttccatggagatttaaaaactagtcaatttgaaatggatattcagattaataagctaaaacataagattgatgatcttacagcagaactggagactgcaggttcaaaatgtctacatctggatacaaagaaccaaattcttcaagaggagttgttatctatgaaaacagtacaaaagaaatgtgaaaaactacagaagaataaaaagaagttggaacaagaagtgatcaacctgagaagtcatatagaaaggaatatggtagaacttggtcaagtcaaacagtataaacaggagattgaagaaagagcaagacaggaaatagcagaaaaattaaaagaagtcaatctatttttacaggcacaagcagcatctcaagaaaacttagagcagtttagagagaataattttgcttcaatgaaaagtcagatggaactcagaattaaagatctggaatctgaactctccaaaataaaaacttctcaagaagactttaataaaaccgaactggaaaaatataagcaactctatctagaagaattaaaagttagaaaatctttgtcaagtaaactaaccaaaactaatgagaggctagcagaggtcaacaccaaacttcttgtggaaaaacagcagagcagatctttgttcaccactctcactaccaggccagtcatggagccaccttgtgtgggaaatcttaataatagtttagatctcaacagaaaacttattccaagagaaaacttagtgatctctacctcaaatccacgggcttcaaataatagcatggagaactacttgagcaagatgcagcaggagttggaaaaaaatataactagagaactcaaagaagctgctgctgaattggaatctggatcaatagcttcccctctagggtctactgatgagtcaaatctaaatcaagatctagtttggaaagcatcaagagaatatgtacaggttttaaagaaaaattatatgatctgaaagataagattttattactgggctgtttatgtgacattttgtttctcattaaatattaatatatgacatgtaaaaatatt

SEQ ID NO: 12946 - DNA, 4176 bp, Homo sapiens
ctcgccccggcgctccctagcccggcgcggcccggcagcgagagcggcgccatggaggccaccggggtgctgccgttcgtgcgtggcgtggacctcagcggcaacgacttcaagggcggctacttccctgagaatgtcaaggccatgaccagcctgcggtggctgaagctgaaccgcactggcctctgctacctgcccgaggagctggccgccctgcagaagctggaacacttgtctgtgagccacaacaacctgaccacgcttcatggggagctgtccagcctgccatcgctgcgcgccatcgtggcccgagccaacagtctgaagaattccggagtccccgatgacatcttcaagctagatgatctctcagtcctggacttgagccacaaccagctgacagagtgcccgcgggagctggagaacgccaagaacatgctggtgctgaacctcagccacaacagcatcgacaccatccccaaccagctcttcatcaacctcactgacctactatacctggacctcagcgagaaccgcctggagagcctgcccccgcagatgcgccgcctggtgcacctgcagacgctcgtgctcaatggaaaccccctgctgcatgcacagctccggcagctcccagcgatgacggccctgcagaccctgcacctgcggagcacccagcgcacccagagcaacctgcccaccagcctggagggtctgagcaacctcgcagacgtggatctgtcctgcaatgacctgacacgggtgcccgagtgtctgtacaccctccccagcctgcgccgcctcaacctcagcagcaaccagatcacggagctgtccctgtgcatagaccagtgggtgcacgtggaaactctgaacctgtcccgaaatcagctcacctcactgccctcagccatttgcaagctgagcaagctgaagaagctgtacctgaattccaacaagctggactttgacgggctgccctcaggcattggcaagctcaccaacctggaagagttcatggctgccaacaacaacctggagctggtccctgaaagtctctgcaggtgcccaaagctgaggaaacttgtcctgaacaagaaccacctggtgaccctcccagaagccatccatttcctgacggagatcgaggtcctggatgtgcgggagaaccccaacctggtcatgccgcccaagcccgcagaccgtgccgctgagtggtacaacatcgacttctcgctgcagaaccagctgcggctagcgggtgcctctcctgctaccgtggctgcagctgcagctgcagggagtgggcccaaggaccctatggctcgcaagatgcgactgcggaggcgcaaggattcagcccaggatgaccaggccaagcaggtgctgaagggcatgtcagatgttgcccaggagaagaacaaaaagcaggaggagagcgcagatgcccgggcccccagcgggaaggtgcggcgttgggaccagggcctggagaagccccgccttgactactccgagttcttcacggaggacgtgggccagctgcccggactgaccatctggcagatagagaacttcgtgcctgtgctggtggaggaagccttccacggcaagttctacgaggctgactgctacattgtgctcaagacctttctggatgacagcggctccctcaactgggagatctactactggattggcggggaggccacactcgacaagaaagcttgctctgccatccacgctgtcaacttgcgcaactacctgggtgctgagtgccgcactgtccgggaggagatgggcgatgagagcgaggagttcctgcaggtgtttgacaacgacatctcctacattgagggtggaacagccagtggcttctacactgtggaagacacacactatgtcaccaggatgtatcgtgtgtatgggaaaaagaacatcaagttggagcctgtgcccctcaaggggacctctctggacccaaggtttgttttcctgctggaccgagggctagacatctacgtatggcggggggcccaggccacactgagcagcaccaccaaggccaggctctttgcagagaaaattaacaagaatgagcggaaagggaaggctgagatcacactgctggtgcagggccaggagctcccagagttctgggaggcactgggtggggagccctctgagatcaagaagcacgtgcctgaagacttctggccgccgcagcccaagctgtacaaggtgggcctgggcttgggctacctggagctgccacagatcaactacaagctctccgtggaacataagcagcgtcccaaggtggagctgatgccaagaatgcggctgctgcagagtctgctggacacgcgctgcgtgtacattctggactgttggtccgacgtgttcatctggctcggccgcaagtccccgcgcctggtgcgcgctgccgccctcaagctgggtcaggagctgtgcgggatgctgcaccggccacgccatgccacggtcagccgcagcctcgagggcaccgaggcgcaggtgttcaaggccaagttcaagaattgggacgatgtgttgacggtggactacacacgcaatgcggaggccgtgctgcagagcccgggtctctccgggaaggtgaaacgcgacgccgagaagaaagaccagatgaaggctgacctcactgcgcttttcctgccgcggcagccgcccatgtcgctggccgaggcggagcagctgatggaggagtggaacgaagacctagacggcatggagggtttcgtgctggagggcaagaagtttgcgcggctgccggaagaggagtttggccacttctacacgcaggactgctacgtcttcctctgcaggtactgggtgcctgtggagtacgaggaggaggaaaagaaggaagacaaggaggagaaggccgagggcaaagaaggcgaggaagcaaccgctgaggcagaggagaagcagccagaggaggacttccagtgcatcgtgtacttctggcagggccgtgaagcctccaatatgggctggctcaccttcaccttcagcctgcaaaagaagttcgagagcctcttccctgggaagctggaggtggtacgcatgacgcagcagcaggagaaccccaagttcctgtcccatttcaagaggaagttcatcatccaccggggcaagaggaaggcggtccagggcgcccaacagcccagcctctaccagatccgcaccaacggcagcgccctctgcacccggtgcatccagatcaacaccgactccagcctcctcaactccgagttctgcttcatcctcaaggttccctttgagagtgaggacaaccagggcatcgtgtatgcctgggtgggccgggcatcagaccctgacgaagccaagttggcagaagacatcctgaacaccatgtttgacacctcctacagcaagcaggttatcaacgaaggtgaggagcctgagaacttcttctgggtgggcattggggcacagaagccctatgatgacgatgccgagtacatgaaacacacacgtctcttccggtgctccaacgagaagggctactttgcagtgactgagaaatgctccgacttttgccaagatgacctggcagatgatgacatcatgttgctagacaatggccaagaggtctacatgtgggtggggacccagactagccaggtggagatcaagctgagcctgaaggcctgccaggtatatatccagcacatgcggtccaaggaacatgagcggccgcgccggctgcgcctggtccgcaagggcaatgagcagcacgcctttacccgctgcttccacgcctggagcgccttctgcaaggccctggcctaagacaggctggcacagccccaggcttggtgaggaagaggaaggggcctcatccactgtctgctagcaaagaatgtactcaggtgacaccacctgctccagccacgtccagtgccacagtccccagtagcctcaagcagcaccaatggggatgaccctgacaggtgccctcaggggtctgggaaatccaactctctccacagtgtgagtgcacgtgtgaagccccctcactcttccgctagggataaagcagatgtggatgccctttaagagatattaaatgcttttattttcaatattaaaaaaaaaaaaaaaaaa

SEQ ID NO: 12947 - DNA, 2526 bp, Homo sapiens
tttcgagcatccctagccgggcaggtgggaggcacggggttgcggatcccgcggccgcggttcggacccgccggcgacatggccagctccggagaggacatatccaatgatgatgatgacatgcaccctgcagcagccgggatggcagacggggtccacctcctagggttctctgatgagatcctccttcacatcctgagtcacgtccccagcacagatctgattctgaacgtccggcgtacctgtcggaagcttgcagccctgtgccttgacaagagcctcatccacaccgtgttgctgcaaaaggactatcaggcgagtgaggacaaagtgaggcagctggtgaaggagatcggccgggagatccagcagctgagcatggctggctgctactggctgcctggctccaccgtggaacacgtggcccgctgccgcagcctggtgaaggtgaacctctcgggctgccacctcacttccctgcgcctctccaagatgctctcggccctgcagcacctgcgctcgctggccatcgacgtgagccccggcttcgacgccagccagctgagcagcgagtgcaaggccaccctgagccgcgtgcgggagctcaagcagacgctgttcactccctcctacggcgtggtgccctgctgcaccagcctagagaagctgctgctctacttcgagattctggaccgcacgcgcgagggcgccatcctctcgggccagcttatggtgggccagagcaacgtgccgcactaccagaacctgcgggtcttctatgcgcgcctggcccccggctacatcaaccaggaggtggtgcggctctacctggctgtgcttagcgaccgcactcctcagaacctccacgccttcctcatctccgtccctggcagcttcgcggagagcggcgccaccaagaacctcctggactccatggcgcgcaatgtcgtgctggatgccctgcagctgcccaagtcctggctgaacggctcttccctcctgcagcacatgaaattcaacaacccgttctacttcagtttcagccgctgtaccctgtcaggcggccatctgatccagcaggtcatcaacggcgggaaggacctgcggagcctggccagcttgaacctcagcggctgcgtccactgcctgtccccagactcgctgctccgcaaggcggaggacgacatcgacagcagcatcctggagacgctggtggcgtcctgctgcaacctgcgccacctgaacctctcggccgcccaccaccacagctcggagggcctgggccgccacctctgccagctcctggcccggctgcgtcacctgcgctccctctccctgcctgtctgctctgtcgctgactccgcgccgcgcgccgaccgcgcgcccgcccagccggccatgcacgcagtgccgcgcggctttggcaagaaagtgcgtgtgggcgtgcagtcctgtcccagccccttctcgggccaggcgtgcccccagccctcctccgtgttctggtctctgctgaagaacctgcccttcctggaacacctcgagctgattgggtccaacttctcctccgccatgccccgcaacgagcccgccatccgcaactcgctcccaccctgcagccgcgcacagagtgtcggggactcggaggtggccgccatcggccagctggccttcctgcggcacctgacgctcgcacagctgcccagcgtccttacgggctccgggctggtcaatatcggcctgcagtgccagcagttgcggtccctgtcgctggccaacctgggcatgatggggaaggtggtgtacatgcccgcgctctcagacatgttgaagcactgcaagcggctgagggacctcaggctggagcagccctacttcagcgccaacgcccagttcttccaggcgctgagccagtgcccctcgctgcagcgcctgtgcctggtctctcgcagcggcaccctccagcccgatgccgtgctggcctttatggctcgctgcctgcaggttgtcatgtgccacctgttcaccggggagtccctcgccacctgcaagagcctgcagcagtcgcttctccgcagccgctgaggagcccccggcagagctggggttgaagaggcagcttgtcccccgaccttcaggaatggcagcctgcagcaactggaacaaggccccaccgtaaagctctgtgtgtcccagggtcttcctgtcacccaggctggagtacagtggcgtgatcacagctcactgcagccttgacctcccgggctcaagacatcctcctgcctcggcctcctgagtagctgggactgcagttgtaagccaccgtgtccagccagtttctgttgtttgaagcccccaacttctagattgggaaacgaagctctgctgggcgtggtggctcacacctgtgagtggctcccagcactttgagaggccgaggagggaggactgcttgaagccagaagttcaagaccagcctgcacatcacgagacccgccctccccccaccaatctctataaaacatt

SEQ ID NO: 12948 - DNA, 6249 bp, Homo sapiens
ccgcggagggagcgagctaggagcgtccacgcccaacgcagtcaccgtcccacggcctcagagagcgaaccgcggctccaccgtcggcggggcgacccccccctccggaccccgcccgcaccccgccccccctccgccgccgtcgcggcggcggggccaggcggcccgagccgtgcagtcggaggtccttgtgcatgaagacagatttgttctatggcctcggagttgggtgccagggatgatggaggctgcactgagctggcaaagcccctctatcttcagtacttggagagggccctccggttggaccattttctgcgacaaacgtcagctatcttcaataggaatatttctagtgatgacagtgaagatggactggatgacagtaatccattattgccccagtctggggatcccttaatacaagttaaggaagaacctccaaattcattgcttggtgaaacttctggagcaggcagttctggaatgttaaacacatattctctgaatggagttctacagtcagaatcaaaatgtgataaggggaatttatataatttctctaagctgaagaaaagcagaaagtggctaaagagcattctgctaagtgatgaatccagcgaggctgattctcagagtgaagacgatgatgaagaagaactcaatctcagcagagaagaacttcacaacatgcttcgactacacaaatataagaaacttcaccaaaataagtatagtaaagacaaggagttgcagcaatatcagtactacagtgcaggcctgctctccacatatgaccctttctatgagcaacaacggcacctacttggacccaagaaaaagaaatttaaggaggaaaagaaacttaaagctaagttgaaaaaagtgaagaaaaaaagacgaagagatgaagaactttcctctgaagaatcccctcgtcgccatcaccaccagaccaaagtctttgccaagttttctcacgatgcacctccccctggcactaagaaaaagcacttatccattgagcagctgaatgctcgtcgcaggaaagtatggctcagcattgtgaaaaaggaactaccaaaggcaaataagcagaaagcttcagctcgtaacctgtttctcaccaatagccgaaagcttgctcaccagtgcatgaaggaggtgcgtcgagctgccttgcaggcccagaagaactgtaaggaaaccttgcctcgtgcccgccgcctcaccaaggagatgcttctgtactggaagaaatatgagaaagtagagaaggagcaccgcaagagagcagagaaggaagctttggagcagcggaagttggatgaggaaatgcgggaggccaagaggcaacagcgaaaactcaacttcttaattacccagacagagttgtatgcccatttcatgagtcgcaaacgagatatgggtcatgatggtatccaggaagaaatcctaaggaaactggaagacagttctacccagagacaaatcgatataggtggaggagtggtagttaacatcacacaggaggattatgatagtaaccattttaaagcccaggccctgaagaatgctgaaaatgcttaccatattcaccaagctcggacaaggtcatttgatgaagatgcaaaagaaagtcgagcagctgccctacgggcagcaaacaagtctggcactgggtttggggagagttatagcctggctaacccatctatccgggctggtgaggatattccacagcccacaatttttaatggcaaattgaaaggttatcaactgaaaggcatgaattggttggccaatctatatgaacagggtattaatggcattcttgctgatgaaatgggccttggtaaaacagtacagagcattgcccttctggcccatctggctgagagagagaacatttggggacctttcttaataatttcacctgcgtctacacttaacaattggcaccaggagtttactagatttgttcctaaatttaaggtgctaccatattggggaaatcctcatgatagaaaagtcatcagaaggttctggagtcagaagaccctctacactcaggatgcccccttccatgtggttattaccagctatcagctggtggtgcaggatgtaaagtatttccagcgggtcaagtggcaatacatggtactggatgaggctcaggcgctcaagagtagttccagtgttcgttggaagatcctcttacagttccagtgtcggaatcggcttttgctaaccgggaccccaattcagaacaccatggcagagctttgggctctgctgcatttcattatgccaacattatttgattcacatgaggaatttaatgaatggttttccaaggacattgagagccatgccgaaaacaaatctgctattgatgagaatcaactttctcgcttacacatgattttgaagccatttatgctgaggagaatcaagaaagatgtggaaaatgaattatctgacaagattgagattctaatgtattgccaactgaccagccgacagaagctgctatatcaggcactaaagaacaaaatttccattgaggatttattgcagtcttctatgggctctacccaacaagcacagaacaccaccagcagcctcatgaatctggtcatgcagtttaggaaggtgtgtaatcacccggagttatttgaacggcaagaaacttggtctccatttcatatttccctaaagccataccacatttcaaagtttatctaccgtcatggacagatcagggtcttcaatcattcacgagacaggtggttaagggttctttctccatttgcaccagactatatccaacggtctctctttcacagaaaaggtattaatgaagaaagctgtttctctttccttcgctttattgatatatctccagcagaaatggcaaaccttatgcttcagggacttttggccagatggttagctcttttcctgtctctgaaagcctcctacaggctccatcagctacgctcctggggagcgccagaaggggagagccaccagagatacctgaggaacaaggatttccttcttggggttaattttccactctcctttccaaacctttgcagctgccctttgttaaagtctcttgttttcagcagccactgtaaagcagtgagtggctactcagaccaggttgtccatcagcggagatcagctacctcctcgctgcgtcgctgcctgctcactgagctgccatcttttttgtgtgtggccagtccacgagttaccgcagtgccattggattcttactgcaatgaccgaagtgcagaatatgaaaggcgagttctgaaggaaggagggagtctggcagccaagcagtgtttgttgaatggggcccctgaactggctgcagactggctaaatagacgatcacagttcttcccagagccagctggaggtctgtggagcatcagacctcagaatggctggtctttcatcaggattccaggcaaggagagcctcatcactgacagtggaaagctgtatgcccttgatgtcctgctgactcggctcaagtctcaagggcatagggtccttatctactcccagatgaccaggatgatagacctactggaggaatacatggtttacaggaagcatacctacatgaggcttgatggctcatccaagatctcggagaggcgagacatggttgctgattttcagaacaggaatgacatctttgtgttcctgttaagcacacgagctggaggactgggtatcaatctcactgctgcagacacagtgattttctatgatagcgactggaaccccactgtggaccagcaggccatggacagggcccaccgcttagggcagacaaagcaggttactgtgtaccggctcatctgtaaaggcaccattgaagaacgcattctgcaaagagccaaggagaagagtgagattcagcggatggtgatttcaggtgggaacttcaaaccagataccttgaaacccaaagaggtggttagtcttcttctagacgacgaagagttggagaagaaactgaggctgcggcaggaagagaaacggcaacaggaggaaaccaaccgagtgaaagagcgcaagcggaagcgggaaaagtatgcagagaagaagaaaaaagaagatgaattggatgggaaaaggagaaaagagggtgtgaacctggtgatcccatttgttccctcggctgataactccaacctctctgctgacggagatgactccttcattagcgtggactcagccatgccaagccctttcagtgagatctccatcagcagtgagctgcacactggctccattcccctggacgagagcagcagtgacatgctggtcattgtggatgacccagcctcctcagcccctcagtctcgagctaccaactctcccgcatccataacaggctccgtctcagataccgtgaatggaatttccattcaggaaatgccagctgcaggacgtggtcactcagcccgaagccgaggccgccccaaaggttcaggaagcacagccaaaggagcagggaagggccggagccgaaagtccacggcaggcagtgctgctgcaatggcaggagccaaagccggggctgcagcggcctctgcagctgcctatgccgcatacgggtacaacgtgtctaaaggaatctccgccagcagtcctctgcagacatcccttgttcggcctgctggccttgctgactttggaccttcaagcgcctcttctcctttgagttcccctttgagcaagggaaataatgttcctgggaatcccaagaacctccacatgaccagcagcctagccccagactctctggtccggaaacagggcaaaggcaccaacccctctggaggacggtaaccatctgggccctccgacttccttcaaccaaaccagggctagagtcctgacctgccagtggtctttggatggcttgccccgtgcagcatcttgcatcctgagtcagaagtggaaatgtccagcaggggaaggacaggcaggtggatggtgtgagcacttttatcatctgtgtctcatcaggagcatctggggtgcctgtaggaggaaggccacagggcatggatcagccccactgcatctcaagtgaactgtatagccaagtcttaaacctctcacggggcaagcctgacacagaccccctttagatgctcaggcatactgtttccatcccgattccactcttcggctctgacacgtcccttgcaaagtctccgcaggtgctgtgaagagccttccatggtagagatttctcttaagagtgtgatttctcatagggctagtaagggagattgtatacctgttgtccacagtcttcaggcagctccccaggtctctgaaccccagagtgtcatcattggagagagcagtgactgcgagagatggtggaggccgctaagcatggtagaggctagaggaagtctatccacaggcagttgtgttcccagcaattcctcccatcctgcatggttcacaccaagagaaccttcagatcctaccagcaaccgtagcaccttccacccaggggactcccagaagccagtaaagagaccaggagccacctcaatcagcaggacagcctcactgcccctcttgcagagtcccctttgcccatcctgaatgcacagtctccctgctcatgcccttcagtcccctgcttggctgtatgcactgtctatattgcactgagagaggaagggacagcaggagtgaggtgaagagggcggagagagggggcaggctcggcaccggccctcccagcccggccagcctgagcttgctgccctccagtagagacagaggggcagtgtttgcatgggaggtgtttctgcctgtccctgcctgatgtccctggtggagcaggtacctccgggcgggcaagcctctgatttgcacacctgaaaatcgcggaattgagtttcgatagattgatttttaaaacttttttggagtagggggtataggggaatcatttaatttaaatcattaagattcccctgctcaaacccagattcctgtgtacagatgctatttagagggaatcagaaaaatgccaagccttttctctttgaatgtgctatttttataactgaacttgtacatatgtataaagagagacacatcttccttttactaactggataaaaaaatcttaaataaaatggagtgagataattttatgtaaaaaaaaaaaaaaaaaaaaaaaaa

SEQ ID NO: 12949 - DNA, 5515 bp, Homo sapiens
atgacccggatgtcctgcccctggggttcctaccagtgggagccgggggcatgtcctgcagccccaagaggcataggtggtggggacatggctgggggtatcccagatgtgcgggggctccaggaggcagctctaggtgcgggaaggagccaagaggaggcacgcctggtggaggaagcccagaccccagtgatgctgccacaggattcggggcagagggtggaggaggttcccggggacctgatggccaagagaatgtcgctcatcttgcacgtgcaaaagttgccctgggaccacgtgccttgcctgcggaggacccggcaaaacctgtaccaggacgtcggtggccacgcccacggctcagggctgggcggggccaagcgcggggcagcacgctctgctctccgacgtcccctcccgcccgcgacctgccgacctgcggggatcgttagcggtcccagcccccgtctagattcaaatccgactggggcccatctgattaaacagaccaggccactcactgtggagtggaccaaggatactcctgtccctgagcccatggagctaaggtctgatgccagccacaaggagaatgtgtccccaaagcctgcagcgctcccgaagccaggcaagaggcttaagcaacgaagattccggaggagcctgggcatcggcctgagtggtagacatgaccagtgggtgcccgggtgccaggtggagaggggagggcctgctgccacaccctccccaggggcagtgctagaccaggagccctgccgagtccagaccaacctggccagccctggtccccgcctgggcctagctctgaaggacacgactggccaactggtcaattcaagcttctggcaacagagcaacctgcagtccctggccaggaggcgccaagggaaggcccgagagtttgccatccagcagagcaacctgagcatcaacgagaccagcagcccccacctctgcccagagcctgggggaagctctgggccccacaagcttccctggggtcctctcctatcccaagagccactggctcgcccatcttcctgcctgaggcagtccgggctgccggccccaggcacccctagcggggacttcaggcccactgaagcctttgcccctctcgatgggcatacacagccaggcctcagatcctggggtggtctggggagctggaggtccaggctggtgggggaacctctcaccctggaggacctggctgtccccagtcagaaccagactcaggccccatcccgtgctgccgtccaccagctgctggcttctgtacattgcctggcgcaggaggcagcccgactcaggtgccaggctccccaggaaccccccgcctggggagtctcacccaagcagaaaggagaggagggggccccgagggagcgggtccacagggaggaggagaggacagctttccatctgtcagacacagtcccagcgagcagtgcgtcgaagaacaaggcacaaaacatcacagccccagagtctgaggcaatctgctggcagctgttgtccagatgttttcgatcctggaggcacttggtgaagaggcagcgggagccagcggcggcggcagtggcactgggccgctggcagctgttgcgaaagtgccttcaggccttgtggctccgggaggctcagctggaggcagcatgggggcagtacacaaaggttctgctggtccggagcttccgagaggtcagcggtctccaggttgggccagggggccgtgtgaagcagtgtccaggaagtctgagggaggaggagattgctcagcggcttctgtcacatcctaggcagagaacagacagcagacacgagagagtccagatcctgcaggccctgcaactggctgtgttcttcctgtggtgccaacagaagaaacgggccagacaggagagggagactctgcggaaggccaccagggccacacagaggacagggagcttcccccaggcctggcactctactgctgcaggtgtagcctgggtggccccactgagcccccagcaccagagagcttggctgtgcaggtgcttcggggcgtggcagcagttcgtgcaaagagggtcccggtaccgagaccacctggctgaccgccggacggggaccctgaggaaatgcctggaacagtgggtgcggatgaagcagctccgggaatcagatggggcaaaggtgacccagctgtccctctgccggcagaaagcaggacgtgaggctgtctacaccgcaggccctggagcctgtggcctgggtgcagtgggccaggcccaggggcagcaggagcaaggccggggctccctgcaggatgcctgctggacactggccctctgctgggcgctgctgctgtggaagatgcggcttttccagcgccagtgggccaactccttcttccagggcctgcagcagcggatgctgcagcgcagcctgagatggtggcacttgagggcactgggcccagatgccacatcaagctgcaccaagaccccctcggctctggagccactgagcagcagcacactccaagactctctggagaaggttcccagggcccccaccctcccggacactctccaggggagccttctgtgggcagctgggcagcggcagcaggggcagtgccttctgctctggcaggcacgggcccagcagttccagggcacagccaggtggtaccagcatacccgccagaggcgcatcttcctcagctggagccgctgggcaacagcccaatgggcctggagagagctggcttcccaccgggcctgggatcggacctgcagggctgtgctgggcctgtggcgtcagcggctgctgcagtcacggctggtggagtggtgggcccaggagcggggctggcggctggcacgagatgccctatgccactggcactcctgttggcaggggcagcagttcctgcatgaaaagtgccagacatgggtgcaggtccacctccagggcctgcagaaggtggtgttccggagctggcagcaggcagcagctcatcagagatgcacagtgacccggccagagcagctgctactgcagagctacttccaggcctggtgtgaggttgtaagagacacgggggtgctccgggcccagcatcaagcctttcaggatggcctgaggagaagagcactgggggccgtgtttgccacatggcgggaagcccaggaagtggcagccggggcacaggagcagcgtgtggcccaggcctcccttgcccgctggagaagctgcgggcagcaaggccaggaagatgggcagcagaagaaggcccgggccccacaggccttcccagcatggccagtggccccgggcatgcaccatgaggcccagcagcaggcaggagagagcgctggggcccaggcagcccagtgctggacttggtgctgggctctgtgggtgcatgagtcctgtcggggccaggtcagccgagcccatgcttcctggaagccgcgagcctgggtcctagaggcctcggtgcagtcggcggtgcgcggcggtgtccagcgagccatcctcacccagctccggccggctgagctcaggcgcttcctgcggacagtgcagctcagggtgcggctgggactgccaggggccggcaagacccgcagctgctggacacaggccacagagctggtgcctcccgcgccatcactgcagtgcagcctgggtggacggaggaagccaaggggaacggcctgggctcagaggtgcagggaacattccctctgccctgccttccagctctggccacagtggcctggacagagtagctgggtcccaggcctgcccctgtggacgagggaccagggaccaagagcgcactccagccctgagcccagagcctgcaaagcccaaagcaaggcccataaacggaggctacggatcctggaaaagcaggcccaggcccatggctctgccctccttctggccctgaagggtcacgatgctcttggccatcaggaggaagtacctgcagcgccggtgcctcgaggcactgcttcacgggctgcggggttcccagcaggccaggtgcctggcagtggcatggcagcactgggtggatgcccaaggggcagagcagctggtgcggaccctgctcagggagtggcacctgagatgggcctggcagacgtggtggcagcggatcctgcgactgcgagtggctcagcagttacagcagcaggaagatgggcctttaagaagtggcaccaacgcctggcagccaggagcccaaggagaggagctgccagtagcccaagaccctggagcaagccaggccccaagggccccgagagtggacaggaagccgccagagcaccgcggggttgggggcttggggcagagcatggggcccagctgcagctgtgacttgttctcatagaataaaaaacagaactgaacttagccttcccagggaaggaaccatgccccacacatccagggagtgatgacagaggggacagcttgaagagctctgaaggacaataaaacccactcctcagtcctagctgctgctttcagtctctcctagcggctgcccctctgccccagccagtgaggccaggaagggagtaaagaggacatcccacaattgcgtccacccccttggccatcaggctgctcttccactacacgaaacagcccatctgcacctgccagtcactgcccccaggccctggggcttgcaggtgactcgtggggagccaggccaggcagataacctctgggacaggacgaggggatgaggaaggcagctggcaggacaagggcctacctgaaaaatacaccaggaagctgggctgctgcacaggcccaggcagatctggggcccctgtgctggcaaatctcatcttagcctctgacagggaacggggcagcatcaggcctccacagccaggcaaaaggggaaggccacgagccccaccaagcacaagggttcagactgccttcaacccttaaggggcactttttctctcaaggctcagaatagacaactgtgccaaaaagcagcatggtaggtgtcagcccaatgcccatccagggggctggtgccatggacggctaagtgggcaggcagggcagtggtgtgccccttcagtcacaagtaggtggggcccagctgcccacctctaggaggtggaagggtacagcactttgccacatctcttctacgatgccaccagtgcctgatgcccttgcgtgttttgcctgtactgcacgggctccaagtgtaagttcactgggagtcccaggctggctctggaggctgccttggttcgagggcttagttggcaacaaccactctcctcgccttctcaggaggtgccacccactgtggtcctctgcaggacgcaagtgctccccaccaaaagagcacagactcctggctagagcagagagtactaggttcccatgtggggccgactcaggtccaggaagagcctggaagcctcactccagtctagctgccattgtc

SEQ ID NO: 12950 - DNA, 1552 bp, Homo sapiens
acttaatgggctcaaggtcacctacctgacctaccagcagctcaatggccttcccaaagaagaaacttcagggtcttgtggctgcaaccatcacgccaatgactgagaatggagaaatcaacttttcagtaattggtcagtatgtggattatcttgtgaaagaacagggagtgaagaacatttttgtgaatggcacaacaggagaaggcctgtccctgagcgtctcagagcgtcgccaggttgcagaggagtgggtgacaaaagggaaggacaagctggatcaggtgataattcacgtaggagcactgagcttgaaggagtcacaggaactggcccaacatgcagcagaaataggagctgatggcatcgctgtcattgcaccgttcttcctcaagccatggaccaaagatatcctgattaatttcctaaaggaagtggctgctgccgcccctgccctgccattttattactatcacattcctgccttgacaggggtaaagattcgtgctgaggagttgttggatgggattctggataagatccccaccttccaagggctgaaattcagtgatacagatctcttagacttcgggcaatgtgttgatcagaatcgccagcaacagtttgctttcctttttggggtggatgagcaactgttgagtgctctggtgatgggagcaactggagcagtgggcagtacctataactacctgggaaaaaagacaaaccagatgttggaggcttttgaacaaaaggacttctctttagccctgaactatcagttttgtatccagagatttatcaactttgttgtcaaactaggttttggagtgtcacagaccaaagccatcatgactctggtctctgggattccaatgggcccaccccggcttccactgcagaaagcctccagggagtttactgatagtgctgaagctaaactgaagagcctggatttcctttctttcactgatttaaaggatggaaacttggaagctggtagctagtgcctctctatcaaatcagggtttgcaccttgagacataatctaccttaaatagtgcatttttttctcagggaattttagatgaacttgaataaactctcctagcaaatgaaatctcacaataagcattgaggtaccttttgtgagccttaaaaagtcttattttgtgaaggggcaaaaactctaggagtcacaactctcagtcattcatttcacagatttttttgtggagaaatttctgtttatatggatgaaatggaatcaagaggaaaattgtaattgattaattccatctgtctttaggagctctcattatctcggtctctggttcctaatcctattttaaagttgtctaattttaaaccactataatatgtcttcattttaataaatattcatttggaatctaggaaaactctgagctactgcatttaggcaggcactttaataccaaactgtaacatgtctcaactgtatacaactcaaaatacaccagctcatttggctgctcagtctaactctagaatggatgcttttgaattcatt

SEQ ID NO: 12951 - DNA, 3244 bp, Homo sapiens
agtgacaattaaagatggctgcgcccatgtaacatcactagcgaccggtgacctctttttcccccttgcctggctcctgtggtggcaggctgggcacgaggaccatgctgggccggagcctccgagaagtttctgcggcactgaaacaaggccaaattacaccaacagagctctgtcaaaaatgtctctctcttatcaagaaggccaagtttctaaatgcctacattactgtgtcagaagaggtggccttaaaacaagctgaagaatcagaaaagagatataagaatggacagtcacttggggatttagatggaattcctattgcagtaaaagacaatttcagcacttctggcattgagacaacatgtgcatcaaatatgctgaaaggttatataccaccttataatgctacagtagttcagaagttgttggatcagggagctctactaatgggaaaaacaaatttagatgagtttgctatgggatctgggagcacagatggtgtatttggaccagttaaaaacccctggagttattcaaaacgatatagagaaaagaggaagcagaatccccacagcgagaatgaagattcagactggctgataactggaggaagcccaggtgggagtgcagctgctgtatcggcgttcacatgctacgcggctttaggatcagatacaggaggatcgaccagaaatcctgctgcccactgtgggcttgttggtttcaaaccaagctatggcttagtttcccgtcatggtctcattcccctggtgaattcgatggatgtgccaggaatcttaaccagatgtgtggatgatgcagcaattgtgttgggtgcactggccggacctgaccccagggactctaccacagtacatgaacctattaataaaccattcatgcttcccagtttggcagatgtgagcaaactatgtataggaattccaaaggaatatcttgtaccggaattatcaagtgaagtacagtctctttggtccaaagctgctgacctctttgagtctgagggggccaaagtaattgaagtatcccttcctcacaccagttattcaattgtctgctaccatgtattgtgcacatcagaagtggcatcgaatatggcaagatttgatgggctacaatatggtcacagatgtgacattgatgtgtccactgaagccatgtatgctgcaaccagacgagaaggatttaatgatgtggtgagaggaagaattctctcaggaaactttttcttattaaaagaaaactatgaaaattattttgtcaaagcacagaaagtgagacgcctcattgctaatgactttgtaaatgcttttaactctggagtagatgtcttgctaactcccaccaccttgagtgaggcagtaccatacttggagttcatcaaagaggacaacagaacccgaagtgcccaggatgatatttttacacaagctgtaaatatggcaggattgccagcagtgagtatccctgttgcactctcaaaccaagggttgccaataggactgcagtttattggacgtgcgttttgtgaccagcagcttcttacagtagccaaatggtttgaaaaacaagtacagtttcctgttattcaacttcaagaactcatggatgattgttcagcagtccttgaaaatgaaaagttagcctctgtctctctaaaacagtaaacatatcttacaaattaaaatgacttttaggctgggtgcagtggctcacacctgtaatcccagcactttgggaggccaaggcgagcggatcatgaggtcagaagatctagaacagcctggtcaacatggtgaaaccccgtctctactaaaaatacaaaaattagccaggcttagtggcgggcatctgtagtcccagctactcaggaggctgaggcaggagaatcacttgaaccctggaggtggaggttgcagtgagccgagatcatgccactgcactgcactccagcctgggtgacaaagcaagactgtgtctcaaaataaataaataaaataaaataaaatgacgtacagagattctatattctagagagtcaaatggtcttgctcaattcttgtaattaggttcttgttaatacagtcattccatggaattactttttaaaattcctgtgacaattaataataaataacgtgtcagcatttagtaagcatccactaagtgtacaatacttctacaataacacaagatacctgttcctcaaagacaatgcattctgccataatgttcattaaagagtttacagtaaaaataagattagggataaacttctcaaaaattgtacatctgtgtaactaaagcactaacaaaaacatgaatagtccttctagaggtaacttggatagcctaggcaggcaacttatcatgtggtgaaggccgcctcaggggttgttaaaaatgcacagaaacaattgagtgcgattattggcttctgagcgctgagcagagcaggtggaagaggaactttgagcacaggaggaaatgcaaccagtcagggcccagaatcatgcaaatctcaggggtatgcctctctggggaggagctccacttgcagggactccttttatttccctaagaaagagctgaaatgactgagaactttcctttcctccttagagttacaattttacttctgctattccggagcccatgcctagaagccagaacaactccatgttacactgagttcatgctcctatttactgatcacaaatgagctcattaatgtcatcgaaacatttattgtaacctaacagaccatcacagattggaaacttggtagatagcagagcatggtattagtgaaaaaggttcaaaatacacaagtaacatacactctgaaaaacatgcagataatttgctgatgaagcagaagaggggatgcgcatggcaagaacttgccttaccccagattctctatatctcatggtttccttttcctcttgactgtctttacgagtgttttttatttgggaccctcgagcccagagatattaatggatatctgtattcaatatttgacaaaatctaatggaaaccatccatttactcatgataaggcttcatcactggatttctgtgtcttcactagaacaccattgtcatctcatattgatcaggtattttaatctagcacttacatattgttgataaatgaaagctgaattgttacttaataaattcactttgtttagcaaaaaaaaaaaaaaaaaaa

SEQ ID NO: 12952 - DNA, 1956 bp, Homo sapiens
ctctctccagctccagctggacctgaagtctcagagctgccaccagcagcaggctcagacactgggctcccagctggggactgctccatggccatggagatagacagcaggcctggggggctccccggcagtagctgcaacctaggtgcagcccgagaacacatgcaggcggtcacccgaaactacatcacccacccccgtgtcacctacaggactgtgtgcagcgtgaacgggcccctggtggtgctggaccgggtcaagtttgcccagtatgcggagatcgtccacttcaccctcccagatgggactcagaggagcgggcaggtgcttgaggtggctggcaccaaggcgattgttcaggtgtttgaagggacatcagggatcgatgccaggaagaccacttgcgaatttacaggggacatcctacgaactccggtgtcagaggacatgctgggtcgggttttcaatggctccggcaagcccattgacaaggggccagtggtcatggcggaggactttctggatatcaatggccagcccatcaacccgcactcccgcatctaccccgaggagatgattcagacgggcatttctcctattgacgtcatgaacagcattgcccgcggccagaagatccccatcttctcagcagccgggctcccccacaatgagattgccgctcagatctgccgccaggcggggctggtgaagaagtccaaggctgtgctggattaccatgacgacaacttcgccatcgtctttgcagccatgggggtgaacatggagacagccagattcttcaagtctgactttgagcagaatggaaccatggggaacgtctgcctcttcctgaacttggccaatgaccccacgatcgagcggatcatcaccccgcgcctggcgctgaccactgctgaattccttgcctaccagtgtgagaagcatgtgctggtcatactgacggacatgagttcctatgcagaggccttgcgggaggtctctgctgctagagaggaggtgcctgggcgccgagggtttcctggatatatgtacacagacctggccaccatctacgagcgggcgggccgcgtggagggtcggggaggatccatcacacagatccccatcctcaccatgcccaacgacgatatcacccaccctatcccagacttgacgggcttcatcacagagggacagatctacgtggacagacagcttcacaacagacagatctacccccccatcaacgtgctcccttccctgtcgcggctgatgaagtcagccattggggaaggcatgacaagaaaggaccatggagatgtctccaaccagctgtacgcctgctatgccatcgggaaggacgtgcaggccatgaaggcagtagttggggaggaggcgctcacctctgaggacctgctctacctggaattcctgcagaagtttgagaagaacttcatcaatcagggcccctacgagaaccgctcggtgttcgagtcgctggacctgggctggaagctgctgcgcatcttccccaaggagatgctgaagcgcattccgcaggccgtgatcgacgagttctattcccgcgagggggcgctgcaggacctcgcgcctgacactgcgctctagccccgcgcgccgtggcaccccaacaccggcagggaacctaccctcggctcccgggtctcccctccctcgccaccccaaccagcggcttctgcgccgccctccgccctccgctggctccgaggtggtgggggcgccgcacgctccatccctttccctcgctcgattccttttcccgcgctccatgcctccccctcgactcccggtgctgcggaagaactgaaggttgcgatgccttactctgacgggagcatctgtatttttatgttaaaagcccacaaaataaaaataaaaagtaactgagatgaatttaaaaaaaaaaaaaaaaaa

SEQ ID NO: 12953 - DNA, 5247 bp, Homo sapiens
cgcttgtgggccggccttgggggagggggacgcgcacccacagaaggactcagagggcttcacggtaagctgagcagggtcaaggtccacagggagcgggagagggtagtaatccgggaagtcttcctggtggcagtgaattctttgcggggttcggcaggcgcaggatccttggggccgcgcaccctgcagcggcccctcccctcccctcccccctcccacctgtgggaaacgcaggccctgagagaggctccgtcagtgccagcagctggcgccactgcgtcccctgccccggcctcagccagccctgggacctctgcggaggactgatcccgggaagggggccctgtcttcccagggccccggtgcggccgagctgggaagaccttggggagggcaggcctgccacctactgcagccgcggcccccgtccatccgggagggacaggctgtgcccttggcggcgcccacccgcgacccagatgtgcgtcgcctacccaccctcccccagacccccgtttcctcaggcgctcgccgcctcggggcgcctggcacgcggcagccccgcaaggtaggtccttcattcctcccatttcgcagaggagaaaactgcagtccgggatggctcagtcggcccctccaaagtcgcgcagctggttcgggccgagccccgactgcgagagtgaggcacatggcccctgcagaccgggcctcggagggtcccaggcttgaggacccgtcggcccctcaaccccttggaaaggcaaggagagaagcctgcgctggtagtgagcttccacttctgccctgactgcaacacttaggttagggggctgggaaggacccccaccctcaatttttggataggggtgtatttctctccctcccctaatttctgaggttggttccctgttggattcaggtactgctctccccttccaaccccatttccccagcccatgaggttgggatattagggtcccagacccaagataaagaaccccaaaattctggggttgcagcaaagagttgagagggtcactgagcctgggaagctcatggcggaggtggggctaaggcagaagtttaggaatggaacgctgagctgagctgagctgagctgagctgagcaacgctgggggctatgtgcatggagccctgggggttgggctttatcaggtgggcaacaggcagcccccattcccaagttctctcttttatcccagccttattccttcaccttggatgcctgggaactttttgtacccattgtagggaaggggacactgaggggcagagcggtgccgggttgacttggctggggtggtgggaataggagtagggtcttacctatctctgccttcccacctgtgcccacagtgcccccctggcttagtcatggcgaagctggagacgctgcctgtgcgcgctgacccagggcgggaccctctcctggcctttgccccacggccctccgagcttggacccccggacccccgcctggccatgggcagcgtgggcagtggggtggcccatgcccaggagtttgccatgaagagcgtgggtacccgcacagggggtgggggcagccagggcagtttccctggcccccgaggcagtggcagtggggccagcagggagaggccgggccgctacccctcagaggacaagggtctcgccaactccctctacctcaatggtgagctgcggggcagtgaccacaccgatgtctgtggcaacgtggttggcagcagcggaggcagcagcagcagtggtggcagtgacaaagccccaccgcagtatcgtgagcccagccacccacccaagctcctggccacctctggcaagctagaccagtgctcagaaccactagttcggccgtcggccttcaagcctgtcgtacccaagaatttccactccatgcagaatttgtgccccccgcagaccaatgggactcctgagggacggcagggccctggtggcctcaaaggcggactggacaagtctcggaccatgactccagcgggtgggagtgggagtggcctctcagactcaggccggaactccctcacaagcctgcccacctacagctccagctacagccagcacctggcacccctcagtgcctccaccagccacattaaccgcattggcactgccagctatggtagtggtagtggcggcagcagcggtggggggtcgggctaccaggacctggggacctccgatagtggacgggcctccagcaagagtgggtcgtcgtcatctatggggcggccaggccacctgggctctggggagggcggaggtggaggcctgcctttcgcggcctgctcaccgccctcccccagtgcactcatccaggagctggaggagcggctgtgggagaaggagcaggaggtggcagctctgcggcgcagcctggagcagagcgaggcggctgtggcccaggtactggaggagcggcagaaggcgtgggagcgggagctggccgagctgcggcagggctgcagcgggaagctacagcaggtggcccgacgtgcccagcgcgcccagcagggcctacagctgcaggtgttgcggctgcagcaggacaagaagcagctgcaggaggaggcggcccggctgatgcggcagcgggaagagctggaggacaaggtggccgcctgccagaaggagcaggccgacttcctgccccggatagaggaaactaagtgggaggtgtgccagaaggctggcgagatctccctcctgaagcagcagctgaaggactcgcaggcggatgtgtcgcagaagttgagtgagatcgtgggactgcgctcgcagctgcgggagggccgggcttcgctgcgggagaaggaggagcagctgctcagcctgcgggactccttcagcagcaagcaggccagcctggagctgggcgaaggcgagctgcctgccgcctgcctcaagccggcgctgacccccgtggacccggccgagccacaggatgctctggccacctgcgagagcgacgaggctaagatgcgccgtcaggccggggtggccgctgccgcctccttggtttccgtggacggggaggcggaggctggcggggagagcgggacgcgggccctgcggcgggaggtggggcggctgcaggccgagctggcggctgagcggcgggcccgggagcgccagggtgccagcttcgccgaggagcgccgcgtgtggctggaggagaaggagaaggtgatcgagtaccagaagcagctgcagctgagctacgtggagatgtaccagcgcaaccagcagctggagcgcaggctgcgggagcgcggggccgcagggggtgcaagcacgcccactccccagcatggcgaggagaagaaggcctggaccccctcccgcctcgagcgcattgagtccacagaaatctgatcgacctgggcactcggcattttgacacatgtcctgtcaaaaggccagagtccccagtgtcccctcccctccatctctcttccccatagaccccataaccccagaccaaagaggttctctaagcagctgtgaccaggttcctccctccccacctgccctcctagctccagcactgcccccgtggcagcccacttggacccccctaaaaggagggaataggaggagggcagggtgagtgggggcaatcctaggtggtgggggagtcatgctccctttctcggcacccccttgttggagatggaggcagcagacgtgcagtgccataaggtgccccagtccttctggaggcctgggctgctactgttggccaccctgtgtctagtgatgctctctgtgctcacctcctaggccatggagcctgagggggcctgcaccaggtttgctgaaactgacagagcctgggctccagacctctctccctcctacagtgctctccctccctgggcagattggcaggacaagtgggagcagatggcctgcctttggctgagagggctacctgcccagcccctcccccaacaagatctcttggactcaggcctcagagcctggcctggttgtgagtgtgtgtccctgtgtgtgtgttgcgggaggggaggactggggctggaagtccagcacccagggaagatctgtcctcctgttcttgggaagcgttgcctgacggcttctcggctctaccctcacccttctggccaggatcccgcagggcaacagccccatctgcttggctgaccccacacccaggaccactgtccggctctaacacagctattaagtgctacctgcctctcaggcactctcctcgcccagtttctgaggtcagacgagtgtctgcgatgtcttcccgcactctattcccccagcctctttctgctttcatgctcagcacatcatcttcctaggcagtctcttccccaaagtctcaccttttcttccaatagaaaattccgcttgacctttggtgcactgcccacttcccagctccactggcccaagtctgagccggaggcccttgttttgggggcggggggagagttggatgtgattgcccttgaagaacaaggctgacctgagaggttcctggcgccctgaggtggctcagcacctgcccagggtaggcctggcatgaggggttaggtcagccaatgtcagctgcttctcttggggccctctcagagtctatctccccaagacaggaagggaaaagcaaatttctaattcaccagcaataaaaattggaggaggcttggccctcagcccttatatctctctctttttcactctcttcctcccacccccaagactgagttttggggggcaaggtggagagagctggcaactactgtgagcaagtcccctagcccctgaccagcctcctcccatgactggtgactgtttaatgagctgtgcatcccccacaaaaacatgagtgcccctctgtgtggcctctaaccctctgcacagcccttctgggtggtcctcaccaggtctctgagctgggtgggaggccatcctggcgaccactgcccattccattcacccctcactgtacctgccctagaacctgggcctaggccacaggggcagggagaagagaaggcattagtaagaaaaaaatagaaaaaaatatgaacagactcagctttgggacgtccaaccacaaaagaaattatatataaatatatataaatatatatctctaccatatgtgatggaaagactttttgttttcctttcccaaagaaataaaacggaaaaagcctc

SEQ ID NO: 12954 - DNA, 8796 bp, Homo sapiens
gcccccggccccctcccgccgggtcaaccccgaagagtcgccggtggccgcggcagacggaagccgaacgagttcctcggcggctgcaggatgggggactccaaagtgaaagtggcggtgcggatacgacccatgaaccggcgagagactgacttgcataccaaatgtgtggtggatgtggatgcaaacaaggttattcttaatcctgtaaatacgaatctttccaaaggagatgcccggggccagccgaaggtgtttgcttatgatcattgtttctggtctatggatgaatctgtcaaagaaaagtatgcaggtcaagatattgttttcaagtgccttggagagaatatcctgcagaatgcttttgatggctacaatgcatgtatctttgcctatggacagactggctctggaaaatcttataccatgatgggcacagctgaccaacctggattaatcccaagactttgcagtggactctttgaacgaactcagaaagaggaaaatgaagaacagagttttaaagtagaagtgtcctacatggaaatttataatgaaaaagttcgagaccttcttgatcccaaaggaagccgtcagacgttgaaagtcagagagcatagtgtgttgggaccttatgtcgacggactttctaaactggctgtcacaagctacaaggatattgagtcgttgatgtctgagggtaacaaatctcgcacagttgctgcaaccaacatgaacgaggagagtagccgatcccatgcagttttcaaaatcaccctcacacatactctctacgatgtgaagtctgggacatctggagagaaagtgggcaaactcagcctggtggatttagctggcagtgaacgagcaacgaagacaggcgctgcaggggacaggctgaaggaagggagcaacattaacaagtccctcacaaccctcggtctggttatctcagctcttgcagatcagagtgctggcaaaaacaagaataaatttgttccatatcgtgactcagttctcacttggctgctcaaagacagcctcgggggtaacagcaagaccgccatggtggctactgtgagtcctgcagctgataactatgatgaaaccctctcaactctgcggtatgcagatcgagccaagcacattgtaaaccacgctgtggtgaatgaggaccctaatgcccgaattatccgggatctccgggaagaagttgagaaactccgggagcagctgaccaaagcagaggcaatgaaatctccagagctaaaggaccggctggaagaatctgagaagctaatccaggaaatgactgtgacctgggaggagaaattaaggaaaacggaggagattgcacaggaacgacagaaacagcttgagagtcttggaatatctcttcagtcttcgggaatcaaagttggggatgataaatgcttccttgtgaatctgaatgctgacccagctctgaatgagcttctggtgtactatttaaaggaacatacattgatagggtcagcaaattcccaagatatccaactgtgcggcatgggaattcttcctgaacactgtattatagacatcacgtcagaaggccaggttatgctgactcctcagaagaacaccagaacatttgtaaatgggtcatctgtctccagtccaatacagctacaccatggggacaggatattatggggaaacaatcatttcttcagactcaatttgcctaaaaagaaaaagaaagcagaacgagaggatgaggaccaggatccctccatgaagaacgagaatagttctgagcagctggatgtagacggagactcctccagcgaggtgtccagtgaagttaactttaattacgaatacgcacagatggaggtcaccatgaaggccctgggcagcaatgatccgatgcagtccatattaaacagcctagaacaacagcatgaagaagaaaaacgatctgcactggagcgccagaggcttatgtatgagcacgaattggagcagctccggagaaggctgtctcctgagaagcagaactgccggagcatggacaggttttctttccactcgcccagcgctcagcaacgcttaagacagtgggctgaggagagagaagcaacgttgaataacagcctgatgaggctgagggaacaaattgttaaggccaatctattggtgagagaagctaattacattgctgaggagctggataaaagaacagaatacaaagttaccctacagattccagcctccagcctggatgccaacaggaagcgaggctctcttcttagtgagcctgcaatccaggtgagaagaaaaggaaaaggaaagcagatttggtctttggaaaaactggacaacaggctgttggatatgagagacctttatcaggagtggaaagagtgtgaagaagataacccagtaatacgatcatacttcaaacgtgctgatccattctatgatgagcaggaaaatcacagtctcattggggtggccaatgtcttcctcgagtcacttttctatgatgtgaagttacaatacgctgttcccatcatcaaccagaaaggagaggtggcaggtcggctgcacgtggaggtgatgcgactcagtggtgatgttggggagaggatcgcaggaggcgatgaggtggcagaggtctcctttgagaaggagacccaggagaacaaactggtgtgcatggttaaaatcctgcaagctactgggttgccacagcatctgtcccactttgtgttctgcaaatacagcttctgggatcaacaggagccggtgattgtcgctcctgaagtggacacctcctcctcttccgtcagcaaggagccgcactgcatggttgtctttgatcattgcaatgagttttctgttaacatcaccgaagactttatcgagcatctttccgaaggagcattggcaattgaagtatatggacataaaataaacgatccccggaaaaaccccgccctgtgggatttgggaatcatccaagcaaagacacgtagtcttcgggacagatggagtgaagtgaccaggaaattggaattctgggttcaaatcttggaacagaatgagaatggtgaatactgccctgtagaagtgatttctgcaaaggatgtcccaacaggaggaatcttccagctccggcaggggcagtcccggagagttcaagtcgaagtgaagtcagtgcaggaatctgggactttaccactgatggaagaatgtatactgtctgttggcattggatgtgtcaaagttagaccgctcagagcccccagaacacatgagaccttccatgaggaagaggaagacatggacagctaccaggatcgagatttagagagacttcgtagaaaatggctaaatgcattaacaaaacgtcaggagtacttggatcaacaattgcaaaagcttgtcagtaaacgtgataaaacagaggatgatgctgaccgtgaagcgcagcttctggagatgcggttgaccctaactgaggagaggaacgcggtgatggtcccctctgctggcagtggtattccaggggccccagcagaatggaccccagtacctgggatggagacacacattcctgttatattcctggacttaaatgctgatgatttcagctctcaggataatcttgatgacccagaagctggtggatgggatgcgaccttgactggggaagaagaagaggagttctttgaattgcagattgtgaagcagcatgatggggaggtgaaagcagaagcctcctgggactccgcggtgcatggctgccctcagctcagcaggggcacgcccgtggacgagcggttgttcctgatcgtgcgcgtgacggtccagctcagccaccctgctgacatgcaactggtgttacgcaagagaatctgtgtcaatgttcacggccgccagggttttgcacagagtctcctaaaaaagatgtctcatcgaagttctattcctggctgtggagtgacttttgaaattgtctccaatattccagaggatgcccagggagtggaagaacgggaagcattagcaagaatggcagccaatgttgaaaacccagcttctgctgactcggaggcttatattgaaaagtacctcaggagcgtgctggctgtagaaaacctcctgactttagatcgtctgcgccaggaagttgcagtgaaggaacagttaacaggaaaaggaaagttgagcaggaggagtatcagttctccaaatgtgaacagattgtctggaagccgacaagatctcattccatcatacagtctaggcagcaacaagggccggtgggaaagtcagcaggatgtatcccaaaccacagtttccagaggaatagctcctgcccccgccctctctgtttctccccaaaataaccattctccagatccaggactcagtaaccttgcagcatcctacttgaatcctgtcaaatccttcgtgccgcaaatgccaaagctcctcaagtctctctttcccgtccgcgatgagaagaggggcaagcggccgtctcccctcgcacaccagcccgtgccccgcatcatggtgcagtcagccagcccggacatcagggtgaccaggatggaggaggctcagccggagatgggccctgacgtgctggtgcagacgatgggggccccggccttgaagatctgcgacaaacctgccaaagtgccttccccaccgcctgtcatagctgtcacagcggtcaccccggctccggaggcacaggacgggccccccagccccctgagtgaagcctctagcgggtacttctcccacagcgtctccaccgcgaccctgtcggacgccctgggccccggcctggacgctgcggccccgccggggtccatgcccaccgcccctgaggccgagcccgaggcgcccatcagccaccccccaccgcccacggccgtccccgccgaggagccccctggcccccagcagctcgtgagccccggtcgggagcgccccgacctcgaggccccggcgcccggctccccgttccgcgtccggagggtgcgggcctcggagttgcgctccttctcgcgcatgctggctggggaccccggctgctccccgggggccgaggggaatgcgccggccccgggcgccgggggacaggccctggcctctgattccgaggaagctgacgaggtcccggagtggctccgagagggcgagttcgtcaccgtgggcgcccacaaaacgggcgtggtgagatacgtggggcctgccgacttccaagagggcacgtgggtcggcgtggagctcgacctgccctcaggtaagaatgacggttccatcggcgggaagcagtacttcaggtgtaaccctggctacgggctgctggtcaggcccagccgggtccgcagggccacgggccctgtgcggcggcgcagcacaggactccggctgggtgcccccgaggcccgccggagcgccaccctctcgggctccgccaccaacctggcctcgctgacagctgccctggccaaggccgacaggagccacaagaaccctgagaaccggaaatcctgggccagctgagccgctgccttagggcgaacttttctgggggtgcccggccccttttgagccctgccagtgacagccctgaggagccaggagcccggtggccccttccccaggggcagggcgatgaatgctttttgcacgacacagggctggtgacctccctgggcctctggaagctttgtttcttctgtacccgggtaaagtgggggcctcaactgtgcctcctccggtggatggaaggttctgggtgcccgcaggggctgggggatgctaggactgagaccctgggtggtgcagcgcctggtgatcttgctgtgtgcctgtgcctggggccttatgttgctctttctatcatttccattctggtggccccactaatgtcttaacctaaaccataattgtaaccagtgcctttcctccccactggagggcaagcccccccacccacccaggatgtcctggctcactccgcaagccccccagcctcccaccctggtcccagtttcccgcaaagtgcctctgggggaccccccagcctcccaccctggtcccaggttccacaagtgcctctggagggccctgggctctggcagatggtcctggtgccccagacgggggccgagggcctgagcccccccatccctcctctgccagggtttcttagcggtttctctgtggatgttttggcatctttagacacctggaaagtctcttatgtttgccgtttattcccttcacagaaggcttggaatgtatttatttatatttattttttcaaaatccgaaatcatttgcgagccgcaatcgtcgtctgcctgtgtgggggggcccagggcctgccttgcacgttgcagcctctctggccattgcagagctgctggcctcctgcccaggtggagggtcctggggacggcagaggataaagccccctcctcacatccctctattgcggatccacagtggccttactcttaacttggatgagagcaaaaacctgggagaatgatgtgcttctgtagtcggtgacaaaggaagaggcattgctactttatttggtgcacttttggtttctaggaaggtctttgggtcattttaacttctcggcaactcccagactctcagagtgtggggctggggcctggcggctgggctggtgcagggagtgtgctggttagtctccagaccctcacagcagccacgcccccaggcccaccgtgcatggtgtgggcgggacagccggaagcttccggggtggcctccacctcctggctggggcacttatgctcccagagcctttggtgccaggtttgtgggatgggggttagcgtctatgtgtggaaggccaccaatctagggacaggagtcctgggtcaagattcacacagccacccttggagctggtttctagttctcacatttagtcaacatctagaaagcgctgcggaaggctctggttctctagggacttgaaggcgccaacagagtagtctccatggtgggcctgtcccagccctggctgcgaggacaggttgtctttctctccccagttggcgagggacacgaaggctgcggccgggctggcagagggcccggcccctggggggaggcactcctccagggctctccctgtccttagccgattttgagggaaccctgtggcacctgtccctggatgaagagctgtcacctctgccttgccctttaactcaacccgcttcccagcacagcggctttctttttaaaacctgtttcactgagaagtttgtttttgggtccgctggtgtcactatggcctgggtgagaggccagcactgctgctgccctgaggggaaacgcctgggccgtgtagtggggacgctctgggaatggtggcggacgggcagcgtgggtgggacctggcacttcgtggtggctgagccatccacccagcagcggcctcctgtagcaccatcttgggaaagtcctgggggacgtgtgtgtcgtgctttttaccatcggtttgacttacagtggagtagaacgagccagagttcctgacttgagcaggtggatttgggcccaggccctgttcactcttgcttctcggtgcggactaatgtcagcttgtggctgggaaagagggatgtgcagtgacgtggtcaccaaggcagtgagccccgctgaccccgggccagcacttggcaggcaggaggtgcggtctccagagtggtgggccagggcgggctggcctccgtcttctatcttcttttcttgcctccctgaccagcagactcacctcccaagaacgcctgcccgcccacccgccttaggactcccgatgcgctcctggaaggccccaggagtggcaccttagtgtgggtcggcccgcagatggcacccaaggccgggaagggcagtaactgcacacgcggcgctgtcagagatgggggtgggggatgcttctgggggccctgcctccccattgtgtgcccagaacatccctggccccaccccgccacttccctcgggcccttatgaaggactgaggctccagggtgagaaggctcacttctgccccgggcactgcgtccagcagcagaggggacagggggcaggtgtgtgactgggttcctgggtacccaggcctgaccagagggagcgggagggcagaggtgaggagggggaagatgtttctgggcctaccaaggttcaacaagagaacggagctgggaatgtgactgctggagcctgagaggtggaggagttctgatcccccgttacttcctagcattttctcctcttgccttaaaagttccctgtatgtgaaacgggaagtcctgagagtgtgtgttggtggctgtgcgcacgcacacaagacgggagtcaccctgtgcttcctgcccaagatactgacccattgaacccccaaagcatctttctctccacaaagtccgtggtgccttcctggtgggctgcagacactaatggtgttggggggtcttggaacagcttctctatgtgtggattcgtgtaaatgcgaagagttcacatataaagaagtgactttgattctgtgattatattgatttggtacacagtaaatgggagtttaaaaaatccaaagactctaatgacttgtaaagactctaatgatttgtatcatgtaatgaactaaaccacctgtaattttgtaccgtatgtgtctttccatcaaatgaccaacagcttctcaataaaaccagaccatttctcacctgc

SEQ ID NO: 12955 - DNA, 14036 bp, Homo sapiens
ggcgcggtacaggagcagcactgccggcgggggcgggtgccagggacttggaggtggaggggacgcggcggtactctggcgtcttccgacttcgactccttaccttaaaagatgctggagtcatatgtaactccaattttaatgagctatgtgaatcgctacatcaagaacttaaagccgtcggatctacagctttcactatggggtggagacgtggtactcagcaagctcgagttaaagttggatgtgctggaacaggaactgaaattaccattcacttttttaagtggacatattcatgaattgaggattcatgtaccatggacaaaactgggttcagaaccagtggtaattaccatcaatactatggaatgcattttgaaacttaaggatgggatacaggatgaccatgaaagctgtggttctaattctaccaaccgtagtactgctgagagcacaaaatcatcaatcaaaccgcggagaatgcagcaggctgctcctacagatcctgacttaccaccaggttatgtgcagagtctgattagacgagttgtaaataatgtaaacattgtgataaataatctcatactaaaatatgttgaagatgatatcgtcctttccgtcaatatcacttctgcagaatgttatacagtaggtgaattatgggatcgtgcattcatggatatttctgcaactgatttggtgctgagaaaggttatcaatttttctgactgtacagtttgtcttgataaacggaatgccagtggtaaaatagaattttaccaggatcctttattatacaaatgttccttcagaactcgtcttcattttacatatgaaaacctaaattccaagatgccatctgttattaaaattcatactttagtggaaagtttgaaactttctatcacagatcaacaactgcctatgtttattcgtataatgcaacttggaattgctctttactatggagaaataggcaattttaaagaaggcgaaatagaggaccttacttgtcataataaagatatgctaggaaacattacaggttctgaagatgaaacaagaatagatatgcaatatcctgctcagcataaaggtcaagagttatattcacagcaagatgaggagcagccacagggatgggtgtcatgggcctggtcctttgtgcctgcaattgtgagttatgacgatggcgaggaagactttgttgggaacgatcctgcatcaaccatgcatcaacaaaaagcacagactttgaaggatcctattgtttctataggattttattgcacaaaggcaacggtgactttcaaactcacagaaatgcaagttgagagtagttattacagtccacagaaagtaaaatctaaagaagtattgtgttgggaacaagaaggaactacagttgaggcccttatgatgggagaacctttctttgattgccagattgggtttgttggttgcagagccatgtgccttaaaggaattatgggtgttaaagattttgaagagaatatgaatagaagtgaaactgaagcctgtttcttcatttgtggtgacaatttgagtacgaaaggtttcacataccttacaaattcattgtttgattaccgaagcccagaaaataatggtactcgcgcagaatttatcttggattcaactcatcataaggagacatacactgagatagctggaatgcaacggtttggggctttttatatggattacctgtatacaatggagaacactagtggcaaaggttccacaaatcaacaagacttttcttcagggaaaagtgaagatttgggaacagttcaggagaagtccaccaaaagccttgttataggtcctcttgattttcgtttggatagcagtgcggtgcataggattttgaaaatgattgtgtgtgccttggaacatgaatatgaaccatatagcaggctaaaatcagatattaaggatgaaaatgaaacaatactgaatcctgaagaggtggctcttctggaggaatatattcctactcgacatacaagtgttactctcctcaaatgtacctgcacaatttccatggctgaattcaacttgctggaccatttactacctgtcattatgggagaaaagaactcaagtaacttcatgaatactacaaacttccagtctcttcggcctttgccatccattcgaatattggtggataaaattaatctggaacattcagtgccaatgtatgctgaacagttggtgcatgtggtcagcagccttactcaaccttctgataacctgcttcattattgttatgtacactgctatcttaagatatttggtttccaggcaggactgacgtctttggattgcagtggatcttactgcttacctgtaccagttattccctctttcagcactgctctttatgggaaacttctgaaactccccacatgctggaccaaaagatctcagattgctataactgaaggtatatttgaacttccaaatctcacaattcaagctacaagagcacagacacttctcttgcaagcaatatatcaaagttggtctcatcttggaaatgtcagctcttccgcagtgattgaagctttgataaatgaaatcttcctaagtataggtgtgaaatctaagaatcccctgccaactcttgagggctcaatccagaatgttgaattgaagtactgcagcacatcattggtcaaatgtgcctctgggaccatgggatcaataaaaatttgtgccaaagccccagttgatagtggaaaagagaagttgattcccttgcttcagggtccttctgacactaaagaccttcatagcaccaagtggctcaatgagagtagaaagccagagtctctcttagctccagatttgatggccttcacaatccaagttccacaatatattgactactgccacaattccggtgctgtacttctttgcagtatacaaggactagcagttaatattgacccaatcttatatacgtggctcatctatcagcctcagaaacgaacaagtagacatatgcaacagcagcctgtggtagctgttcctcttgttatgccagtttgtagaaggaaagaggatgaggtgtctattggaagtgcccccttggcaaagcagcaatcatatcaggcctctgaatatgccagcagccctgtaaaaacaaaaacggtaacagaatcccgcccattgtcagttcctgttaaagccatgttgaatatatctgaaagctgtagaagtcctgaagaaagaatgaaggaatttattggaattgtttggaatgcagtgaagcatctcacactacagcttgaagtacaatcttgttgtgtgtttattccaaatgatagcctgccttccccaagtacaattgtatctggtgacattcctggaacagtaagaagttggtaccatggacaaaccagcatgccgggaacacttgtcctctgtttgcctcaaataaagattattagtgctgggcacaagtatatggaacctctgcaggagattccatttgttatcccacgacccatccttgaagaaggtgatgcttttccttggacgatcagcttgcataatttcagcatatatacccttcttggaaaacaagtgacactttgcctagtggaacctatgggttgcacctccactctagctgtcacgtctcaaaaactgcttgctacgggacctgatacacgacattcatttgttgtctgtctccatgttgacctagagtcactagagataaaatgctctaatccccaggtccagctcttctatgaactaactgatatcatgaataaggtctggaacaagattcagaagagaggcaatctcaacctatctccaacctctccagagaccatggcagggcctgttcctacttctccagttagaagcagtataggcacagctcctccagataccagcacatgcagcccatctgctgacattgggactactactgagggagattctatacaagcaggtgaggaatcaccattctcagattctgtgaccttggaacaaactacaagtaatattggaggaaccagtggacgtgttagtttatggatgcagtgggtgcttcccaaaattactataaagctctttgctccagatcctgaaaataaaggcacagaggtttgtatggtcagtgaactagaagatctcagtgcttccatagatgtccaggatgtatataccaaagtgaaatgtaaaatagagagtttcaatattgatcactatagaagcaggccaggggaaggttggcagtcaggacattttgaaggagtatttctacaatgcaaagaaaaatctgtgacaactacaaaacttctagatggcactcatcagcagcatggattcctctctctgacatacacaaaagctgtaacaaaaaatgtccgccacaagttaacatcaagaaatgagcgaagaagttttcataagttatctgaaggcctaatggatggttctcctcattttcttcatgaaattcttctttcagcacaagcttttgatattgttctttattttcctttacttaatgccattgcaagtatatttcaagcaaaactaccaaagacccaaaaagagaaaagaaaatctcctggtcagcccatgaggacccatacactgacatcccgcaatttacctttgatttatgtcaacacaagtgtaatcagaatttttattccaaaaacagaagaaatgcagccaactgttgaagctaatcaggcagcaaaagaagacactgtggttttgaagattggctctgttgccatggctccccaggctgacaatccccttggcagatctgtccttaggaaagatatttaccagagagccttgaacttaggaattcttcgagatcctggatcagaaatcgaagacagacaataccaaatagatctgcagtccatcaatattggtactgcacagtggcatcaactaaaaccagagaaggaaagtgtctcaggaggggtggtaacagagactgaaaggaattctcaaaatccagcccttgagtggaatatggccagcagcatacggcggcatcaagaaaggagagcaattttgacccccgttttgacagatttttctgtccgaataactggagcacctgctgtcattttcaccaaagtagtttctccagaaaatttgcatactgaggagattttagtgtgtggccattccttagaagtgaatataaccacaaacctggacttcttcctaagtgtggctcaagttcaactcttacatcagttaatagtagcaaatatgactggactggaaccatcaaacaaggctgcagagatctctaaacaagaacagaaaaaagtggatatatttgatggaggcatggctgaaacctcatctcgctacagtggtgctcaggatagtggaattggcagtgacagtgttaaaatcagaatagtgcaaatagagcagcacagtggtgccagtcagcatcgcattgcccgtccctcacgccagtcatcaattgtaaaaaatctaaattttattccctttgacatatttattactgcaagtagaatctcactaatgacctattcctgtatggccttatccaaatcgaaatcacaagaacagaagaataatgaaaaaacagacaagagttcattaaatctcccagaagttgattcagatgttgctaagcccaaccaggcatgtatttccacggtgacagcagaagatctcttaaggagcagcatttcttttccttcagggaaaaaaataggggtcctctctcttgaaagtcttcatgcatccacaaggtcatctgctagacaagcacttggtataactattgttcggcagcctggtcgaagaggaactggtgacttacagctagagccttttctgtactttattgtgtcccagccttccttgcttctgagttgtcaccacagaaagcagcgagtggaagtatccatttttgatgctgtgcttaaaggggtggcctctgattacaaatgtatagatcctgggaagactctgcctgaagcccttgattattgcactgtttggctacagacagtgcctggagaaatagacagcaaaagtggtattccaccttcctttataacactacagattaaagactttctgaatggaccagcggatgtcaatttggatatatcaaagcctttgaaagcaaacctgagtttcaccaaactggatcagataaacctttttttaaagaagataaaaaatgcacacagtttggcacatagtgaagagacttcagccatgtccaacaccatggtgaataaggatgatcttccagtctccaaatattaccgtggaaagttgtctaaacccaaaattcatggtgatggagtgcaaaagatttcagctcaagaaaacatgtggagagctgtttcctgctttcaaaaaatttctgttcaaactactcagattgtgatctccatggaaactgtaccccataccagcaaaccatgcctgttagcatctctctcaaacctcaatggaagccttagtgtcaaggcaacacaaaaagtacctggcataattcttgggtcatcatttctactcagtataaacgattttctccttaaaacaagtctcaaagaaagaagccgcattctgataggaccatgttgtgctactgccaatctggaagctaagtggtgtaaacacagcgggaatccaggcccagaacaatccataccaaaaatatccattgacttaagaggaggtctactacaggtcttctggggtcaagaacatttgaattgtttagttcttctacatgaattactcaatggataccttaatgaggagggaaattttgaagtacaagtttctgaaccagtgcctcaaatgtcatctcctgtggaaaagaatcagacatttaaaagtgaacaaagttcagatgacctacggacaggtctatttcagtatgtacaggatgctgaatctttgaaattgcctggggtctatgaagtcttattttataatgaaactgaagattgcccagggatgatgttatggagatatccagaacctagagtactcacccttgtacgaataactcctgtaccttttaacaccacagaggatccagatattagcacagcagaccttggtgatgtgctacaggttccttgtagcttggaatactgggatgaactccagaaggtttttgttgcatttagagaatttaatctgtctgaaagcaaagtttgtgaactgcagttgccggatatcaatctcgtgaatgaccagaagaaattagtatcttcagatctttggagaattgtcttgaacagcagtcaaaatggagctgatgaccaaagctctgcaagtgagtctggttctcaaagcacttgtgatccacttgtgactccaacagccctggctgcctgtaccagagttgactcctgctttaccccatggtttgtcccatccctttgcgtttctttccagtttgctcacctggaattccatctttgtcatcaccttgaccaactaggcacagctgcaccacagtacctacagccatttgtttccgacagaaatatgccatctgaactagaatacatgattgtttccttcagagaaccacacatgtatcttcgacagtggaataatggttctgtctgtcaggagatccagttcttagctcaagcagactgtaaacttctagagtgcagaaatgtcactatgcaaagtgtggtgaaacccttcagcatcttcgggcagatggcagtttccagcgatgtagtggaaaagctgcttgactgcaccgtgatagttgattctgtatttgtaaaccttggacagcatgtagtccattcactaaacactgcaatacaagcttggcaacagaacaaatgccctgaggtagaggagttggtcttcagccattttgtgatctgtaatgacacacaggagacactgcggtttggccaggtggatactgatgaaaatattctgctggcgagtctccacagtcaccagtacagctggcgctctcacaaatccccacagctgttacacatctgtattgaaggttggggcaactggcgttggtcagagcctttcagtgtggaccatgccgggacttttattagaacaattcagtacaggggtcgaactgcttctctcatcatcaaggttcagcaactcaatggagtacaaaaacagattatcatctgtggaagacagatcatctgtagttacttgtctcaaagcatagaactaaaagtcgttcagcattacattggtcaagatggacaagctgtagttcgggaacattttgactgcctcacagccaaacagaaattgccttcgtacatactagaaaacaatgaactgacggagctgtgtgtgaaggccaaaggagatgaagactggtcaagagatgtgtgcctggaatccaaagcccctgagtacagcattgtcattcaggtgccatcttcaaacagttccattatttatgtctggtgcacagttttgactttagaacccaactctcaagtgcaacaacgaatgattgtgttcagccctctttttatcatgaggagtcatcttccagaccccattatcatacatttggagaaaaggagtctgggattgagtgaaacacaaattattccaggaaaagggcaggaaaaaccactgcaaaacatagaacctgaccttgtacatcacctgacattccaagcaagagaagaatatgatccttcagattgtgcagttcccatctcaacatccctcattaagcaaatagccactaaggtacaccctggaggcacagttaatcagatccttgacgaattctatgggccagaaaagtcgcttcaacccatatggccctataataagaaggattctgacaggaatgaacagctaagtcagtgggatagcccaatgcgagtgaagctgtcaatctggaagccatatgttagaactttgttgatagaacttctgccctgggccctgcttatcaatgaatccaaatgggacctctggctatttgaaggagagaaaattgttctacaggttcctgctggcaaaattattattcctcctaattttcaggaagcttttcaaattggaatatactgggcaaatacaaacactgtgcacaagtcagtagcaattaaactggtccataacctgacatctccaaagtggaaagatggaggtaatggtgaagttgtgacactggatgaagaagcgtttgttgatactgaaataagacttggtgcttttccaggacatcagaagttatgtcagttctgcatttcctccatggtacagcaaggtatacaaattattcagattgaagacaagactacaataatcaataatacaccatatcaaatattttataaaccacagctatctgtctgcaatccccattctggaaaggagtattttcgtgttccagacagtgctacttttagcatttgcccaggtggagagcagcctgctatgaaatccagctcccttccttgctgggacttgatgcctgacatcagtcagtcagtactggatgcatccctgcttcagaaacagatcatgctgggcttttctcctgccccaggtgctgacagctcacagtgctggagcctgccagctatagttagaccagagtttcccagacagagtgtggcagtacccctcgggaatttccgggaaaatggattctgtaccagggctatagtgctgacatatcaagaacacctcggagtgacttatttaaccctctcagaagaccctagtcctcgagtaattatccacaatagatgtccagtaaaaatgcttataaaggaaaacattaaagatattccaaagtttgaggtttattgcaaaaaaattccctccgagtgctcaattcatcatgagctgtatcatcagatttccagttatccggactgcaagaccaaagacttacttccaagcctacttttgagagttgaacctctagatgaagtaacaactgagtggagtgatgccattgacatcaacagtcagggaacacaggttgtgttcctgactggctttggctatgtgtatgtggatgttgtacatcagtgtggcacagtcttcatcactgtggccccagaaggaaaagcaggacctattttaaccaataccaacagagcgccagagaagattgttacatttaaaatgttcatcactcagttaagcctggcagtgtttgatgacctcacccaccacaaagcatcagctgagcttctgagactcacactggacaacatttttctctgtgtggccccgggagctggtcccctccctggggaagagcctgtggctgcgttgtttgaactttactgtgtggagatctgctgtggggacctgcagctagacaaccagctttataacaagtccaatttccactttgctgtcttagtctgccagggagaaaaagcagaacccattcagtgttccaaaatgcagagtctcctcatatccaacaaagagttggaagaatacaaggaaaaatgttttatcaaactttgcatcaccttaaatgaaggcaagagcatcctctgtgatattaatgagttcagctttgaattaaaacctgctcggttatacgtggaagacacatttgtatactacatcaagactttgtttgacacctaccttcctaacagcaggttggctggtcactccacacacctctccgggggtaaacaggtgttgcccatgcaggtcacacagcacgccagggccttggtgaatcctgtgaagttacggaaactggtgatccagccagtaaatttgctcgtcagcatccacgcttccctcaagctgtacatagcctcagaccacactcctctctccttctcggtgtttgaaagaggacccatcttcaccactgcgaggcagcttgtgcacgccctggcaatgcactatgccgctggggccctttttagagcaggctgggtagttgggtctctggatattcttggcagccctgcaagcctggtgagaagcatcgggaacggggtcgccgacttcttcaggcttccgtatgaggggctgacccggggccctggagccttcgtgagtggcgtctccagagggaccacatcgtttgtaaagcacatctccaaaggtaccctcacatccatcaccaacctcgccacaagcctggcccggaacatggaccggctctcactggatgaggagcactacaaccggcaggaggagtggcggcggcagctccccgagagcctgggcgaggggcttcgacagggcctgtcccggctgggcatcagcctgcttggtgcaattgctggtatagttgatcagccgatgcagaacttccagaaaacatctgaggcacaggcttcagcaggacacaaggccaagggtgtcatctcgggtgtggggaaaggaatcatgggggtgttcacaaagcccatcggaggagctgctgagctggtgtcacagactggctatggtattttacatggagctggactttctcagcttcccaaacagcgccatcagccaagtgatctacatgctgaccaggctccaaacagccatgtcaaatatgtctggaaaatgcttcagtctctgggcagaccagaagtccacatggccctggacgtggttctggtgaggggctcaggccaggagcatgaagggtgcttgctgctgacatcagaagtgctcttcgtggtgagtgtcagtgaggacacacagcagcaggccttccccgtcacagaaatcgactgtgcacaggacagcaagcagaacaacttactcacagtgcagctcaagcagccaagagtggcctgtgatgtggaggtagatggagtccgagagagactgtcagagcaacagtacaacagactggtggactacatcacaaagacatcttgtcacctggcccccagctgttcttccatgcaaataccatgccctgtggtggctgcagaacctcccccctccactgttaaaacataccattacctggttgatccacattttgctcaggtcttccttagtaaatttaccatggtgaaaaataaagccctgaggaaagggtttccttgagtcccctctgaggtgtttattcctgcttgtgtgatttagtttttgggtttctttgagacagggtctcactgcattgcccttgctgacctcaaattctggggttcaagcaatcctcccacctcaacccacaagtagctacgactgcaagcacctgccaccataaagggctgcattttgccaccataaagggctgcatttttttaaaaagcctaggcagctctaacatcatctgatatggacacaaggccaacagtttccttatttacatccttacctctaaaagatacttcaaagtgacaaaaacgtgttccttccccacttagagacaatgattaacagggccctatatgttcttaccacatacagaggatgcatttatttttgctctatgacacttgcaaaaatctctactgtaattaatttgggtctattattaactctctgttccatcatagaatgtggccaggccttacaatggagagccagagttaaaacttcaagttgcatctgtttttgggctgagtcaccacctttgcctcatgctcctttgtctgcaaaggcctaggattctttctttaaatgaaatgcttaggactttgtggcttgttacatttgtcatttaactgcagtgctattctttgaaagctgctatgtgtattttctctgaagtctgcattttactaaaatttacaacagtctgatgattgattgattactgtccaggtacattttagaaaaagtgttcttcttccagtttgttttactaagcaaactttgagtaaatcctttgtcctatattgaatccagtcccaaagtgttcaggtgagtttctctagttccataaacaaaacatacatagtgggaactccctggtatgccatagagcacacaagaaccccaatattaatgctaacaattataccagtccattttgtttattctgtggaattgacttgacaaagcatgaagatattcccagtgtctgtctgataatattttgcatctaagaatgggtttgactcaagatcttgggttaccaagatgtcttaaatgttcagtaaatatctttcttacagtccagtagcttagagcatgtttgctgattgatattacatttaaacttggggctacagcttgttacctagaattttgagatactaagagaatgcaattttaaatgcccactggttttatttgttttggagagagggtctcattctgtcacccaggctagagtacagtgggaacagtcatggctcactgcagcttaagctcactgcctgggctcaagtgatcttactccagcctcccaagcagctgggactacaccaccacaggtatgcaccaccatacctggctgatttttaaaattttttctagagatgaggtctcactatgttgcccagctggtctcatactcctcagttcacgcattcctcccacctccacctcccaaactgctgggattacaggtgtgagccaccatgcccaacacccactgatctttaactctcacatgttgggcataagaagtcactatataattgttactggaaagcaagacttaacgaacaattctgactatgaaaaatgtctctttcagtttgttctgtaaatatttagaaaagtgacagctgtcaacctcagagtaactatttctaaaaatgtaaatatgtattaatccttgtatcttttatggtaattttgcatattgatatgaattatataaaattgtttaaaataaaaggtgtccttgaattactgaccacccatagatgtctactgttaccaggttttacaatgcaaattttcactaatacctgggtttaatacagctcacatcactgaatgttacacatgagtttaaatgggtaatatacaggttttgttataataaagttactgattaaattaaaaaaaaaaaaaaaaaa

SEQ ID NO: 12956 - DNA, 14111 bp, Homo sapiens
ggcgcggtacaggagcagcactgccggcgggggcgggtgccagggacttggaggtggaggggacgcggcggtactctggcgtcttccgacttcgactccttaccttaaaagatgctggagtcatatgtaactccaattttaatgagctatgtgaatcgctacatcaagaacttaaagccgtcggatctacagctttcactatggggtggagacgtggtactcagcaagctcgagttaaagttggatgtgctggaacaggaactgaaattaccattcacttttttaagtggacatattcatgaattgaggattcatgtaccatggacaaaactgggttcagaaccagtggtaattaccatcaatactatggaatgcattttgaaacttaaggatgggatacaggatgaccatgaaagctgtggttctaattctaccaaccgtagtactgctgagagcacaaaatcatcaatcaaaccgcggagaatgcagcaggctgctcctacagatcctgacttaccaccaggttatgtgcagagtctgattagacgagttgtaaataatgtaaacattgtgataaataatctcatactaaaatatgttgaagatgatatcgtcctttccgtcaatatcacttctgcagaatgttatacagtaggtgaattatgggatcgtgcattcatggatatttctgcaactgatttggtgctgagaaaggttatcaatttttctgactgtacagtttgtcttgataaacggaatgccagtggtaaaatagaattttaccaggatcctttattatacaaatgttccttcagaactcgtcttcattttacatatgaaaacctaaattccaagatgccatctgttattaaaattcatactttagtggaaagtttgaaactttctatcacagatcaacaactgcctatgtttattcgtataatgcaacttggaattgctctttactatggagaaataggcaattttaaagaaggcgaaatagaggaccttacttgtcataataaagatatgctaggaaacattacaggttctgaagatgaaacaagaatagatatgcaatatcctgctcagcataaaggtcaagagttatattcacagcaagatgaggagcagccacagggatgggtgtcatgggcctggtcctttgtgcctgcaattgtgagttatgacgatggcgaggaagactttgttgggaacgatcctgcatcaaccatgcatcaacaaaaagcacagactttgaaggatcctattgtttctataggattttattgcacaaaggcaacggtgactttcaaactcacagaaatgcaagttgagagtagttattacagtccacagaaagtaaaatctaaagaagtattgtgttgggaacaagaaggaactacagttgaggcccttatgatgggagaacctttctttgattgccagattgggtttgttggttgcagagccatgtgccttaaaggaattatgggtgttaaagattttgaagagaatatgaatagaagtgaaactgaagcctgtttcttcatttgtggtgacaatttgagtacgaaaggtttcacataccttacaaattcattgtttgattaccgaagcccagaaaataatggtactcgcgcagaatttatcttggattcaactcatcataaggagacatacactgagatagctggaatgcaacggtttggggctttttatatggattacctgtatacaatggagaacactagtggcaaaggttccacaaatcaacaagacttttcttcagggaaaagtgaagatttgggaacagttcaggagaagtccaccaaaagccttgttataggtcctcttgattttcgtttggatagcagtgcggtgcataggattttgaaaatgattgtgtgtgccttggaacatgaatatgaaccatatagcaggctaaaatcagatattaaggatgaaaatgaaacaatactgaatcctgaagaggtggctcttctggaggaatatattcctactcgacatacaagtgttactctcctcaaatgtacctgcacaatttccatggctgaattcaacttgctggaccatttactacctgtcattatgggagaaaagaactcaagtaacttcatgaatactacaaacttccagtctcttcggcctttgccatccattcgaatattggtggataaaattaatctggaacattcagtgccaatgtatgctgaacagttggtgcatgtggtcagcagccttactcaaccttctgataacctgcttcattattgttatgtacactgctatcttaagatatttggtttccaggcaggactgacgtctttggattgcagtggatcttactgcttacctgtaccagttattccctctttcagcactgctctttatgggaaacttctgaaactccccacatgctggaccaaaagatctcagattgctataactgaaggtatatttgaacttccaaatctcacaattcaagctacaagagcacagacacttctcttgcaagcaatatatcaaagttggtctcatcttggaaatgtcagctcttccgcagtgattgaagctttgataaatgaaatcttcctaagtataggtgtgaaatctaagaatcccctgccaactcttgagggctcaatccagaatgttgaattgaagtactgcagcacatcattggtcaaatgtgcctctgggaccatgggatcaataaaaatttgtgccaaagccccagttgatagtggaaaagagaagttgattcccttgcttcagggtccttctgacactaaagaccttcatagcaccaagtggctcaatgagagtagaaagccagagtctctcttagctccagatttgatggccttcacaatccaagttccacaatatattgactactgccacaattccggtgctgtacttctttgcagtatacaaggactagcagttaatattgacccaatcttatatacgtggctcatctatcagcctcagaaacgaacaagtagacatatgcaacagcagcctgtggtagctgttcctcttgttatgccagtttgtagaaggaaagaggatgaggtgtctattggaagtgcccccttggcaaagcagcaatcatatcaggcctctgaatatgccagcagccctgtaaaaacaaaaacggtaacagaatcccgcccattgtcagttcctgttaaagccatgttgaatatatctgaaagctgtagaagtcctgaagaaagaatgaaggaatttattggaattgtttggaatgcagtgaagcatctcacactacagcttgaagtacaatcttgttgtgtgtttattccaaatgatagcctgccttccccaagtacaattgtatctggtgacattcctggaacagtaagaagttggtaccatggacaaaccagcatgccgggaacacttgtcctctgtttgcctcaaataaagattattagtgctgggcacaagtatatggaacctctgcaggagattccatttgttatcccacgacccatccttgaagaaggtgatgcttttccttggacgatcagcttgcataatttcagcatatatacccttcttggaaaacaagtgacactttgcctagtggaacctatgggttgcacctccactctagctgtcacgtctcaaaaactgcttgctacgggacctgatacacgacattcatttgttgtctgtctccatgttgacctagagtcactagagataaaatgctctaatccccaggtccagctcttctatgaactaactgatatcatgaataaggtctggaacaagattcagaagagaggcaatctcaacctatctccaacctctccagagaccatggcagggcctgttcctacttctccagttagaagcagtataggcacagctcctccagataccagcacatgcagcccatctgctgacattgggactactactgagggagattctatacaagcaggtgaggaatcaccattctcagattctgtgaccttggaacaaactacaagtaatattggaggaaccagtggacgtgttagtttatggatgcagtgggtgcttcccaaaattactataaagctctttgctccagatcctgaaaataaaggcacagaggtttgtatggtcagtgaactagaagatctcagtgcttccatagatgtccaggatgtatataccaaagtgaaatgtaaaatagagagtttcaatattgatcactatagaagcagccttggggaagagtgttggtctttggggcaatgtggaggtgtcttcctttcctgtactgacaagctgaacagacgcaccttgttggttcgacccatcagcaagcaggaccctttcagtaattgctctggcttctttccttctacaactacaaaacttctagatggcactcatcagcagcatggattcctctctctgacatacacaaaagctgtaacaaaaaatgtccgccacaagttaacatcaagaaatgagcgaagaagttttcataagttatctgaaggcctaatggatggttctcctcattttcttcatgaaattcttctttcagcacaagcttttgatattgttctttattttcctttacttaatgccattgcaagtatatttcaagcaaaactaccaaagacccaaaaagagaaaagaaaatctcctggtcagcccatgaggacccatacactgacatcccgcaatttacctttgatttatgtcaacacaagtgtaatcagaatttttattccaaaaacagaagaaatgcagccaactgttgaagctaatcaggcagcaaaagaagacactgtggttttgaagattggctctgttgccatggctccccaggctgacaatccccttggcagatctgtccttaggaaagatatttaccagagagccttgaacttaggaattcttcgagatcctggatcagaaatcgaagacagacaataccaaatagatctgcagtccatcaatattggtactgcacagtggcatcaactaaaaccagagaaggaaagtgtctcaggaggggtggtaacagagactgaaaggaattctcaaaatccagcccttgagtggaatatggccagcagcatacggcggcatcaagaaaggagagcaattttgacccccgttttgacagatttttctgtccgaataactggagcacctgctgtcattttcaccaaagtagtttctccagaaaatttgcatactgaggagattttagtgtgtggccattccttagaagtgaatataaccacaaacctggacttcttcctaagtgtggctcaagttcaactcttacatcagttaatagtagcaaatatgactggactggaaccatcaaacaaggctgcagagatctctaaacaagaacagaaaaaagtggatatatttgatggaggcatggctgaaacctcatctcgctacagtggtgctcaggatagtggaattggcagtgacagtgttaaaatcagaatagtgcaaatagagcagcacagtggtgccagtcagcatcgcattgcccgtccctcacgccagtcatcaattgtaaaaaatctaaattttattccctttgacatatttattactgcaagtagaatctcactaatgacctattcctgtatggccttatccaaatcgaaatcacaagaacagaagaataatgaaaaaacagacaagagttcattaaatctcccagaagttgattcagatgttgctaagcccaaccaggcatgtatttccacggtgacagcagaagatctcttaaggagcagcatttcttttccttcagggaaaaaaataggggtcctctctcttgaaagtcttcatgcatccacaaggtcatctgctagacaagcacttggtataactattgttcggcagcctggtcgaagaggaactggtgacttacagctagagccttttctgtactttattgtgtcccagccttccttgcttctgagttgtcaccacagaaagcagcgagtggaagtatccatttttgatgctgtgcttaaaggggtggcctctgattacaaatgtatagatcctgggaagactctgcctgaagcccttgattattgcactgtttggctacagacagtgcctggagaaatagacagcaaaagtggtattccaccttcctttataacactacagattaaagactttctgaatggaccagcggatgtcaatttggatatatcaaagcctttgaaagcaaacctgagtttcaccaaactggatcagataaacctttttttaaagaagataaaaaatgcacacagtttggcacatagtgaagagacttcagccatgtccaacaccatggtgaataaggatgatcttccagtctccaaatattaccgtggaaagttgtctaaacccaaaattcatggtgatggagtgcaaaagatttcagctcaagaaaacatgtggagagctgtttcctgctttcaaaaaatttctgttcaaactactcagattgtgatctccatggaaactgtaccccataccagcaaaccatgcctgttagcatctctctcaaacctcaatggaagccttagtgtcaaggcaacacaaaaagtacctggcataattcttgggtcatcatttctactcagtataaacgattttctccttaaaacaagtctcaaagaaagaagccgcattctgataggaccatgttgtgctactgccaatctggaagctaagtggtgtaaacacagcgggaatccaggcccagaacaatccataccaaaaatatccattgacttaagaggaggtctactacaggtcttctggggtcaagaacatttgaattgtttagttcttctacatgaattactcaatggataccttaatgaggagggaaattttgaagtacaagtttctgaaccagtgcctcaaatgtcatctcctgtggaaaagaatcagacatttaaaagtgaacaaagttcagatgacctacggacaggtctatttcagtatgtacaggatgctgaatctttgaaattgcctggggtctatgaagtcttattttataatgaaactgaagattgcccagggatgatgttatggagatatccagaacctagagtactcacccttgtacgaataactcctgtaccttttaacaccacagaggatccagatattagcacagcagaccttggtgatgtgctacaggttccttgtagcttggaatactgggatgaactccagaaggtttttgttgcatttagagaatttaatctgtctgaaagcaaagtttgtgaactgcagttgccggatatcaatctcgtgaatgaccagaagaaattagtatcttcagatctttggagaattgtcttgaacagcagtcaaaatggagctgatgaccaaagctctgcaagtgagtctggttctcaaagcacttgtgatccacttgtgactccaacagccctggctgcctgtaccagagttgactcctgctttaccccatggtttgtcccatccctttgcgtttctttccagtttgctcacctggaattccatctttgtcatcaccttgaccaactaggcacagctgcaccacagtacctacagccatttgtttccgacagaaatatgccatctgaactagaatacatgattgtttccttcagagaaccacacatgtatcttcgacagtggaataatggttctgtctgtcaggagatccagttcttagctcaagcagactgtaaacttctagagtgcagaaatgtcactatgcaaagtgtggtgaaacccttcagcatcttcgggcagatggcagtttccagcgatgtagtggaaaagctgcttgactgcaccgtgatagttgattctgtatttgtaaaccttggacagcatgtagtccattcactaaacactgcaatacaagcttggcaacagaacaaatgccctgaggtagaggagttggtcttcagccattttgtgatctgtaatgacacacaggagacactgcggtttggccaggtggatactgatgaaaatattctgctggcgagtctccacagtcaccagtacagctggcgctctcacaaatccccacagctgttacacatctgtattgaaggttggggcaactggcgttggtcagagcctttcagtgtggaccatgccgggacttttattagaacaattcagtacaggggtcgaactgcttctctcatcatcaaggttcagcaactcaatggagtacaaaaacagattatcatctgtggaagacagatcatctgtagttacttgtctcaaagcatagaactaaaagtcgttcagcattacattggtcaagatggacaagctgtagttcgggaacattttgactgcctcacagccaaacagaaattgccttcgtacatactagaaaacaatgaactgacggagctgtgtgtgaaggccaaaggagatgaagactggtcaagagatgtgtgcctggaatccaaagcccctgagtacagcattgtcattcaggtgccatcttcaaacagttccattatttatgtctggtgcacagttttgactttagaacccaactctcaagtgcaacaacgaatgattgtgttcagccctctttttatcatgaggagtcatcttccagaccccattatcatacatttggagaaaaggagtctgggattgagtgaaacacaaattattccaggaaaagggcaggaaaaaccactgcaaaacatagaacctgaccttgtacatcacctgacattccaagcaagagaagaatatgatccttcagattgtgcagttcccatctcaacatccctcattaagcaaatagccactaaggtacaccctggaggcacagttaatcagatccttgacgaattctatgggccagaaaagtcgcttcaacccatatggccctataataagaaggattctgacaggaatgaacagctaagtcagtgggatagcccaatgcgagtgaagctgtcaatctggaagccatatgttagaactttgttgatagaacttctgccctgggccctgcttatcaatgaatccaaatgggacctctggctatttgaaggagagaaaattgttctacaggttcctgctggcaaaattattattcctcctaattttcaggaagcttttcaaattggaatatactgggcaaatacaaacactgtgcacaagtcagtagcaattaaactggtccataacctgacatctccaaagtggaaagatggaggtaatggtgaagttgtgacactggatgaagaagcgtttgttgatactgaaataagacttggtgcttttccaggacatcagaagttatgtcagttctgcatttcctccatggtacagcaaggtatacaaattattcagattgaagacaagactacaataatcaataatacaccatatcaaatattttataaaccacagctatctgtctgcaatccccattctggaaaggagtattttcgtgttccagacagtgctacttttagcatttgcccaggtggagagcagcctgctatgaaatccagctcccttccttgctgggacttgatgcctgacatcagtcagtcagtactggatgcatccctgcttcagaaacagatcatgctgggcttttctcctgccccaggtgctgacagctcacagtgctggagcctgccagctatagttagaccagagtttcccagacagagtgtggcagtacccctcgggaatttccgggaaaatggattctgtaccagggctatagtgctgacatatcaagaacacctcggagtgacttatttaaccctctcagaagaccctagtcctcgagtaattatccacaatagatgtccagtaaaaatgcttataaaggaaaacattaaagatattccaaagtttgaggtttattgcaaaaaaattccctccgagtgctcaattcatcatgagctgtatcatcagatttccagttatccggactgcaagaccaaagacttacttccaagcctacttttgagagttgaacctctagatgaagtaacaactgagtggagtgatgccattgacatcaacagtcagggaacacaggttgtgttcctgactggctttggctatgtgtatgtggatgttgtacatcagtgtggcacagtcttcatcactgtggccccagaaggaaaagcaggacctattttaaccaataccaacagagcgccagagaagattgttacatttaaaatgttcatcactcagttaagcctggcagtgtttgatgacctcacccaccacaaagcatcagctgagcttctgagactcacactggacaacatttttctctgtgtggccccgggagctggtcccctccctggggaagagcctgtggctgcgttgtttgaactttactgtgtggagatctgctgtggggacctgcagctagacaaccagctttataacaagtccaatttccactttgctgtcttagtctgccagggagaaaaagcagaacccattcagtgttccaaaatgcagagtctcctcatatccaacaaagagttggaagaatacaaggaaaaatgttttatcaaactttgcatcaccttaaatgaaggcaagagcatcctctgtgatattaatgagttcagctttgaattaaaacctgctcggttatacgtggaagacacatttgtatactacatcaagactttgtttgacacctaccttcctaacagcaggttggctggtcactccacacacctctccgggggtaaacaggtgttgcccatgcaggtcacacagcacgccagggccttggtgaatcctgtgaagttacggaaactggtgatccagccagtaaatttgctcgtcagcatccacgcttccctcaagctgtacatagcctcagaccacactcctctctccttctcggtgtttgaaagaggacccatcttcaccactgcgaggcagcttgtgcacgccctggcaatgcactatgccgctggggccctttttagagcaggctgggtagttgggtctctggatattcttggcagccctgcaagcctggtgagaagcatcgggaacggggtcgccgacttcttcaggcttccgtatgaggggctgacccggggccctggagccttcgtgagtggcgtctccagagggaccacatcgtttgtaaagcacatctccaaaggtaccctcacatccatcaccaacctcgccacaagcctggcccggaacatggaccggctctcactggatgaggagcactacaaccggcaggaggagtggcggcggcagctccccgagagcctgggcgaggggcttcgacagggcctgtcccggctgggcatcagcctgcttggtgcaattgctggtatagttgatcagccgatgcagaacttccagaaaacatctgaggcacaggcttcagcaggacacaaggccaagggtgtcatctcgggtgtggggaaaggaatcatgggggtgttcacaaagcccatcggaggagctgctgagctggtgtcacagactggctatggtattttacatggagctggactttctcagcttcccaaacagcgccatcagccaagtgatctacatgctgaccaggctccaaacagccatgtcaaatatgtctggaaaatgcttcagtctctgggcagaccagaagtccacatggccctggacgtggttctggtgaggggctcaggccaggagcatgaagggtgcttgctgctgacatcagaagtgctcttcgtggtgagtgtcagtgaggacacacagcagcaggccttccccgtcacagaaatcgactgtgcacaggacagcaagcagaacaacttactcacagtgcagctcaagcagccaagagtggcctgtgatgtggaggtagatggagtccgagagagactgtcagagcaacagtacaacagactggtggactacatcacaaagacatcttgtcacctggcccccagctgttcttccatgcaaataccatgccctgtggtggctgcagaacctcccccctccactgttaaaacataccattacctggttgatccacattttgctcaggtcttccttagtaaatttaccatggtgaaaaataaagccctgaggaaagggtttccttgagtcccctctgaggtgtttattcctgcttgtgtgatttagtttttgggtttctttgagacagggtctcactgcattgcccttgctgacctcaaattctggggttcaagcaatcctcccacctcaacccacaagtagctacgactgcaagcacctgccaccataaagggctgcattttgccaccataaagggctgcatttttttaaaaagcctaggcagctctaacatcatctgatatggacacaaggccaacagtttccttatttacatccttacctctaaaagatacttcaaagtgacaaaaacgtgttccttccccacttagagacaatgattaacagggccctatatgttcttaccacatacagaggatgcatttatttttgctctatgacacttgcaaaaatctctactgtaattaatttgggtctattattaactctctgttccatcatagaatgtggccaggccttacaatggagagccagagttaaaacttcaagttgcatctgtttttgggctgagtcaccacctttgcctcatgctcctttgtctgcaaaggcctaggattctttctttaaatgaaatgcttaggactttgtggcttgttacatttgtcatttaactgcagtgctattctttgaaagctgctatgtgtattttctctgaagtctgcattttactaaaatttacaacagtctgatgattgattgattactgtccaggtacattttagaaaaagtgttcttcttccagtttgttttactaagcaaactttgagtaaatcctttgtcctatattgaatccagtcccaaagtgttcaggtgagtttctctagttccataaacaaaacatacatagtgggaactccctggtatgccatagagcacacaagaaccccaatattaatgctaacaattataccagtccattttgtttattctgtggaattgacttgacaaagcatgaagatattcccagtgtctgtctgataatattttgcatctaagaatgggtttgactcaagatcttgggttaccaagatgtcttaaatgttcagtaaatatctttcttacagtccagtagcttagagcatgtttgctgattgatattacatttaaacttggggctacagcttgttacctagaattttgagatactaagagaatgcaattttaaatgcccactggttttatttgttttggagagagggtctcattctgtcacccaggctagagtacagtgggaacagtcatggctcactgcagcttaagctcactgcctgggctcaagtgatcttactccagcctcccaagcagctgggactacaccaccacaggtatgcaccaccatacctggctgatttttaaaattttttctagagatgaggtctcactatgttgcccagctggtctcatactcctcagttcacgcattcctcccacctccacctcccaaactgctgggattacaggtgtgagccaccatgcccaacacccactgatctttaactctcacatgttgggcataagaagtcactatataattgttactggaaagcaagacttaacgaacaattctgactatgaaaaatgtctctttcagtttgttctgtaaatatttagaaaagtgacagctgtcaacctcagagtaactatttctaaaaatgtaaatatgtattaatccttgtatcttttatggtaattttgcatattgatatgaattatataaaattgtttaaaataaaaggtgtccttgaattactgaccacccatagatgtctactgttaccaggttttacaatgcaaattttcactaatacctgggtttaatacagctcacatcactgaatgttacacatgagtttaaatgggtaatatacaggttttgttataataaagttactgattaaattaaaaaaaaaaaaaaaaaa

SEQ ID NO: 12957 - DNA, 2822 bp, Homo sapiens
ggcgcggtacaggagcagcactgccggcgggggcgggtgccagggacttggaggtggaggggacgcggcggtactctggcgtcttccgacttcgactccttaccttaaaagatgctggagtcatatgtaactccaattttaatgagctatgtgaatcgctacatcaagaacttaaagccgtcggatctacagctttcactatggggtggagacgtggtactcagcaagctcgagttaaagttggatgtgctggaacaggaactgaaattaccattcacttttttaagtggacatattcatgaattgaggattcatgtaccatggacaaaactgggttcagaaccagtggtaattaccatcaatactatggaatgcattttgaaacttaaggatgggatacaggatgaccatgaaagctgtggttctaattctaccaaccgtagtactgctgagagcacaaaatcatcaatcaaaccgcggagaatgcagcaggctgctcctacagatcctgacttaccaccaggttatgtgcagagtctgattagacgagttgtaaataatgtaaacattgtgataaataatctcatactaaaatatgttgaagatgatatcgtcctttccgtcaatatcacttctgcagaatgttatacagtaggtgaattatgggatcgtgcattcatggatatttctgcaactgatttggtgctgagaaaggttatcaatttttctgactgtacagtttgtcttgataaacggaatgccagtggtaaaatagaattttaccaggatcctttattatacaaatgttccttcagaactcgtcttcattttacatatgaaaacctaaattccaagatgccatctgttattaaaattcatactttagtggaaagtttgaaactttctatcacagatcaacaactgcctatgtttattcgtataatgcaacttggaattgctctttactatggagaaataggcaattttaaagaaggcgaaatagaggaccttacttgtcataataaagatatgctaggaaacattacaggttctgaagatgaaacaagaatagatatgcaatatcctgctcagcataaaggtcaagagttatattcacagcaagatgaggagcagccacagggatgggtgtcatgggcctggtcctttgtgcctgcaattgtgagttatgacgatggcgaggaagactttgttgggaacgatcctgcatcaaccatgcatcaacaaaaagcacagactttgaaggatcctattgtttctataggattttattgcacaaaggcaacggtgactttcaaactcacagaaatgcaagttgagagtagttattacagtccacagaaagtaaaatctaaagaagtattgtgttgggaacaagaaggaactacagttgaggcccttatgatgggagaacctttctttgattgccagattgggtttgttggttgcagagccatgtgccttaaaggaattatgggtgttaaagattttgaagagaatatgaatagaagtgaaactgaagcctgtttcttcatttgtggtgacaatttgagtacgaaaggtttcacataccttacaaattcattgtttgattaccgaagcccagaaaataatggtactcgcgcagaatttatcttggattcaactcatcataaggagacatacactgagatagctggaatgcaacggtttggggctttttatatggattacctgtatacaatggagaacactagtggcaaaggttccacaaatcaacaagacttttcttcagggaaaagtgaagatttgggaacagttcaggagaagtccaccaaaagccttgttataggtcctcttgattttcgtttggatagcagtgcggtgcataggattttgaaaatgattgtgtgtgccttggaacatgaatatgaaccatatagcaggctaaaatcagatattaaggatgaaaatgaaacaatactgaatcctgaagaggtggctcttctggaggaatatattcctactcgacatacaagtgttactctcctcaaatgtacctgcacaatttccatggctgaattcaacttgctggaccatttactacctgtcattatgggagaaaagaactcaagtaacttcatgaatactacaaacttccagtctcttcggcctttgccatccattcgaatattggtggataaaattaatctggaacattcagtgccaatgtatgctgaacagttggtgcatgtggtcagcagccttactcaaccttctgataacctgcttcattattgttatgtacactgctatcttaagatatttggtttccaggcaggactgacgtctttggattgcagtggatcttactgcttacctgtaccagttattccctctttcagcactgctctttatgggaaacttctgaaactccccacatgctggaccaaaagatctcagattgctataactgaaggtatatttgaacttccaaatctcacaattcaagctacaagagcacagacacttctcttgcaagcaatatatcaaagttggtctcatcttggaaatgtcagctcttccgcagtgattgaagctttgataaatgaaatcttcctaagtatagagattgggtcttgctatgttgcccaggttgatcttgaactcctggcctcaaatgatcctcccacctcaacctcctgaagtgccgggattggaggcccaagccactgtgcctggccctttataaattatgttataatttcatgtaatacataattgtatagtcaaaatggctcacatattaaatattctttatacaa

SEQ ID NO: 12958 - DNA, 4627 bp, Homo sapiens
cgaggtcagaggggaggaggactctggagctgacagcgcgcacttcacccgcagttgttctagcgactgcgaagatagctcgctgagctggaaccccacagatcaccaacaaaaatgaaggcggcagatgagcctgcctacctgacagtgggaaccgatgtcagtgccaagtaccgaggtgccttctgtgaggcaaagattaagactgtgaaaaggctggtgaaagttaaggtactcctgaaacaggataataccacacaattggtacaagatgaccaagtaaagggtcctttaagagttggagctattgttgaaacaaggacatctgatggatcttttcaggaagctattatcagcaagttgacagatgctagttggtataccgtggtgtttgatgatggtgatgagcgaacattgagacgtacctcactttgtctgaaaggagagagacattttgcagagagtgagacacttgaccagcttccattaacaaatccagagcattttggaactccagtaattgcaaagaagacgaacagaggaaggagatcttctcttcctgttactgaagatgaaaaggaagaagaaagcagtgaagaggaagatgaagacaagcgccgtctcaatgatgaattactaggaaaagttgtaagtgtggtgtctgcaacggagaggactgaatggtatcctgctttggtaatatctcccagctgtaatgatgacatcacagtgaaaaaggatcagtgtttagttcgatcatttattgattctaaattttactctatagcaagaaaggacattaaggaagtagacattctcaatctaccggaatctgagctctccactaaaccagggcttcagaaagcaagcatcttcttaaaaactagagttgttcctgataattggaaaatggatataagtgaaatccttgagtcatccagtagtgatgatgaagatggcccagctgaagaaaatgatgaagagaaggaaaaggaggccaaaaagacagaagaagaggtgcctgaggaagaacttgatcctgaagagagggacaacttcctccagcagctttataagtttatggaagacagaggtactccaatcaacaaaccacctgttttgggctataaagatctcaatctcttcaaactcttcagactggtttatcatcagggtggatgtgacaatattgatagtggtgctgtatggaagcaaatttatatggaccttggcattcctattttgaattcagctgcttcctacaatgtaaaaactgcttatagaaagtatctctatggttttgaggagtactgccgttcggcaaatattcagttcagaactgttcatcaccatgaaccaaaagtaaaagaggaaaaaaaagacttagaagaatcaatggaagaggctctcaaattagatcaagaaatgcctttaacagaagtgaagagtgaacctgaggaaaatatcgattcaaacagtgaaagtgaaagagaagagatagaattaaaatctccgaggggacgaaggagaattgctcgagatgtaaattctattaaaaaggaaattgaagaagagaaaacagaagacaaattaaaagataatgatacagaaaataaggatgtagatgatgactatgaaactgcagagaaaaaagaaaatgagctactactggggagaaaaaatacaccaaagcaaaaagagaagaaaattaaaaaacaggaggattctgacaaagactcagatgaagaggaagagaaaagccaagagagggaagaaactgaaagcaaatgtgactctgaaggagaggaagatgaggaagacatggaaccctgcctaacaggaaccaaagtgaaagtaaaatatggacgagggaagactcagaaaatttatgaagccagtattaaaagcactgaaattgatgacggagaagttttatatttggtacattactatggatggaatgtcaggtatgatgagtgggtgaaggctgacaggataatctggcctttggacaaaggtggaccaaagaaaaaacagaagaaaaaagctaaaaataaagaagatagtgaagtggacgaaaagagagatgaggagaggcagaagtcaaaacggggacgacctcctttaaaatcaaccctctcatcaaacatgccgtatggcttatctaagacagcaaacagtgaaggaaaatcagactcttgttcatctgatagtgaaacagaagatgctttagaaaagaatttaataaatgaagaactttctcttaaagatgaactagaaaaaaatgaaaatttgaatgatgataagctagatgaagaaaatccaaagatttctgcacatatattaaaagaaaatgataggactcaaatgcagcctttagaaaccctgaagttagaagttggagagaatgaacaaatagtacagatttttgggaacaaaatggaaaaaacagaagaagttaagaaagaagccgaaaaatctccaaaaggaaagggaagacgaagcaagacaaaagatctttctttagaaattataaagatttcatcatttggccagaatgaagcaggaagtgaacctcatatagaagctcatagtcttgaattgtcttcattagacaataaaaacttttcttctgctacagaagatgaaattgaccaatgtgtgaaagaaaagaagttgaaacggaaaatactaggacaatcatcgccagagaaaaaaataagaattgagaatggaatggaaatgacaaatactgtatctcaagaaaggaccagtgattgtattggatctgagggaatgaaaaacttaaattttgaacagcactttgaaagagaaaatgaaggaatgccatcattgatagcagagtcaaaccaatgcatccaacaactgactagtgaaagatttgatagtccagctgaagaaactgtaaatattccactaaaagaagatgaggatgcaatgcctctgatcgggcctgaaaccttggtttgccatgaagtagatttggatgatttggatgaaaaggataagaccagcattgaggatgtagcagttgaaagctctgagtctaactctcttgtttctattccacctgccctacctcctgtagtccaacataacttttcagtagcttcaccacttactcttagtcaagatgagtctcgaagcgtaaaaagtgagagtgatataacgattgaagttgatagtattgctgaagaatctcaagaaggtctctgtgagagggaatcggcaaatggatttgaaactaatgttgcctctggtacctgtagtataattgtacaagagagagagagcagagagaagggtcagaagaggccaagtgatggaaatagtggattaatggcaaaaaagcaaaagcgtaccccaaagcgaacaagtgctgcagccaaaaatgaaaagaatggaacagatgaattagataatatgaacagtacagagagaatctcatttctccaagaaaaactacaggaaatcagaaaatattatatgtctttgaagtctgaagttgcaaccatagacaggaggagaaaaagattaaaaaagaaagacagggaagtgtctcatgcgggagcctccatgtcatctgcttcatcagacactggaatgagtccctcatcatcgtctcccccacaaaatgtacttgctgtagaatgtaggtgataaacattttctctaccttcccagcagtttgctgccatggacataaatccccaaaccctgaattacaaccacagaaagcactcaactggtttgacattgctaagtatatcctgtatacttttccaggctggattgtatctatgcccctctctcttcttttttcttgttgcaaaaaataagctgattaataagtgaaggttaagcagcctgccatatttgtcataatttttcctctttacttttgtttttcgtttgttgtgatatagaacaaagggcacttagcaaatttgaatttgtataataaagctttcaggtgttacagaaatcgtagacaagcaagtgcacatgataaacaatcaaaatattacccagctgaatagttactgctgcactttcactaagatgtatttgaacacttggtgagtagggggtttatgttgtgttttttttcattatcgttttttttatttttgtgaagcacttgctatttagaactgccaaagtatatgttcagcagtgtgcccaggattgaaggtgtaaatgggacaaaataaattgtgaaaggaagtgtagttgactgaaaactacagttgtaataagtcttccactttttataggatttttgagcacacaattatgcaaatattttaatgtttattaatgtttacagtggaattgtgaataagttttcagtggactatcttatcccttgacaaaaatattttgtcttttttctatgtaatttcagagtttttattttgttacaaaaagacaaaaatgaaatatataacaacaatgaagttatttaacaagatttctaaagctgaaatttttgtgtaaaataaggtattatcttgcaacttgttaaatatatttattcagacattggatgttgtatttttatgtattttttaaaatattaataaaatttaaaaaaaaaaaaaaa

SEQ ID NO: 12959 - DNA, 3464 bp, Homo sapiens
cgcgccgctctcgtctgatccctgctggggacggttgcccgggcaggatcctttacgatcccttctcggtttctccgtcgtcacagggaataaatctcgctcgaaactcactggaccgctcctagaaaggcgaaaagatattcaggagcccttccattttccttccagtaggcaccgaacccagcattttcggcaaccgctgctggcagttttgccaggtgtttgttaccttgaaaaatggctactggacaggatcgagtggttgctctcgtggacatggactgtttttttgttcaagtggagcagcggcaaaatcctcatttgaggaataaaccttgtgcagttgtacagtacaaatcatggaagggtggtggaataattgcagtgagttatgaagctcgtgcatttggagtcactagaagtatgtgggcagatgatgctaagaagttatgtccagatcttctactggcacaagttcgtgagtcccgtgggaaagctaacctcaccaagtaccgggaagccagtgttgaagtgatggagataatgtctcgttttgctgtgattgaacgtgccagcattgatgaggcttacgtagatctgaccagtgctgtacaagagagactacaaaagctacaaggtcagcctatctcggcagacttgttgccaagcacttacattgaagggttgccccaaggccctacaacggcagaagagactgttcagaaagaggggatgcgaaaacaaggcttatttcaatggctcgattctcttcagattgataacctcacctctccagacctgcagctcaccgtgggagcagtgattgtggaggaaatgagagcagccatagagagggagactggttttcagtgttcagctggaatttcacacaataaggtcctggcaaaactggcctgtggactaaacaagcccaaccgccaaaccctggtttcacatgggtcagtcccacagctcttcagccaaatgcccattcgcaaaatccgtagtcttggaggaaagctaggggcctctgtcattgagatcctagggatagaatacatgggtgaactgacccagttcactgaatcccagctccagagtcattttggggagaagaatgggtcttggctatatgccatgtgccgagggattgaacatgatccagttaaacccaggcaactacccaaaaccattggctgtagtaagaacttcccaggaaaaacagctcttgctactcgggaacaggtacaatggtggctgttgcaattagcccaggaactagaggagagactgactaaagaccgaaatgataatgacagggtagccacccagctggttgtgagcattcgtgtacaaggagacaaacgcctcagcagcctgcgccgctgctgtgcccttacccgctatgatgctcacaagatgagccatgatgcatttactgtcatcaagaactgtaatacttctggaatccagacagaatggtctcctcctctcacaatgcttttcctctgtgctacaaaattttctgcctctgccccttcatcttctacagacatcaccagcttcttgagcagtgacccaagttctctgccaaaggtgccagttaccagctcagaagctaagacccagggaagtggcccagcggtgacagccactaagaaagcaaccacgtctctggaatcattcttccaaaaagctgcagaaaggcagaaagttaaagaagcttcgctttcatctcttactgctcccactcaggctcccatgagcaattcaccatccaagccctcattaccttttcaaaccagtcaaagtacaggaactgagcccttctttaagcagaaaagtctgcttctaaagcagaaacagcttaataattcttcagtttcttccccccaacaaaacccatggtccaactgtaaagcattaccaaactctttaccaacagagtatccagggtgtgtccctgtttgtgaaggggtgtcgaagctagaagaatcctctaaagcaactcctgcagagatggatttggcccacaacagccaaagcatgcacgcctcttcagcttccaaatctgtgctggaggtgactcagaaagcaaccccaaatccaagtcttctagctgctgaggaccaagtgccctgtgagaagtgtggctccctggtaccggtatgggatatgccagaacacatggactatcattttgcattggagttgcagaaatcctttttgcagccccactcttcaaacccccaggttgtttctgccgtatctcatcaaggcaaaagaaatcccaagagccctttggcctgcactaataaacgccccaggcctgagggcatgcaaacattggaatcattttttaagccattaacacattagtgctgccctcaggcttgcctgtaggatttaatattttttatctttacaggtctttatctttaatattttatctttacagatttccctgagaaagggaattatgaaatttttaatacaaaaaataatccatttaggtgctgagttacggtcccatctcttcacaggcatggattctaatcccactgctgacagagatgtaaaaattcatcctaccagagtttttaatctttagcatttagggaggcagtgtcataaagtaaaaagtgtgtgggccttggagtctaagagacgtggttgcaaacttagctctggttattgcaatgagggccttgaacaagtcattttcttcacattctcatctgtaaaatggagataataccttacagattattgcagattaataacaatgtattcaaattatgtaactcggccgggtacaatggctcacgcctgtaatcctaacactttgggaggccgaggcagacagatcacctgaggtcaggagtttgagaccagcctggccaacatggcaaaaccatctctactaaaaatagaaaaattagccaggcacgttccaggcacctgtgatcccagctacttggaggctgaggcagaagaattgctttaaccttggaggcggaggttgcattgagctgagatcatgctagtgcgctccagcctgggcaacagagcgagacttcatctcagaaaataaaaaataggggccaggcacagtggctcatacctgtaatgccagcactttgggaggccaaggcgggcagatcacgaggtcaggagtttcagaccaatatggtgaaaccccatctctactaaaattacaaaaaaaattatccaggcgtggtggtgcacgcctgtgatcccagctactcgggaggctaaggcaggagaatcacttgaacccaggaggcagaggttggggtgagctgagattgcgccaccgcactccagcctgggcaacagagcgagactccatctcaaacaaaaacaagaacaaaaacaaacataaagttggcacagaaaagggaccaagtttaaaaaagggttttaaatgtaatgagacttgc

SEQ ID NO: 12960 - DNA, 2051 bp, Homo sapiens
tcatttcatgttatgttttcatttcccctctgtctgagagattgctctgatgtctttccttccataagtcctacggagatcgagcttacctcatttttctcccaggcctaggagctcaattaccaggatcactttcttccccagggtgtactacagacctccacatgttggacagtaggattcagcagagaatgagtcccacatcctcttttcatccataagccactcttcccaactactcttccgccttccattgtccctatgtctactttactgctcaatctggattttggggaacctcctcccaaaaaggcattagaaggaaatgccaagcaccgaaattttgtcaagaagcggaggctcttagaacggagaggctttctgagtaaaaagaaccaaccccctagcaaggcgcctaagttgcactctgaaccttcaaagaaaggggagactcctacggtcgatggcacttggaagaccccttccttcccaaaaaagaagacagctgcttccagcaatgggtcaggacagcccctggacaagaaagctgcagtgtcttggttgacccctgccccttcaaaaaaggctgattctgttgctgctaaagtagatttgctgggggagttccagagtgcccttccaaagatcaatagccacccaacccgctctcagaagaagagctcccagaagaaatcctctaaaaagaaccatcctcagaagaatgccccacagaactccacccaagctcattcagagaataaatgctccggagcatcccagaagttgccacggaagatggtggcaattgactgtgagatggtgggcacaggaccaaaggggcatgttagttccttggctcgatgtagcattgtcaactacaacggagatgtgctttatgacgagtacattcttcccccctgccacattgtggactaccgaaccaggtggagtggtatccggaagcagcacatggtgaatgccacacccttcaagattgctcgaggccagatcttgaagatactcacagggaagatagtggtggggcatgccatccacaacgacttcaaagcccttcagtactttcaccccaaatccctcacccgtgacacctcccatatcccccccctcaaccggaaggctgactgcccggagaatgccaccatgtctctgaagcatctcaccaagaagctgctaaaccgggatatccaggttgggaagagcggacattcctctgtggaagatgcccaggccaccatggagctatataagttggttgaagtcgagtgggaagagcacctagcccggaatccccctacagactagtggcaatggggacgctggtgatatgaggaggcagaggcagcacccaggagaaacagggcagtggaccaatggacagctccaccagctccacatctttggaagctagatttggggagagagaagctctaccccagacttaatacccattgaaatttcacctcaggtgttgtgtcctgtgtctggttaagtgtcccatggaaggggaaagccttcacgtcagaacccaaccctataccttttacttcttaaatggtgctaaccacaggtgtcccagggtgctctgtgccagttaagatttttaactttcaaggggcagggcatactgggaaatgtagtttcccaaactgccttatcacttgggtggacatatgtctccttttatgccttttggtcttgagtaattaacagcatcctcttccacgctcagaagtgttctggttggggccaggcatggtggctcacgcctgtagtcccaacacttagggaggccgaggcgggcggatcacctgagatcaggagttcaagaccagcctggccaacatggcgaattcccgttctctactaaaaatacaaaaaatgtgtggggtgtggtggcaggagcctgtaatcctagctactcaggaggctgaggcaggagaatcgcttgagcccaggaggcggagattgcagtgagccgagatcgtgtcactgcactccagcctgggtgacaagagtgagactccgtctcc

SEQ ID NO: 12961 - DNA, 5451 bp, Homo sapiens
gtagggagccagcccctgggcgcggcctgcagggtaccggcaaccgcccgggtaagcgggggcaggacaaggccggagcctgtgtccgcccggcagccgcccgcagctgcagagagtcccgctgcgtctccgccgcgtgcgccctcctcgaccagcagacccgcgctgcgctccgccgctgacatgtgtgccgctcagatgccgcccctggcgcacatcttccgagggacgttcgtccactccacctggacctgccccatggaggtgctgcgggatcacctcctcggcgtgagcgacagcggcaaaatagtgtttttagaagaagcatctcaacaggaaaaactggccaaagaatggtgcttcaagccgtgtgaaataagagaactgagccaccatgagttcttcatgcctgggctggttgatacacacatccatgcctctcagtattcctttgctggaagtagcatagacctgccactcttggagtggctgaccaagtacacatttcctgcagaacacagattccagaacatcgactttgcagaagaagtatataccagagttgtcaggagaacactaaagaatggaacaaccacagcttgttactttgcaacaattcacactgactcatctctgctccttgccgacattacagataaatttggacagcgggcatttgtgggcaaagtttgcatggatttgaatgacacttttccagaatacaaggagaccactgaggaatcgatcaaggaaactgagagatttgtgtcagaaatgctccaaaagaactattctagagtgaagcccatagtgacaccacgtttttccctctcctgctctgagactttgatgggtgaactgggcaacattgctaaaacccgtgatttgcacattcagagccatataagtgaaaatcgtgatgaagttgaagctgtgaaaaacttataccccagttataaaaactacacatctgtgtatgataaaaacaatcttttgacaaataagacagtgatggcacacggctgctacctctctgcagaagaactgaacgtattccatgaacgaggagcatccatcgcacactgtcccaattctaatttatcgctcagcagtggatttctaaatgtgctagaagtcctgaaacatgaagtcaagatagggctgggtacagacgtggctggtggctattcatattccatgcttgatgcaatcagaagagcagtgatggtttccaatatccttttaattaataaggtaaatgagaaaagcctcaccctcaaagaagtcttcagactagctactcttggaggaagccaagccctggggctggatggtgagattggaaactttgaagtgggcaaggaatttgatgccatcctgatcaaccccaaagcatccgactctcccattgacctgttttatggggacttttttggtgatatttctgaggctgttatccagaagttcctctatctaggagatgatcgaaatattgaagaggtttatgtgggcggaaagcaggtggttccgttttccagctcagtgtaagaccctcgggcgtctacaaagttctcctgggattagcgtggttctgcatctcccttgtgcccaggtggagttagaaagtcaaaaaatagtaccttgttcttgggatgactatccctttctgtgtctagttacagtattcacttgacaaatagttcgaaggaagttgcactaattctcaactctggttgagagggttcataaatttcatgaaaatatctccctttggagctgctcagacttactttaagctcaaacagaagggaatgctattactggtggtgttcctacggtaagacttaagcaaagcctttttcatatttgaaaatgtggaaagaaaagatgttcctaaaaggttagatattttgagctaataattgcaaaaattagaagactgaaaatggacccatgagagtatatttttatgagggagcaaaagttagactgagaacaaacgttagaaaatcacttcagattgtgtttgaaaattatatactgagcatactaatttaaaaagagaacttgttgaaatttaaaacgtgtttctaggttgaccttgtgttttagaaatttgcacttaatggaatttgcatttcagagatgtgttagtgttgtgctttgccttctttggcgatgaatgtcagaaattgaatgccacatgctttcataatatagttttgtgcttcaaagtgtttgacagaagttgggtattaaagatttaaagtctcttaggaatattattcatgtaactccatggcataaatagttgtatttttgtgtactttaaaatcaacttataactgtgagatgttattgcttccattttattagaagagaaacaaattccatgctttatggaatttatgtagactggagtcttcgtgaactggggcaaatgctggcatccaggagccgccaatactaacaggacaggttccattgccatggcctattccacccaaacaatatgttgtagtttctggaaattccatactcagatatcagtctgctagaactttaaaatgaaggacaaatcctgttaaagaaatattgttaaaaatctttaaaccctgtgtattgaaagcactctattttctaattttatccagttttctgtttaactccttataatgtttaggatattaaaattttaggataatgaagagtacataatgtcctacttaatatttatgttaataggacttaattcttactagacatctaggaacattacaaagcaaagactatttttatgcttccataacctagaattaaaaccaaattatgaccttatgataaatctttaagtattggtgtgaatgttatttaaattctatatttttcttatttaattacaaatactataaatgagcaaggaaaaggaatagactttcttaatatattataacactcattcctagagcttaggggtgactctttaatattaccttatagtagaaactttatgtaatatagctaactccgtatttacagaacaaaaaaacacagttccccctcctgtagtataaattttattttcacatacttagctaatttagcagtaattggcccagttttttccctaatagaaatacttttagatttgattatgtatacatgacacctaaagagggaacaaaagttagttttatttttttaataaacaacagagtttgttttgtgagataagtatcttagtaaacccaatttccagtcttagtctgtatttccaatatttctaattcctgagccacgtcaaagatgccttgccaaatttctccccatttctctacggggctagcaaaaatcttcagctttatccctcaacccctgccaaaggaacttgattacatggtgtctaaccaaatgagcaggcttaggaatttagatgagatgtgtaagattcacttacaggcagtagctgcttctagcatttgcaagatcctacacttttaccttctttaagggtgtacattttgatgttgaacatcagttttcatgtagacttaggactcatgtgcagtaaatataaataagtgtagcatcagaagcagtaggaatggccgtatacaaccatcctgttaaacatttaaatttagctctgatagtgtgttaagacctgaatatctttcctagtaaaaataggatgtgttgaaatatttatatgtactttgatctctccacatcacttataacttatgtgttttatttctccaagtgcggtgttcctgaatgttatgtatgcttttttttctgtaccacaggcattatctatacctggggccagattttctgcactttgaaatgttgcctttgcctaatgtaggttgactttctgaattgtggagaggcacttttccaagccaatcttatttgtcactttttgttttaatatcttgctctctgacaggaaagaaacaattcacttaccagcctcctcaccccatcctccaccatttccttaatgttccatggtattttcaacggaatacactttgaaaggtaaaaacaattcaaaagtatcgattatcataaattcacaaaatatttttgcaaccagaacacaaaagcaggctagtcagctaaggtaaatttcattttcaaacgagagggaaacatgggaagtaaaagattaggatgtgaaaggttgtcctaaacagaccaaggagactgttccctaatttattctcttggctggttctctcattgaattatcagaccccaagaggagatattggaacaggctcccttcatgccaagggtctttctaagttaatactgtgagcattgagcccccattaaaactcttttttacttcagaaagaattttacaggttaaagggaaagaaatggtgggaaactctccccgtaatgcttagccaactttaaagtgtacccttcaatatccccattggcaactgcagctgagatcttagagaggaaatataaccggtgtgagatctagcaatgcattttgaatcttcactccctaccaggctcttcctatttttaatctcttcacctcagaactagacatatggagagctttaaaggcaagctggaaggcacattgtatcaattctaccttgtgctatacgtaggagagatccaaaatttggatgcttctggagactcttagacatcttttcattgttgtccatttttaaagttgatgattgctggaaacattcacacgcttaaaagcaatggtgtgagttattaatgggtaaactaagaagtgttataggcaatgacttgaaatggtttttaaattgtatggattgttaagaattgttgaaaaaaaattttttttttttggacagcttcaaggagatgttagcaatttcagatatactagccagtttaggtatgactttggaagtgcagaaacagaaggatactgttagaaaatcctaacattggtctccgtgcatgtgttcacacctggtctcactgcctttccttcccacagacctgagtgtgaaagactgagagttgaggagttactttgtggatcttgtccaaatttagtgaaatgtggaagtcaaccagaccaatgatggaattaaatgtaaattccaagagggctttcacagtccacagggttcaaatgacttgggtaacagaagttattcttagcttacctgttatgtgacagtgatttacctgtccatttccaacccaaaagcctgtcagaaagcattctttagagaaaaccactttacatttgttgttaaactcctgatcgctactcttaagaatatacatgtatgtattcataggaacattttttctcaatatttgtatgattcgcttactgttattgtgctgagtgagctcctgtgtgcttcagacaaaaataaatgagactttgtgtttacgttaaaaaaaaaaaaaaaaaaaaaa

SEQ ID NO: 12962 - DNA, 2820 bp, Homo sapiens
gtgggagccctggagggaactttcccagtccccgaggcggatcgggtgttgcatccatggagcgagctgagagctcgagtacagaacctgctaaggccatcaaacctattgatcggaagtcagtccatcagatttgctctgggcaggtggtactgagtctaagcactgcggtaaaggagttagtagaaaacagtctggatgctggtgccactaatattgatctaaagcttaaggactatggagtggatcttattgaagtttcagacaatggatgtggggtagaagaagaaaacttcgaaggcttaactctgaaacatcacacatctaagattcaagagtttgccgacctaactcaggttgaaacttttggctttcggggggaagctctgagctcactttgtgcactgagcgatgtcaccatttctacctgccacgcatcggcgaaggttggaactcgactgatgtttgatcacaatgggaaaattatccagaaaaccccctacccccgccccagagggaccacagtcagcgtgcagcagttattttccacactacctgtgcgccataaggaatttcaaaggaatattaagaaggagtatgccaaaatggtccaggtcttacatgcatactgtatcatttcagcaggcatccgtgtaagttgcaccaatcagcttggacaaggaaaacgacagcctgtggtatgcacaggtggaagccccagcataaaggaaaatatcggctctgtgtttgggcagaagcagttgcaaagcctcattccttttgttcagctgccccctagtgactccgtgtgtgaagagtacggtttgagctgttccgatgctctgcataatcttttttacatctcaggtttcatttcacaatgcacgcatggagttggaaggagttcaacagacagacagtttttctttatcaaccggcggccttgtgacccagcaaaggtctgcagactcgtgaatgaggtctaccacatgtataatcgacaccagtatccatttgttgttcttaacatttctgttgattcagaatgcgttgatatcaatgttactccagataaaaggcaaattttgctacaagaggaaaagcttttgttggcagttttaaagacctctttgataggaatgtttgatagtgatgtcaacaagctaaatgtcagtcagcagccactgctggatgttgaaggtaacttaataaaaatgcatgcagcggatttggaaaagcccatggtagaaaagcaggatcaatccccttcattaaggactggagaagaaaaaaaagacgtgtccatttccagactgcgagaggccttttctcttcgtcacacaacagagaacaagcctcacagcccaaagactccagaaccaagaaggagccctctaggacagaaaaggggtatgctgtcttctagcacttcaggtgccatctctgacaaaggcgtcctgagacctcagaaagaggcagtgagttccagtcacggacccagtgaccctacggacagagcggaggtggagaaggactcggggcacggcagcacttccgtggattctgaggggttcagcatcccagacacgggcagtcactgcagcagcgagtatgcggccagctccccaggggacaggggctcgcaggaacatgtggactctcaggagaaagcgcctgaaactgacgactctttttcagatgtggactgccattcaaaccaggaagataccggatgtaaatttcgagttttgcctcagccaactaatctcgcaaccccaaacacaaagcgttttaaaaaagaagaaattctttccagttctgacatttgtcaaaagttagtaaatactcaggacatgtcagcctctcaggttgatgtagctgtgaaaattaataagaaagttgtgcccctggacttttctatgagttctttagctaaacgaataaagcagttacatcatgaagcacagcaaagtgaaggggaacagaattacaggaagtttagggcaaagatttgtcctggagaaaatcaagcagccgaagatgaactaagaaaagagataagtaaaacgatgtttgcagaaatggaaatcattggtcagtttaacctgggatttataataaccaaactgaatgaggatatcttcatagtggaccagcatgccacggacgagaagtataacttcgagatgctgcagcagcacaccgtgctccaggggcagaggctcatagcacctcagactctcaacttaactgctgttaatgaagctgttctgatagaaaatctggaaatatttagaaagaatggctttgattttgttatcgatgaaaatgctccagtcactgaaagggctaaactgatttccttgccaactagtaaaaactggaccttcggaccccaggacgtcgatgaactgatcttcatgctgagcgacagccctggggtcatgtgccggccttcccgagtcaagcagatgtttgcctccagagcctgccggaagtcggtgatgattgggactgctcttaacacaagcgagatgaagaaactgatcacccacatgggggagatggaccacccctggaactgtccccatggaaggccaaccatgagacacatcgccaacctgggtgtcatttctcagaactgaccgtagtcactgtatggaataattggttttatcgcagatttttatgttttgaaagacagagtcttcactaaccttttttgttttaaaatgaacctgctacttaaaaaaaatacacatcacacccatttaaaagtgatcttgagaaccttttcaaaccagaaaaaaaaaaaaaaaa

SEQ ID NO: 12963 - DNA, 5217 bp, Homo sapiens
agcggagatggcggcagggtcgggtgggagtgggggctctgggggaggccctggaccggggccgggcgggggtgggggccccagcgggagcggctcaggaccggggtccaacgggggtctgggcagcggcggggaactgcacccgcgcactgggcgcttggtgagcctgtcggcctgtgggcgtacggcgcggcggcagcagccgggccaggagtttaaccacgggctggtgttgagccgagaacccttgcgcgatggacgcgtcttcaccgtccgcatcgaccgcaaggtcaactcctggagcggctccattgagattggggtgacagcgctggaccccagtgtgctggactttccaagcagtgccacgggcctgaaggggggctcgtgggtagtgtcgggctgctctgtgctgagagatggacgctctgtgttggaggagtatggtcaggacctggaccagcttggtgaaggggaccgcgtgggcgtggagcgcacagttgctggggagcttcggctctgggtgaatgggcgggattgcggtgtggctgccacaggcctgccccctcgtgtctgggccgtcgtggacctttatggcaagtgcacccagatcaccgtgctaccccctgagccaggcttcagcccccctactcccatccccacacctcccctcgagcccttggcccccactgaagactctgccttggctgaacaggggacctctgcagatgaagccttcatggtgtccccagcgcaggcccggccggagacgtttcctaacagccttgagtcgcataatgactttgccaacatggagctgtctgaggtggtgagcaacaccatcctgtctgcctacaatggagggctcctgaatgtgaacctgagctccccaccggcaggggaaggcctgggatctagcggtgctgccacctcgcccattctcacttccaacgatgccctgctctttcatgaaaagtgcgggaccctcatcaaactcagcaacaataataagacggctgagcgccggcggcccctggatgaattcaacaatggggttgtcatgaccaatcgcccccttcgggacaatgagatgtttgagatccgtatcgacaagcttgttgataagtggtcaggctccattgagattggggtcaccacccacaaccccaacagtttggagtacccagccaccatgaccaacctccagtcaggcaccatcatgatgagcggctgtggaatcctgaccaatggcaagggcacccgccgggagtactgcgaattcagtctggatgagttgcaggagggtgaccacattggcctcacaaggaagtccaactctgccctacacttcttcattaatggtatcgatcagggagtggcaacccccttgacgcccccagtggtgtatggtgtggtggacttgtacgggatggcagtgaaggtgaccatcgtccacaataacaaccacagtgaccgtctccgccgaaacaacgccatcctgcgggcgctgtcccccgagggtgctctccgccgtgctgcccctgccgcccaggcagaacctgagcgcctgctcttccaccccaactgtgggcagaaggcagccatcacccacgagggacgcactgccctgaggccccatgccaccgatgacttcaatcacggcgtggtgctgagcagcagagccctgcgggatggagaggtgttccaggtgcgcatcgacaagatggtggacaaatgggctggctccattgaaattggtgtcaccacccacaaccctgcctacctccagttgccctccaccatgaccaacttgcgctctgggacctggatgatgactgggaatggggtgatgcacaatgggacgaccatcctggatgaatacgggcacaatctggaccgcctcaaggcaggggacacggtgggcgtggtacggcgggaggacgggactctccacttctttgtcaatgggatgactcagggccctgctgcctggaacgtgcccccgggcgtctatgctgtcgtcgatctctatggccaggcggcccaggccaccattgtggacgacgtggaggtggctccagttcctgaaccactccctgaggggaacaaccaggtgtctccaagctctccgtcctcaggggccgggggctctgacctgcgcttccatcagctgcacggcagtaacgcagtcatcactaacgggggccgcaccgccctccgccacaactgtcgcagcgagtttaatgacgccatcgtcatctccaaccgggccctgcgggatggagagctgtttgaaattgtcattcagaagatggtggaccgctggtcaggctccattgaggctggagtgactgctattcggcctgaagacctggaattccccaacaccatgacagacattgactatgacacatggatgctgagtggtacagccatcatgcaagacggtaacacgatgcgcaacaattatgggtgtgacctggatgcgctgggcacaggtgcacgcattggcatgatgcgaactgccaagggcgacctgcactacttcatcaacggccaggaccaaggcgctgcctgctcgggcctgcctccgggtaaagaggtgtatgcggtagtcgatctctatggccagtgtgtccaagtgtccatcaccaatgccaccggccccatggacaacagcctggcgaccagcaacactgccaccgagaagtccttcccactgcactccccagtggctggcgtggctcaccgattccacagtacttgcggcaagaacgtcactctagaggaggatggcacgagggcagtgcgtgccgctggctatgctcatggccttgtcttcagtaccaaggagctgagggctgaggaagtctttgaggtgaaagtggaagagctagatgagaagtgggcaggttccctgcggctggggctgaccacactagcaccgggggagatgggacccggggcaggcggtggtggcccagggctgcctccttccctgccagagctccggacgaagaccacttggatggtatccagctgtgaagtgaggcgtgatgggcagctccagaggatgaactatggccggaacctagagaggctgggggtggggagccgtgtgggtgttcgtcggggggcagatgacacgatgcacatcctggtggatggagaggatatggggcctgcagccactggcattgccaagaacgtgtgggctgtgttggatctctacgggccagtccgcggtgtgtcaattgtcagttccacgagactggaggagtcagaaggcacccagcctccttcccccagttcagacaccggcagtgagggcgaggaggatgacgagggcgaggagcatggcctgggaggccagaatgaagtgggtattatacccaccaccctcgagttcctggagaaccatgggaagaatatccttttgtctaatgggaaccgtacggccacacgggtggccagctacaatcagggcatcgttgtcatcaaccaacctctggtgccccagctgctggtgcaggtgcggatagatttcctaaaccgacagtggacatcttcccttgtcctgggagtcatcacctgcgcgcctgagaggctcaacttccctgcttctgcctgtgccctcaaacgggcagcctggctgctgcggggccgtggggtcttccacaacggtctcaagatctgcgagaagtttgggcccaatctggacacgtgccctgaaggcaccatcctgggactgcggctggacagctctggggggctgcatcttcatgttaatggggtggaccagggggtagctgtgccagatgtgccccagccctgccatgcgcttgtggacctctatgggcagtgtgagcaggtgacaatcgtgaaccctgagccaggggctgccagtgggaaaagtgctggaacccaaggggacatggagaaagcagacatggtggacggtatcaaagagagtgtgtgctggggtccaccacctgccgctagtcctctaaagagctgcgagtaccatgccctttgctctcgcttccaagaactcctgctgcttcccgaagattatttcatgcctccgccaaagcgaagcctgtgctactgtgagtcttgccggaagctgcgaggagacgaggcccacaggcgcagaggggagcctccccgggaatatgcactgccctttggctggtgcaggttcaacctcagagtgaatccccgcctggaggctgggacactaaccaagaagtggcacatggcatatcacgggagcaatgttgccgctgtacggagagtgctggaccgaggggagctgggagcaggtactgcctccatcctgagctgccgtcctttgaagggagaacctggggtagggttcgaggagcctggcgagaactgtgcacctcctcgggaggagcagccccctcctgtgctgctttccccctcccttcaatatgctggggcggagaccctggcctccaaagtgcaattccgggaccccaaatcccagcggacgcaccaggctcaggtggcgttccaggtgtgtgtgcgccctggctcctacaccccgggacccccttccgctgcccttggagaacctcctgaccctcacttcagtccagccgaacttgagtgggtcactaaggagaagggggccacactcctctgtgccctgctggtacgggtggaatgaggggtgagacaccactactacaagcacagtcgggccgcgggcccatggactctgagtggcgactgcctccacctcattcccgtgactcgtggcatgcgcaggtgctggagcttggcagccgcgcaggagcatgtaggcaggctctcagatgtaggtggcaagtggcacagctccatgtccggaggcccagcactccgtctgatgggaggagtcgtgggagcccagctccaggccctggtacccctcttcatgcactgatttggggaacatgactcccttttactcccctaccccacatcacttaatttatttccgtttttgtttctggttactgtgaatcccagaggagtctctccctgtgcccacatgaagctgctttttccggggccaccgggcgggagtggggaagggtgggcgcacggaagatgggggcctctgtacagttgttactgactctgatttctaaggagccaataaacaccgtctcagagaaaaaaaaaaaaaaaaaaaaaaaaaaaaaa

SEQ ID NO: 12964 - DNA, 7743 bp, Homo sapiens
ctcagctccgggccgagcgcgagcttgggctcgtaccccgctcccctctctccgcccgctctttacctaccggccgtagctggcccggtgggctcgcggggagacgctcgcgcgcgcaagcgcacacgacgcggagcggagctcgagacatcgaggagaggagtaagaagcatcggaggaggcgatcgaggaggaggcggtgtgtgtgtatgtgtctattctacggtgtggctcgtcgtggggcgagaggaggctcgagagagggcgagggagaagcgaaaagagtaagagagtcttcctttgcgagagcctctaatctggttgctatggaaatacatgaccacgcaaaaggaagtccattctgataattctgatacctgagatgtaactggactgaagagtagaaacaggaaaaattttagtgccaactttaattacaatggccactgattcaggggatccagccagcacagaagattctgagaaacctgatggaatttcatttgaaaacagagttccccaggtcgctgcaactttgacagtagaagctagactaaaggagaaaaacagtaccttctctgcttctggggaaactgtagaaaggaagagatttttccgaaagagtgttgaaatgacggaagatgacaaagttgccgaatcatcccccaaagatgagagaattaaggctgcaatgaatattccaagagtagataagcttccttcaaatgtgttgagaggtggacaagaagttaaatatgaacagtgttcaaagtcaacctcagaaatctcaaaagattgtttcaaggagaaaaatgaaaaggaaatggaagaagaagcagaaatgaaggctgtagctacttctcctagtggcagattcctgaaatttgacatagaactaggaagaggagcatttaaaacagtatataaaggactggacactgaaacatgggttgaggttgcttggtgtgagctgcaggaccgaaagttaaccaaagctgagcagcaaagattcaaggaagaagcagagatgttgaagggtctccagcaccccaatatagttcgattttatgattcctgggaatctatattaaaaggaaagaaatgtattgtattagtgactgaactaatgacatctgggaccttaaagacgtacttaaaacgatttaaagtcatgaaaccaaaggtcttaaggagctggtgcaggcaaattttaaaggggttgcagttcttgcacactaggactcctcctattattcaccgggatctgaagtgtgacaatattttcatcacgggacccactggatctgtgaagattggtgatctaggattagccaccttaatgcgtacctcatttgctaagagtgtcattggaactcctgagtttatggctccagagatgtatgaagaacactatgatgaatccgtagatgtttatgcttttggaatgtgtatgctggaaatggccacatcggagtatccttattctgagtgtcagaatgcagctcaaatataccggaaagtaactagtggcataaaaccagccagcttcaataaagtcactgatcctgaagtcaaagaaatcattgaaggatgtattcgtcaaaacaaatctgaaaggttgtctatcagggacctattaaaccatgcattttttgctgaggatacaggactgagggtggagttagcagaagaagatgattgctcaaattcatcccttgctttaagactctgggttgaagaccctaaaaaattgaaaggcaaacacaaagacaatgaagctattgaatttagtttcaacttagaaacagatacacctgaggaagtagcatatgaaatggtcaagtctgggttcttccatgaaagtgattccaaagctgttgctaaatccattagagaccgggtgacgccaataaagaagacaagagagaagaagcctgctggctgtttggaagaacgcagggattctcagtgcaagtctatggggaatgtattccctcagccccagaatacaactttaccccttgctcccgctcagcaaactggggctgaatgtgaagaaactgaagttgatcaacatgttagacaacagcttctacaaagaaaaccacagcagcactgctcctctgttacaggtgacaatttgtctgaggcaggagctgcatcagttatacattcagatacttcaagtcagcccagtgtagcctattcctcaaatcaaacgatgggctctcaaatggtttctaatatcccgcaggctgaagtaaatgttccagggcaaatttattcatctcagcaactagtaggacattaccagcaagtttcagggttacagaagcattcaaagctgactcagccgcagattttgcctttggttcaaggtcagtccactgttttacctgtacatgtccttggaccgacagttgtttcacaaccccaggtttccccattaactgttcagaaggtcccacagataaagcctgtatcccaaccagttggagctgaacaacaagcagctcttctaaaaccagatttagttcgaagcttgaatcaagatgtggcaactacgaaggaaaacgtcagtagccctgataacccaagtggaaatggcaaacaggatcggatcaaacagagaagagcttcctgtccccgaccagagaaggggactaaatttcagcttaccgtccttcaggtatcaacctctggagataacatggtagagtgtcagctggagacacacaacaacaagatggtcaccttcaagtttgatgttgatggtgatgcgccagaggatattgcagactatatggttgaagataactttgtgctggaaagtgagaaagaaaaatttgtagaagaattgagagctattgtaggtcaagcccaggagatccttcatgtccactttgccacagaaagagccactggagttgattctattactgtggactccaacagtagccagacagggtcatctgaacaagtacagataaattctacatctactcaaaccagcaatgaatctgctcctcagtcatccccagttggtcggtggcgattctgtatcaatcagacgataagaaaccgtgagactcagtctcctccttctcttcagcattccatgtctgcggttcctggccgacatccacttcctagtccaaaaaacacaagtaataaggaaatatcacgggacacattgctcactatagaaaataatccatgccaccgtgcacttttcacctccaaatcagaacacaaggatgtggttgatggtaagatttctgaatgtgctagtgtagaaaccaagcagccagctatactttatcaagtggaagataacaggcagataatggcaccagttactaatagttccagttactctactacttcagttcgtgcagttccagctgaatgtgagggactcaccaaacaagcaagcatattcatacctgtgtatccatgtcaccaaactgccagtcaggctgatgcacttatgtcccatcctggcgaatcaactcagacttctggtaactctcttacaactctggcatttgatcaaaagcctcaaaccttatcagtacagcagccagctatggatgcagagtttatttctcaagaaggagaaactacagtgaacactgaagcaagttctcctaagacagtcattcccactcagacccctggccttgaaccaactacccttcaacccactactgtcctggaatcagatggagaaagacctccaaaactggagtttgcagacaaccgaattaaaactctggatgaaaaattaagaaacttgctctatcaggagcacagcatctctagcatctatcccgagagtcagaaggatacccaaagcatagactctccattttcttcctctgctgaagataccctctcctgtccagtgacagaagtcatagccatcagtcactgtggaattaaagatagccctgtacaatcccctaatttccaacagacaggctctaagcttctgtccaatgtggctgcaagtcagcctgctaatatatcagtgttcaaaagggacctgaatgtgataacttctgtacccagcgaattgtgtttacatgagatgtcctcagatgcttcacttccaggggatccagaggcctatcctgctgctgtgtcaagcggtggagccattcatctgcagacaggaggtggatattttggcctaagctttacttgtcctagtctcaaaaatcctattagcaagaaatcctggactcgcaaattaaaaagctgggcatacaggctacggcagtcaaccagctttttcaagagatcaaaagtccgtcaagtggaaacagaagagatgagatcagcaattgctcctgatcccattcctctgacacgggagtccacagctgatactagggctttgaatagatgtaaagcgatgagtggatcatttcagcggggtcggttccaggtgattacaattcctcagcagcagtcagcaaaaatgacatcttttggaatagaacacatatcagtgttcagtgagacaaaccattctagtgaagaagcctttattaaaacagcaaagtctcagttggtagaaatagaacctgccacacaaaatccaaaaacttcgttttcttatgagaagttacaagctcttcaggaaacctgtaaagaaaataaaggagttcccaaacaaggtgacaacttcttatctttcagcgcagcttgtgagactgatgtatcttcagtgaccccagaaaaggaatttgaagaaacttcagccacaggaagtagcatgcagtctggatctgaactgttgcttaaagagagagagatattgactgctgggaaacagcctagctctgatagtgaattttcagccagtcttgctggcagtggaaagtcagtggcaaagactggtccagagagtaatcagtgcttaccacaccacgaagaacaagcttatgctcaaacacagagttcactcttctattcgccatcttccccaatgagcagtgatgatgaatcagaaatagaggatgaggacttgaaggtggagcttcaaagattacgagaaaaacacattcaggaggtggtaaatcttcaaacccagcagaataaggagctgcaggagctctatgaacgccttcggtcaattaaagatagcaaaacccaatctactgagattcctttgccacctgcatcaccacgtcgaccaagatctttcaaaagcaaacttcgaagccgcccccagtccttgacacatgtggacaatggcatagttgctacagggaaaagctgccttataaatgagttggaaaatccactgtgtgtggagagtaatgcagcatcatgccaacagtctccagccagtaaaaaagggatgttcacagatgacttacacaagctggtggatgactggacaaaggaagcagtaggaaattctcttattaagccaagtttaaaccaacttaaacaaagtcaacacaaactagagacagaaaactggaataaagtatctgaaaatactccgtctactatgggctacacatcaacatggatttcttctctgtcccaaatccgtggagctgtcccaacttccttgccacaaggactctcactcccttcatttcctgggccattatcatcatatggaatgcctcacgtttgtcagtataatgctgtggcgggggcggggtatccagtacagtgggtaggaatttcaggaacaacacaacaatctgtagtaattcccgcccaatctgggggaccattccagccagggatgaatatgcaggcatttccaacttcatcagtgcagaatcctgccacaatccctcctggtcctaaatgaatcagagtagatggtgataaaaagggaggttttttcagaattattttcaggacacccaagatattaaagtttcttcctcttgggttctgtcatattttccctcatttgagtttactttagactatatattttttgttccagtgtggtatttgatacagctcatcattctgtagaaatgtgcagtttgcagatagaacactgcacacagaaatgttttttcacttcaaattctatcctctttgatacttgattttttaaaaatactgttcagaatgctttaataagctcagcttgagcattaccatttccaggacactttccatgaattgttgagaagctccccatcccccgcctttttttttttttttttaactgctgctatctgcagctggatactcttctttaaaaatgtttaaaaattatttagattgattctccccaaatgtggatgaactgagaccctccatcagccagagtcttatgggatcttcacttcacatgtttgtcttaggtttacctttcacagaaggcagggtaacttgctgcaggaaacgttttggtgtataaaattagaatcacttttttttttttttttgagatggagtctctctctgtcacccaggttggagtgcagtggtgtgatcttggctcactgctgcaacctccccctcctgggttcaagcgattctcctgcctcagcctcctgagtagctgggactacaggcgccagccaccatgcctggctaatttttgtatttttagtagaggatggggtttcactatgttggccagactggtctcaaactcctaaccttgtgatccgccctccttagcccccccaaaaaattacaataattttgtcaaccaatacagaacatgagccctttttaaatgtgatttcccgtcatcacagcagtaggatgaagccttgttttgggtgagacagagggaaagggaaaaaacagaattgtaacagttccttgattctgcagatactgctgctgttttacgatttcagtaataattcaaagcagctgtctccttgtttctcacatgcatactacattggttttgagcatctgagaggcattggtttgtcttgcattcttttgcaaggcatatattgcagctgatatgaatctcgtttggggggaatccttgtattcctaacaagggggattaaagctacacctcaatccattcttctgaagtgaaatttacttgacacagtaggtttcgagacttacatatgaaacactggctttacagggttctcagagatgtggggtatacactgtcctgcagtgagatagtagaccctagaaggatactatttaagttgtccttagctctttttaattacaatttttagttgttagaatttctttttagtatctatagtatcttagatgattttagatcttaaatgagtttggcagcctctttagaatctgagagagatcactgtcaagttgcactttactgggttttatccagttttaggaggaggggaggcaatgtcaaaatgtacacctttggtttttaagaaggttaactataataatgttaaaggctagtcacagggttacctaatgctcagtctgtgaaacctaaatagaattcttaaaatgttatttaccaactaagtattcatgttcaaattacttaccttccactctgaagactttaaggtcatttctaatacacatttacctaattaggagttctgtctactagtaaacattccaaattgctacccaacattactgttaacagattttcctccgtattcttctaaaaattataccccatgggcttgccaggtaatgacgaaaacttaatgggtgtacttttttttttttttgcacagtctactttgtgacattaagtacctcttttcc

SEQ ID NO: 12965 - DNA, 2874 bp, Homo sapiens
gggcgttcttggtgcgccgggccgtggtgagtccgggctcccgtggccgcgtgctgggaggagactggagcccggttaggaagaatggagttggcgactcgctaccagatccctaaagaagtggctgacatctttaacgcccccagtgatgatgaagagtttgttggcttccgagatgatgttcccatggaaaccctctcgtcagaggagagctgcgatagttttgactcactagagtcagggaaacagcaggatgtgcgctttcattccaaatacttcacagaagagctaagaagaatttttatagaggacactgactcagagactgaggattttgcaggatttacgcagagtgatctgaatggaaagactaacccagaagtaatggtcgtggagtcagatttgagtgatgatggcaaagcatctttggtgagcgaggaagaggaagatgaagaagaagataaggctacccctagaagaagcaggtctagaagaagtagtattggtcttcgagtagcctttcagttccccaccaagaagctggccaacaaaccagataaaaacagttcttccgagcagttgttttctagcgcacgcttacagaatgagaaaaaaacaattcttgaaagaaagaaagactgtagacaggtgatacaaagggaagattctacctctgagtctgaggatgactctcgggatgagagccaggagagttcagatgctttgctgaaaaggaccatgaacatcaaggagaacaaagccatgcttgcccagttattggcggaattgaactcgatgccagatttcttcccagtacgaaccccaacctcagcttctaggaagaagacagtgaggcgggccttctcggagggacagatcacgcggcgtatgaacccaacccggagtgcgcggcctcctgagaagtttgctctagagaacttcactgtctcagccgctaaatttgcggaagagttttacagcttccgaagaaggaagacaattggggggaaatgccgggagtacagacgacgtcaccgtatatcttcttttcggccagtggaggatatcaccgaagaggacttagaaaatgttgccataactgttcgagataaaatctatgataaagttctgggtaacacgtgccatcagtgtcgacaaaagaccatcgacaccaagacagtgtgtcggaaccagggttgctgtggtgtgcgaggacagttctgtggaccatgcctgcggaaccgctatggggaggatgtcagatcggcattgctggacccggattgggtgtgtcccccctgtcgtgggatctgcaattgcagctactgtcggaagcgtgacggccgctgtgccacaggaatcctcattcatctggccaagttttatggttatgacaatgttaaggaatatctggagagcttacaaaaggagctggtagaagacaattaagaggaaaacaaacagaaccagccacctcaccatagagtactccaacaagacatgcataccattggtgcctaagatttttttacagttgtgtttttatacagaaattctttgtagaaattactattttttgttaaagattgtttatatgcttacaaagatttctcaggaagacagcagagcagaggaatctatatagatgtatgcacagacctgtctgtatgctgaactttgttaaaaatatctgccagttattaaaaagcacagttgaaatggggtggggttaaagttcaggtaagtaagttagagagaaaacattgtatgatcagctcctgcacttgatctatctttggcttcccaaacagtaactcactccaggccaagtgtgccttagcacgagtgaccacagtttaatagaccacacacatcgtttaacctgctcttggtcattggaaatttacactgaacaaagtgcaattaactgtagaacagttttatttttattaaaacttgactgaacaaaaggggaccatcaacattgtagacactggaggccttacagagtgctagcctcttccttcaggactcacctggggcctgctgcttttatattttgaaagagtttaagggctaataatttaatttgttgtttgttaaaaattaaaatctccgttctttccggctgcattgcttttgcatgttcacatatgatgtacttttatgatgtacttttttttttttgagatggagtcttgttctgttgcccaggagggagtgcagtggtgcaacctcggctcactgcaacctttgcctcctaggttcaagtgattctcctacctcctgagtaactgggattacagtcgtgtgccaccacgctcagccctgagttagtttctagtatttttttctgactttcactctaaggatagcgttgaaaaaagaatgcacgtgtgagttactaaaaagtcagaataatgtgcatgggaacagtgcagcaacatgctagaaaatcctcactgcactccagcagaggctagaggaatgccagtgttaccttacgcttctagaagcagagccactccagccagaacccattttgcagtcttctcttcgctcttcagcctgaaggtccagatgtagctggggcctctcagtttggttctatacacagggcactcgtaggtctgtttggtttcttgtctgtccacgggggtggcttttgcaaagatgaccggcatagggcatgccagctccttgagacgggcttcaacaatggttcctgcttgggtgtcccagcgggcgcctatggcaaaaacacagcggttgcaattgtgtggcagcttgctactaatgataatgatcaagttgtttgatgcaataaacattcaacattctggttttgtcaaaaaaaaaaaaaaaaaaaaaaaa

SEQ ID NO: 12966 - DNA, 4022 bp, Homo sapiens
atgcagaaggggatccggctgaatgatggccacgtcgcgtccctgggactgctggcgcgcaaggacggcacgcgcaaaggctacctgagcaagcggagttcggacaacacaaaatggcaaaccaagtggttcgcgctgctgcagaacctgctcttctacttcgagagcgactcgagctcgcggccctcggggctttacctgctggagggctgcgtctgcgaccgcgcgccctcccccaagccggcgctgtcggccaaggagccgctggagaaacagcattacttcacggtgaacttcagccatgagaaccagaaagccttggagctgaggacagaggacgcaaaagattgtgacgaatgggtggcagccattgcacatgccagctacaggaccctcgccacagagcatgaggcattaatgcagaaatacctgcacctgctgcagatcgtggagacagagaagaccgtggccaagcagcttcggcagcagatcgaggatggggagatcgagatcgagcggctgaaggcagagatcacatccctgctcaaggacaatgagcgcatccagtccacccagactgtcgcccccaacgatgaagacagcgacatcaagaaaattaagaaggtgcagagcttcctgcggggctggctgtgccggcggaagtggaagaccatcatccaggactacatccggtcaccccatgctgacagcatgcgcaagaggaaccaggtggtgttcagcatgctggaggctgaggctgagtacgtgcagcagctgcacatccttgtcaacaatttcctgcgcccgctgcggatggccgccagctccaagaagcctcccatcacacacgacgacgtcagcagcatcttcctgaacagcgaaaccatcatgtttttacatcagatcttttaccaaggcctgaaggcccgcatctccagctggcccacgctggtcctggctgacctatttgacatcctgctgcccatgctcaacatctaccaagagttcgtccgcaaccaccagtacagcctgcagatcctggcccactgcaagcagaaccgtgacttcgacaagctgctgaagcactacgaggccaagcctgactgcgaggagaggacgctggagaccttcctcacctaccccatgttccagatccccaggtacatcctgaccctccatgagctcctggcccacacgcctcatgagcacgttgagcgcaacagcctggactacgccaagtccaaactggaggagctgtccagaataatgcacgatgaagtaagtgagacggagaacatccggaaaaacctggccatcgagcgcatgatcatcgaaggctgtgagatcctcctggacaccagccagacctttgtgagacaaggttccctcattcaggtgcccatgtctgaaaagggcaagatcaccagggggcgcctggggtctctctccctaaagaaagagggcgagcgacagtgcttcctgttttctaagcatctgattatctgtaccagaggctctggagggaagcttcacttgaccaagaatggagtcatatccctcattgactgcactttattggaggagccagaaagcacggaggaggaagccaaaggatccggccaagacatagatcacttggattttaaaatcggggtggagccaaaggattccccgccctttacagtcatcctagtggcctcgtccagacaggagaaggcagcgtggaccagtgacatcagccagtgtgtggataacatccgatgcaatgggctcatgatgaacgcatttgaagaaaattccaaggtcactgtgccgcagatgatcaagaggaccagggaggggaccagggaagcagaaatgagcaggtccgacgcctccttatattgtgatgatgttgacattcgcttcagcaaaaccatgaactcctgcaaagtgctgcagatccgctacgccagtgtggagcggctgctggagaggctgacggacctgcgcttcctgagcatcgacttcctcaacaccttcctgcactcctaccgcgtcttcaccaccgccatcgtggtcctggacaagctcattaccatctacaagaagcctatcagtgccattcctgccaggtggctgaggtcgctggagctcctgtttgccagtggccagaacaataagctcctgtacggtgaaccccccaagtccccgcgcgccacccgcaagttctcctcgccgccacctctgtccatcaccaagacatcgtcaccgagccgccggcggaagctctccctgaacatccccatcatcactggcggcaaggccctggacctggccgccctcagctgcaactccaatggctacaccagcatgtactcggccatgtcacccttcagcaaggccacgctggacaccagcaagctctatgtgtccagcagcttcaccaacaagattccagatgagggcgatacgacccctgagaagcccgaagacccttcagcgctcagcaagcagagctcagaagtctccatgagagaggagtcagatattgatcaaaaccagagtgatgatggtgatactgaaacatcaccaactaaatctccaacaacacccaaatcagtcaaaaacaaaaattcttcagagttcccactcttttcctataacaatggagtcgtcatgacctcctgtcgtgaactggacaataaccgcagtgccttgtcggccgcctctgcctttgccatagcaaccgccggggccaacgagggcaccccaaacaaggagaagtaccggaggatgtccttagccagtgcagggtttcccccagaccagaggaatggagacaaggagtttgtgatccgcagagcagccaccaatcgtgtcttgaacgtgctccgccactgggtgtccaagcactctcaggactttgagaccaacgatgagctcaaatgcaaggtgatcggcttcctggaagaagtcatgcacgacccggagctcctgacccaggagcggaaggctgcagccaacatcatcaggactctgacccaggaggacccaggtgacaaccagatcacgctggaggagatcacgcagatggctgaaggcgtgaaggctgagccctttgaaaaccactcagccctggagatcgcggagcagctgaccctgctagatcacctcgtcttcaagaagattccttatgaggagttcttcggacaaggatggatgaaactggaaaagaatgaaaggaccccttatatcatgaaaaccactaagcacttcaatgacatcagtaacttgattgcttcagaaatcatccgcaatgaggacatcaacgccagggtgagcgccatcgagaagtgggtggccgtagctgacatatgccgctgcctccacaactacaatgccgtactggagatcacctcgtccatgaaccgcagtgcaatcttccggctcaaaaagacgtggctcaaagtctctaagcagactaaagctttgattgataagctccaaaagcttgtgtcatctgagggcagatttaagaatctcagagaagctctgaaaaattgtgacccaccctgtgtcccttacctggggatgtacctcaccgacctggccttcatcgaggaggggacgcccaattacacggaagacggcctggtcaacttctccaagatgaggatgatatcccatattatccgagagattcgccagtttcaacaaactgcctacaaaatagagcaccaagcaaaggtaacgcaatatttactggaccaatcttttgtaatggatgaagaaagcctctacgagtcttctctccgaatagaaccaaaactccccacctgaagctgagcccagcccagacccagctgctcccggggacatgtgctagatgatactgtacatattcgtttggtttcactggattttcttcttcagtatgtgcttctccaagaatacaaatcgtccttgttcttagattcctgtagaaccggaatatgaatttctgcaccgtttcagacttcgcccacccatccctcccctcg

SEQ ID NO: 12967 - DNA, 2843 bp, Homo sapiens
cctttttggcctacttggggtgagtcaacataaggagtgcaggccaccttagcctttgcttctcaaaagtcatggggcaatgaaggacttggccaaggctgtccagcagtaggccaagttcagggattggctcaggcccctaatggacttcactgcatccaggaatggtaggtgattatcttttccgagaggccacctacccagatcccagttgtggacagcccatcccagccctcagaggctcagaggctctctgagtgccctgccccaaaacaccctaggcaagacattatgccagagcctcagctctagggctgcctggagcagagctcctgaatcacactggctccccagggctccccaggaacctcaccattcctcccccaatccacacctctgctgccagagcaacgcaacgacccagaatacacccgttccctcttctgttccctcctcctgcccccacctcaggcctcactggggcagggtacatcttgcctctctgccctgaacttctgaaacctcaatgatcagattcccagggctctgagaaaacagaagcaaacatcccatccaggatggatttaccccctaaaagtcactgagatcattcccaggggcccagcagacagtgtccttcctttcccagcagcagtgccctgcagaacaaagaggctggttcagagccagctctcagccctatggccttggctgagtcccttaacctttctgagactcagtttcctacctgtgacattcctgcagttatcctgtaggaataagagtgcctacgtcctggggcaacagtgagggttaaaagatcaatcctatcctgtgtgcaacgtggagcagacagcctcgatgagacaagctatggtttgcaatgttctggatgtataacctgtttccagcctggcctgaggtggaaccctgtcatgaggatggtcgctggagctcctgtttgccagtggccagaacaataagctcctgtacggtgaaccccccaagtccccgcgcgccacccgcaagttctcctcgccgccacctctgtccatcaccaagacatcgtcaccgagccgccggcggaagctctccctgaacatccccatcatcactggcggcaaggccctggacctggccgccctcagctgcaactccaatggctacaccagcatgtactcggccatgtcacccttcagcaaggccacgctggacaccagcaagctctatgtgtccagcagcttcaccaacaagattccagatgagggcgatacgacccctgagaagcccgaagacccttcagcgctcagcaagcagagctcagaagtctccatgagagaggagtcagatattgatcaaaaccagagtgatgatggtgatactgaaacatcaccaactaaatctccaacaacacccaaatcagtcaaaaacaaaaattcttcagagttcccactcttttcctataacaatggagtcgtcatgacctcctgtcgtgaactggacaataaccgcagtgccttgtcggccgcctctgcctttgccatagcaaccgccggggccaacgagggcaccccaaacaaggagaagtaccggaggatgtccttagccagtgcagggtttcccccagaccagaggaatggagacaaggagtttgtgatccgcagagcagccaccaatcgtgtcttgaacgtgctccgccactgggtgtccaagcactctcaggactttgagaccaacgatgagctcaaatgcaaggtgatcggcttcctggaagaagtcatgcacgacccggagctcctgacccaggagcggaaggctgcagccaacatcatcaggactctgacccaggaggacccaggtgacaaccagatcacgctggaggagatcacgcagatggctgaaggcgtgaaggctgagccctttgaaaaccactcagccctggagatcgcggagcagctgaccctgctagatcacctcgtcttcaagaagattccttatgaggagttcttcggacaaggatggatgaaactggaaaagaatgaaaggaccccttatatcatgaaaaccactaagcacttcaatgacatcagtaacttgattgcttcagaaatcatccgcaatgaggacatcaacgccagggtgagcgccatcgagaagtgggtggccgtagctgacatatgccgctgcctccacaactacaatgccgtactggagatcacctcgtccatgaaccgcagtgcaatcttccggctcaaaaagacgtggctcaaagtctctaagcagactaaagctttgattgataagctccaaaagcttgtgtcatctgagggcagatttaagaatctcagagaagctctgaaaaattgtgacccaccctgtgtcccttacctggggatgtacctcaccgacctggccttcatcgaggaggggacgcccaattacacggaagacggcctggtcaacttctccaagatgaggatgatatcccatattatccgagagattcgccagtttcaacaaactgcctacaaaatagagcaccaagcaaaggtaacgcaatatttactggaccaatcttttgtaatggatgaagaaagcctctacgagtcttctctccgaatagaaccaaaactccccacctgaagctgagcccagcccagacccagctgctcccggggacatgtgctagatgatactgtacatattcgtttggtttcactggattttcttcttcagtatgtgcttctccaagaatacaaatcgtccttgttcttagattcctgtagaaccggaatatgaatttctgcaccgtttcagacttcgcccacccatccctcccctcg

SEQ ID NO: 12968 - DNA, 4172 bp, Homo sapiens
aggcagagagagtcgggttacaagatggcggatctgtagtagttaccgcggcggcgggagagcaagcgagccctggggggcaaagagacgggagagtgggtgtatgcgcgggtgaagtgagaggtaacggggcctccgggcggagaggcctcagtggctcttgtcaccccttctcgcggctgaacctttggagccatggtgaattcgggcctctccgaagccgccgccgccgccaccgccactactgcctttaccgtctcctaagagtgaggagcgcggacgaggtaagcgaggaggcggcggctagagcggtggagacagcagccaccatgtcggatacgcggcggcgagtgaaggtctataccctgaacgaagaccggcaatgggacgaccgaggcaccgggcacgtctcctccacttacgtggaggagctcaaggggatgtcgctgctggttcgggcagagtccgacggatcactactcttggaatcaaagataaatccaaatactgcatatcagaaacaacaggatacattaattgtttggtcagaagcagagaactatgatttggctctgagttttcaggagaaagctggctgtgatgagatctgggaaaaaatttgtcaggttcaaggtaaagacccatcagtggaagtcacacaggacctcattgatgaatctgaagaagaacgatttgaagaaatgcctgaaactagtcatctgattgacctgcccacatgtgaactcaataaacttgaagagattgctgacttagttacctcagtgctctcctcacctatccgtagggaaaagctggctctcgccttggaaaatgaaggctatattaaaaaactattgcagctgttccaagcttgcgagaacctagaaaacactgaaggcttacaccatttgtatgaaattattagaggaatcttattcctaaataaggcaactctttttgaggtaatgttttctgatgagtgtatcatggatgtcgtgggatgccttgaatatgaccctgctttggctcagccaaaaagacatagagaattcttgaccaaaactgcaaagttcaaggaagttataccaataacagactctgaactaaggcaaaaaatacatcagacttacagggtacagtacattcaggacatcattttgcccacaccatctgtttttgaagagaattttctttctactcttacgtcttttattttcttcaacaaagttgagatagtcagcatgttgcaggaagatgagaagtttttgtctgaagtttttgcacaattaacagatgaggctacagatgatgataaacggcgtgaattggttaattttttcaaggagttttgtgcattttctcagacattacaacctcaaaacagggatgcatttttcaaaacattggcaaaattgggaattcttcctgctcttgaaattgtaatgggcatggatgatttgcaagtcagatcagctgctacagatatattttcttatctagtagaatttagtccatctatggtccgagagtttgtaatgcaagaagctcagcagagtgatgacgatattcttcttattaatgtggtaattgaacaaatgatctgtgatactgatcctgagctaggaggcgctgttcagttaatgggacttcttcgtactctaattgatccagagaacatgctggctacaactaataaaaccgaaaaaagtgaatttctaaattttttctacaaccattgtatgcatgttctcacagcaccacttttgaccaatacttcagaagacaaatgtgaaaaggataatatagttggatcaaacaaaaacaacacaatttgtcccggtgcccttcgctttatgaggcggataattggacttaaagatgaattttataatcgttacatcaccaagggaaatctttttgagccagttataaatgcacttctggataatggaactcggtataatctgttgaattcagctgttattgagttgtttgaatttataagagtggaagatatcaagtctcttactgcccatatagttgaaaacttttataaagcacttgaatcgattgaatatgttcagacattcaaaggattgaagactaaatatgagcaagaaaaagacagacaaaatcagaaactgaacagtgtaccatctatattgcgtagtaacagatttcgcagagatgcaaaagccttggaagaggatgaagaaatgtggtttaatgaagatgaagaagaggaaggaaaagcagttgtggcaccagtggaaaaacctaagccagaagatgattttccagataattatgaaaagtttatggagactaaaaaagcaaaagaaagtgaagacaaggaaaaccttcccaaaaggacatctcctggtggcttcaaatttactttctcccactctgccagtgctgctaatggaacaaacagtaaatctgtagtggctcagataccaccagcaacttctaatggatcctcttccaaaaccacaaacttgcctacgtcagtaacagccaccaagggaagtttggttggcttagtggattatccagatgatgaagaggaagatgaagaagaagaatcgtcccccaggaaaagacctcgtcttggctcataaaatatttattaggggaccctcaacatgtggtcttacaatgctgcaactgttcagtgagctgaaaatctgaatcagaaagctttctcaattgaacttataaaatatacaaggagtagcaaaagacagtatatcagctaagagagtttagttctaataaaaatcaggcttcccaggaacttgattgcttgctagtaattaaggggtttgccttttaggctgtcaaaacaaacattagtaaccagaacctgggagacagcttctcagcaaggaaaagtcacaggtttggggacggtttaggggaggggaaaaggttgatataataatgcagggttgctcctcggggtgtcgatctagaaacaattttacagaacttcagttgtaaactcaataacattacttgtataatggtgctggccatgttgttgttttaatcagttgcctctttttaaaagaaatttttatggaaaacacattcaactatcattaaaaaaatgaagttaagctgttgggaccatttctttaagatttaacaaaagttcagccttttaggtagttgaagggaagtacaccccgtattcagcacatgttgagttttctacaccaggaattttcaatatgtatattgatgaaaacaagctcaattcaaactggacagttttaagataatgttaaaatcagcacttttagagacaacgaaggccaagaatcagtacagtagtattccaaaatgattttctctagaaatttgaaagtagatcgaacagaatgttgtcaaccgcctaccagtacaatcttttgtggaagatactttgaaatcactttctactttgttagtaaagttctgtctttccagagctgcaagttttaaagtgttacttatacagaccaaccaagaatagtgctgaattaagtggcatttagtatctagaagccattttgatccaagaagctacttaagtgtcaaagtcagcatgcagcacatgtagcttttctgtaaacaagggtgtgatatgaaagctgcttttttaagaagagtaaaagcacattccatatacgtaagtgaattttaaaaataaattgaggcaaacagttaagttttatttttagagcaacaagttaactgtaaatattttaatgttagtttgctcatctatgatctgagatcatgccgaagtgagaaaaatctccccaaaatacaatttaatgcattgggaaaaaaaaactttaacagtaattccagccacaatccttagatcacccttgtaatgtgttacgggtccatttttcctggaatcgtttaatctaaagcagtttcccctgttttggagattttgtagttaattttaattttggctattgtttggaaaagatgagctgtctgtgtagatatgaagtatagttttttccataaaacagatgtttattttgtattaaaaaataccactgtacttgttttacaccatttgtatacatgtggtgatattaatgctaaactgtaaaattcaggaattaaaatgtgaccctgtaattccaaaaaaaaaaaaaaaa

SEQ ID NO: 12969 - DNA, 4417 bp, Homo sapiens
gccttcgcctgctggaaaagcagtaggatcggccagtggcgacagcaggagctgagcctaagccctggcggggctttgggctgtagattcctgtctgactaaagggacctcaaaaaggagggaaaatggcttctgagtctgaaactctgaatcccagtgctaggataatgaccttttatccaactatggaagagttccgaaacttcagtagatacattgcctacattgaatcccaaggagctcatcgggcagggctagccaaggttgttcctccaaaagagtggaagccacgagcatcctatgatgacattgatgatttggtcattcctgcccccattcaacagctggtgacggggcagtctggcctctttactcagtacaacatacagaagaaagccatgactgttcgagagttccgcaagatagccaatagcgataagtactgtaccccacgctatagtgagtttgaagagctcgagcggaaatactggaaaaatcttacattcaatcctccaatctatggtgcagatgtgaatggtaccctctatgaaaagcatgttgatgagtggaatattggccggctgagaacaatcctggacttggtggaaaaggagagtgggatcaccattgagggtgtgaacaccccatacctgtactttggcatgtggaagacatcctttgcttggcacactgaagacatggacctctacagcatcaactacctgcactttggagaaccaaagtcctggtactctgttccacctgagcatggaaagcggttggaacgcctcgccaaaggctttttcccaggaagtgctcaaagctgtgaggcatttctccgccacaagatgaccctgatttccccgttaatgctgaagaaatatggaattccctttgacaaggtgactcaagaggctggagagtttatgatcactttcccttatggttaccatgccggctttaaccatggttttaactgtgcggagtctaccaattttgctacccgtcggtggattgagtacggcaagcaagctgtgctgtgctcctgtagaaaggacatggtgaagatctccatggatgtgtttgtgagaaagttccagccagaaaggtacaaactttggaaagctgggaaggacaacacagttattgaccatactctgcccacgccagaagcagctgagtttcttaaggagagtgaactgcctccaagagctggcaacgaggaggagtgcccagaggaggacatggaaggggtggaggatggagaggaaggagacctgaagacaagcctggccaagcaccgaatagggacaaagaggcaccgagtttgtcttgaaataccacaggaggtgagtcagagtgagctcttccccaaggaggatctgagttctgagcagtatgagatgacggagtgcccggcagccctcgcccctgtgaggcccacccatagctctgtgcggcaagttgaggatggtcttaccttcccagattattctgactccactgaagtcaaatttgaagagcttaaaaatgtcaaactagaagaggaggatgaggaggaagaacaagaagcagctgccttggatctttctgtgaatcctgcgtctgtagggggacgccttgtcttctcaggctccaaaaagaaatcatcttctagcctgggctctggctcttcacgggattctatctcttctgattcagaaactagtgagcctctctcctgccgagcccaagggcaaacgggagttctcactgtgcacagttatgccaaaggggatggcagggtcactgtgggagagccatgcacgaggaagaaaggaagcgccgctagaagtttcagtgagcgggagctggcagaggttgcagatgaatacatgttttccctagaagagaataagaagtccaagggacgccgtcagcctttaagcaagctcccccgccatcacccacttgtgctgcaggagtgtgtcagtgatgatgagacatctgaacagctgacccctgaggaagaggctgaggagacagaggcctgggccaagcctctgagccaactgtggcagaaccgacctccaaactttgaggctgagaaggaattcaatgagaccatggcccaacaggcccctcactgcgctgtctgtatgatcttccagacttatcatcaggttgaatttggaggctttaatcagaactgtggaaatgcttcagatttagccccccagaagcagaggaccaagccattgattccagaaatgtgcttcacttcgactggctgcagcacggacatcaacctttctactccttatcttgaggaggatggcaccagcatactcgtttcctgcaagaagtgcagcgtccgggtccatgccagttgctatggggtcccccctgcaaaggcttctgaagactggatgtgttctcggtgttcagccaatgccctagaggaggactgctgtttatgctcattacgaggaggggccctgcagagagcaaatgatgacaggtgggtccacgtttcatgtgctgtggcaattctggaagcaaggtttgtcaacattgcagaaagaagtccggtggatgtgagcaaaatccccctgccccgcttcaaactgaaatgtatcttctgtaagaagcggaggaaaagaactgctggctgctgtgtgcagtgttctcacggccgctgcccaactgccttccatgtgagctgcgcccaggctgccggtgtgatgatgcagcctgacgactggccttttgtggtcttcattacctgctttcggcacaagattcctaatttggagcgtgccaagggggccttgcaaagcatcactgcaggccagaaagtcattagcaagcataagaacgggcgcttctaccagtgtgaagtggtcaggctcaccaccgagaccttctatgaagtcaactttgatgatggctccttcagcgacaatctttatcctgaggacatagtgagccaggactgtctccagtttggtcctcctgctgaaggggaagtggtccaagtgagatggacagacggccaagtctatggagccaagtttgtggcctcccaccctatccaaatgtaccaggtggagtttgaggatggctcacaacttgtggttaagagagatgatgtatacacactggatgaagagcttcccaagagagtcaaatctagactgtcagtagcctcagacatgcgcttcaatgagattttcacagagaaagaggttaagcaagaaaagaaacggcaacgagttatcaactcaagataccgggaagattatattgagcctgcactataccgggccatcatggagtaggtgcttccagggtccaagggattctcagccatccaggcaagagcactctgggttccacagcacagcagacatggaacgctgaagtctctgaaagtgaagttgtaaaaagaaaaggaatgaaataaccgacccatcatcttctcacccaccctcattgcattccgctgtagtgaaaggacgagccatttctgggcacgtggcagcagtcgctgatctcccagctgaggggctgagcactggaatgctgtggctgcactggccccagtccatagaggggtcaactatgctggctggactggctgccttgttcctggcctaggacttagcttcataactatcacctgcaccgactaggctgaggtgctggtacttgccccaacccctacttttgtatttatatgtgtgtgtgtgtgtgcgtgcgtgcgtgcgtgcgtgtatgtttggtctggaccagcttctgccagcccctggcctttactttcttccttgcctatgcagggcaaacaaaatgtgaaattctgccctcagctgagctgagtaagggctcctgggggttggctggagatgggtgtggcatctgtccaggcctggaaccgtctcaagacagtgctggcaaagctgcagtattgagatgctaaggagctgatgccacctctttgtcttcccctaaaggagaacatggggataacatgggtgtgtgcccacaacactctaggtgcagagcccctgtggcaaagtattacagggtgtgggtggggattaccctgaatcggggattttaatgatggaagcaggcagagcctggtgggtgattctgtcaacagaaaattgcaatcatgcaggggctgggagggttaggatgaaaaaactggggccattggaggcccactgtaggtgggagggagctgattttggggtggggggtgggactagagggcaatactgaaggggttaaacaggtttttgctcctcaagaatttgtttgcctgggcccaggattggagggcttcacaccaataccctgtgtatacaagaatcagatttataatacttccccttttttgttacgtatgaacactataaaccaaattattttg

SEQ ID NO: 12970 - DNA, 1212 bp, Homo sapiens
aatatctcaggacccaggaccatgtgatatgggcccaacacctggatgatgttactcttctgcctaggtcatgcgtaaagagggaattagggcatattgcttggcccagtcccgtaatgatatgactctcctgcttgtgccagagccacagaagtgtgcttggtgacataatctttgaggctgtcacatcaccaagattatattgtatcactggaccagcataaagctgacacttctgactatgcccagccttcaaataatactacactgtataattggctcaacacccaggtgatattgttccatttacctgagaccagataaaaagcctaatgatgacgcttgtccccagagccaggacacgtgcaggacaggatcattactctcatccctgccccagattttcacaggtgctgcttacagagggcatcatgacatattgcttgacaaagaacctaagtgatgttaatattctgcataggttgctaaaaaatgggaatgtgagaaataccttgcttcagtccaaagtgggcttgctgacatattatgtgaaactgtacccgggtgaagtgactcttctgactaggcccagcatacaaatgagattatgctgtatcactggctcagtgtcgaagcccagatcacagaagtaattgtgccatatgtggaacaagcagctaagcaatagataacatccatcgtggctctgccttcaaagggaaattttacatatgtcactgggaccatcacccagatgatgtcctgcccactaaaagaattgtgacataacgctgactgcaaaaactgggtaatgcaactctcctctttattctggagtctgccaaaacaagggattatcacatattgcggagtccagcacccaggtaaaattttgtcatatacccagcttcagataccatgcaatgatacaactatcatacctggacccaaagaggagagatattttgattctcattgccattcttatggccacaagcaaagtaatggttctcatagtggtataaagttcacacagtattatgacactcccagcgtatcatagaaaatgtgagtagtacaatgagtgttataacagggaacagcaaaccaatgctattgtgattattggattcacacccagctgacgcgactatcattctctcacaagaacagaacctgcaaataaagtactaaatctcaccaaaaaaaaaa

SEQ ID NO: 12971 - DNA, 2681 bp, Homo sapiens
cggggcccaggctgtgcgcttggggagcgcggaatgtgaggcttggcgggccgcagcacgctcggacgggccaggggcggcgacccctcgcggacgcccggctgcgcgccgggccggggacttgcccttgcacgctccctgcgccctccagctcgccggcgggaccatgaagaagttctctcggatgcccaagtcggagggcggcagcggcggcggagcggcgggtggcggggctggcggggccggggccggggccggctgcggctccggcggctcgtccgtgggggtccgggtgttcgcggtcggccgccaccaggtcaccctggaagagtcgctggccgaaggtggattctccacagttttcctcgtgcgtactcacggtggaatccgatgtgcattgaagcgaatgtatgtcaataacatgccagacctcaatgtttgtaaaagggaaattacaattatgaaagagctatctggtcacaaaaatattgtgggctatttggactgtgctgttaattcaattagtgataatgtatgggaagtccttatcttaatggaatattgtcgagctggacaggtagtgaatcaaatgaataagaagctacagacgggttttacagaaccagaagtgttacagatattctgtgatacctgtgaagctgttgcaaggttgcatcagtgtaagactccaataattcaccgggatctgaaggtagaaaatattttgttgaatgatggtgggaactatgtactttgtgactttggcagtgccactaataaatttcttaatcctcaaaaagatggagttaatgtagtagaagaagaaattaaaaagtatacaactctgtcatacagagcccctgaaatgatcaacctttatggagggaaacccatcaccaccaaggctgatatctgggcactgggatgtctactctataaactttgtttcttcactcttccttttggtgagagtcaggttgctatctgtgatggcaacttcaccatcccagacaattctcgttactcccgtaacatacattgcttaataaggttcatgcttgaaccagatccggaacatagacctgatatatttcaagtgtcatattttgcatttaaatttgccaaaaaggattgtccagtctccaacatcaataattcttctattccttcagctcttcctgaaccgatgactgctagtgaagcagctgctaggaaaagccaaataaaagccagaataacagataccattggaccaacagaaacctcaattgcaccaagacaaagaccaaaggccaactctgctactactgccactcccagtgtgctgaccattcaaagttcagcaacacctgttaaagtccttgctcctggtgaattcggtaaccatagaccaaaaggggcactaagacctggaaatggccctgaaattttattgggtcagggacctcctcagcagccgccacagcagcatagagtactccagcaactacagcagggagattggagattacagcaactccatttacagcatcgtcatcctcaccagcagcagcagcagcagcagcagcaacagcaacagcagcagcagcaacagcaacagcagcagcagcagcagcagcagcagcaccaccaccaccaccaccaccacctacttcaagatgcttatatgcagcagtatcaacatgcaacacagcagcaacagatgcttcaacaacaatttttaatgcattcggtatatcaaccacaaccttctgcatcacagtatcctacaatgatgccgcagtatcagcaggctttctttcaacagcagatgctagctcaacatcagccgtctcaacaacaggcatcacctgaatatcttacctcccctcaagagttctcaccagccttagtttcctacacttcatcacttccagctcaggttggaaccataatggactcctcctatagtgccaataggtcagttgctgataaagaggccattgcaaatttcacaaatcagaagaacatcagcaatccacctgatatgtcagggtggaatccttttggagaggataatttctctaagttaacagaagaggaactattggacagagaatttgaccttctaagatcaagtaagggacacttgaaggcttattttgcttcacagtaaaataacagctctattattattcagcaaggccaaagacttttgagaatgtgtatggaaaattctttttgtgcatttgagggcaaaattcaggccatcttcttatacatatactatcaaattatgttgtgtgcattagaaatcagttgcttgatagtagctattaaacccaatattgctgatagtatgctaatatcctaaaacttaaatattgcatatctatgaatgttaaattcagaatatctctaaaacatggaaaattgatgtttcaataaaaagggagacattttattattttgccttactaatgattttgcagctctgtttttctgcacactcaatagaaaatattgtgggtctgagatgccctttgaaaatgcctgaaagaaaacatgggctactacattatgttaatgttttgtaatgtccttttaatgagtggtgacataaaagggctgctttgttgtcctgatatggcaaaaattaaataaattctttttcactttaaatcagaaaaaaaaaaaaaaaa

SEQ ID NO: 12972 - DNA, 3859 bp, Homo sapiens
cggggcccaggctgtgcgcttggggagcgcggaatgtgaggcttggcgggccgcagcacgctcggacgggccaggggcggcgacccctcgcggacgcccggctgcgcgccgggccggggacttgcccttgcacgctccctgcgccctccagctcgccggcgggaccatgaagaagttctctcggatgcccaagtcggagggcggcagcggcggcggagcggcgggtggcggggctggcggggccggggccggggccggctgcggctccggcggctcgtccgtgggggtccgggtgttcgcggtcggccgccaccaggtcaccctggaagagtcgctggccgaaggtggattctccacagttttcctcgtgcgtactcacggtggaatccgatgtgcattgaagcgaatgtatgtcaataacatgccagacctcaatgtttgtaaaagggaaattacaattatgaaagagctatctggtcacaaaaatattgtgggctatttggactgtgctgttaattcaattagtgataatgtatgggaagtccttatcttaatggaatattgtcgagctggacaggtagtgaatcaaatgaataagaagctacagacgggttttacagaaccagaagtgttacagatattctgtgatacctgtgaagctgttgcaaggttgcatcagtgtaagactccaataattcaccgggatctgaaggtagaaaatattttgttgaatgatggtgggaactatgtactttgtgactttggcagtgccactaataaatttcttaatcctcaaaaagatggagttaatgtagtagaagaagaaattaaaaagtatacaactctgtcatacagagcccctgaaatgatcaacctttatggagggaaacccatcaccaccaaggctgatatctgggcactgggatgtctactctataaactttgtttcttcactcttccttttggtgagagtcaggttgctatctgtgatggcaacttcaccatcccagacaattctcgttactcccgtaacatacattgcttaataaggttcatgcttgaaccagatccggaacatagacctgatatatttcaagtgtcatattttgcatttaaatttgccaaaaaggattgtccagtctccaacatcaataattcttctattccttcagctcttcctgaaccgatgactgctagtgaagcagctgctaggaaaagccaaataaaagccagaataacagataccattggaccaacagaaacctcaattgcaccaagacaaagaccaaaggccaactctgctactactgccactcccagtgtgctgaccattcaaagttcagcaacacctgttaaagtccttgctcctggtgaattcggtaaccatagaccaaaaggggcactaagacctggaaatggccctgaaattttattgggtcagggacctcctcagcagccgccacagcagcatagagtactccagcaactacagcagggagattggagattacagcaactccatttacagcatcgtcatcctcaccagcagcagcagcagcagcagcagcaacagcaacagcagcagcagcaacagcaacagcagcagcagcagcagcagcagcagcaccaccaccaccaccaccaccacctacttcaagatgcttatatgcagcagtatcaacatgcaacacagcagcaacagatgcttcaacaacaatttttaatgcattcggtatatcaaccacaaccttctgcatcacagtatcctacaatgatgccgcagtatcagcaggctttctttcaacagcagatgctagctcaacatcagccgtctcaacaacaggcatcacctgaatatcttacctcccctcaagagttctcaccagccttagtttcctacacttcatcacttccagctcaggttggaaccataatggactcctcctatagtgccaataggtcagttgctgataaagaggccattgcaaatttcacaaatcagaagaacatcagcaatccacctgatatgtcagggtggaatccttttggagaggataatttctctaagttaacagaagaggaactattggacagagaatttgaccttctaagatcaaataggctcgaggagagagcatcctcagataagaatgtagactcactttctgctccacataaccatcctccagaagatccttttggttctgttcctttcatttctcattcaggttctcctgaaaagaaagctgaacattcatctataaatcaagaaaatggcactgcaaaccctatcaagaacggtaaaacaagtccagcatctaaagatcagcggactggaaagaaaacctcagtacagggtcaagtgcaaaaggggaatgatgaatctgaaagtgattttgaatcagatcccccttctcctaagagcagtgaagaggaagagcaagatgatgaagaagttcttcagggggaacaaggagattttaatgatgatgatactgaaccagaaaatctgggtcataggcctctcctcatggattctgaagatgaggaagaagaggagaaacatagctctgattctgattatgagcaggctaaagcaaagtacagtgacatgagctctgtctacagagacagatctggcagtggaccaacccaagatcttaatacaatactcctcacctcagcccaattatcctctgatgttgcagtggagactcccaaacaggagtttgatgtatttggcgctgtccccttctttgcagtgcgtgctcaacagccccagcaagaaaagaatgaaaagaacctccctcaacacaggtttcctgctgcaggactggagcaggaggaatttgatgtattcacaaaggcgccttttagcaagaaggtgaatgtacaagaatgccatgcagtggggcctgaggcacatactatccctggttatcccaaaagtgtagatgtatttggctccactccatttcagcccttcctcacatcaacaagtaaaagtgaaagcaatgaggacctttttgggcttgtgccctttgatgaaataacggggagccagcagcaaaaagtcaaacagcgcagcttacagaaactgtcctctcgccaaaggcgcacaaagcaggatatgtccaaaagtaatgggaagcggcatcatggcacgccaactagcacaaagaagactttgaagcctacctatcgcactccagagagggctcgcaggcacaaaaaagtgggccgccgagactctcaaagtagcaatgaatttttaaccatctcagactccaaggagaacattagtgttgcactgactgatgggaaagatagggggaatgtcttacaacctgaggagagcctgttggaccccttcggtgccaagcccttccattctccagacctgtcatggcaccctccacatcagggcctgagcgacatccgtgctgatcacaatactgtcctgccagggcggccaagacaaaattcactacatgggtcattccatagtgcagatgtattgaaaatggatgattttggtgccgtgccctttacagaacttgtggtgcaaagcatcactccacatcagtcccaacagtcccaaccagtcgaattagacccatttggtgctgctccatttccttctaaacagtagatacttctgatggattctcggcattaactcctgtttcaaaaaagtgtgaacagttttatgaatttgaaagaaaatttggtagctctttatagcattcattcttaaagatcagtcagaataggtgatttctaaataaaccaaatagaagaatgaaaaaaaaaaaaaaaaaaaaaaaaaaaaaaaaaaaaaaaaaaaaaaaaaaaaaaa

SEQ ID NO: 12973 - DNA, 2068 bp, Homo sapiens
ggtggttcttgcccgtgttgtgtgtgtgtgtgagtgagagagcgagtgagtgagtgagtgagtgtgtgtgtgggggggactcggcttgttgttgtcggtgacttccccctccccttcaccccttcccctccccgccgccgctgcagtggccgctccctgggccgtaggaaatgagcgataacgatgacatcgaggtggagagcgacgaagagcaaccgaggtttcaatctgcggctgacaaacgggctcatcataatgcactggaacgaaaacgtagggaccacatcaaagacagctttcacagtttgcgggactcagtcccatcactccaaggagagaaggcatcccgggcccaaatcctagacaaagccacagaatatatccagtatatgcgaaggaaaaaccacacacaccagcaagatattgacgacctcaagcggcagaatgctcttctggagcagcaagtccgtgcactggagaaggcgaggtcaagtgcccaactgcagaccaactacccctcctcagacaacagcctctacaccaacgccaagggcagcaccatctctgccttcgatgggggctcggactccagctcggagtctgagcctgaagagccccaaagcaggaagaagctccggatggaggccagctaagccactcggggcaggccagcaataaaaactgtctgtctccatcgtctcatcctcctttcagttcgttggtagagccctcagaaccatttaagagactctttatttttctctttctcccttttttttttaaatttttatttttacgtagaagctcttggacaacagctctcgttctccttccccatttccactgtatattttttaatgtattcccttcagggattccctgtccccaacaggaatttttaaaccaaaacaccccaacttggcagctttttctgtggaggacagacggccggccggacctctgagcacatagtgtcctgcccaccctaccagctcctccagccctgccgggcacatgcccgggggacgcctgccctgcccaggtggcctcctggcccgccctcacctctgatagactttgtgaatctgaactgctctactttgagaagatgaccggtttggagtaatcagaatgaaccctcctcctttttaagggttttttttttttcctttttctaaaaagctatgtatcgctcctattgaaagaccagatccttagagaagtttgtggtataaaaaggaagtggggacagattcgcagcacagagtcgctggcatgtttcactcctgcttctctcagccagctgtttaagcctgcggcgccagcctcacggagggccgtgtgacactctcgtggtatgtatgggagatggcagcagtgaagcagcagccaccagggagtggccatttggggttgggacagggagggtgttttgggtggcatagaggttttgtattgagggccagtgatgatgttttgatatttatttcctgctacttaaatttgaatctgagtgaattgtacctatttctgatgatgtcggtcttgcaaagcgacagattcataaagtaatgatgaaatctttctttcttcccgtgtgtatttctaagaaatagagccaactgattttgtatgtaaataccaagagcaatttacctggtactaaacccgcaccccagtgcggacccttcccagccctcatcccacttcctttcctactgtcctggaacctgtctccattgtgtgatccagccctggttctggctgtggtcagcagatgccagtgaagggttttgtgtgtttaggcctcatttctttgtctttttcctactccgttcctggcatttgctgatttctagtgtatactctgtagtctcagttcgtgtttgattccattccatggaaataaaaagtatgttgtacatactgccgaagaattgtcttgcaagttaaggcttccccctttactataagactataaataaaaacttattttatccttaaaaaaaaaaaaaaaaaaaaaaaaaaaaaaaaaaaaaaaaaaaaaaaaaaaaaaaaaaaaaaaaaa

SEQ ID NO: 12974 - DNA, 2041 bp, Homo sapiens
ggtggttcttgcccgtgttgtgtgtgtgtgtgagtgagagagcgagtgagtgagtgagtgagtgtgtgtgtgggggggactcggcttgttgttgtcggtgacttccccctccccttcaccccttcccctccccgccgccgctgcagtggccgctccctgggccgtaggaaatgagcgataacgatgacatcgaggtggagagcgacgctgacaaacgggctcatcataatgcactggaacgaaaacgtagggaccacatcaaagacagctttcacagtttgcgggactcagtcccatcactccaaggagagaaggcatcccgggcccaaatcctagacaaagccacagaatatatccagtatatgcgaaggaaaaaccacacacaccagcaagatattgacgacctcaagcggcagaatgctcttctggagcagcaagtccgtgcactggagaaggcgaggtcaagtgcccaactgcagaccaactacccctcctcagacaacagcctctacaccaacgccaagggcagcaccatctctgccttcgatgggggctcggactccagctcggagtctgagcctgaagagccccaaagcaggaagaagctccggatggaggccagctaagccactcggggcaggccagcaataaaaactgtctgtctccatcgtctcatcctcctttcagttcgttggtagagccctcagaaccatttaagagactctttatttttctctttctcccttttttttttaaatttttatttttacgtagaagctcttggacaacagctctcgttctccttccccatttccactgtatattttttaatgtattcccttcagggattccctgtccccaacaggaatttttaaaccaaaacaccccaacttggcagctttttctgtggaggacagacggccggccggacctctgagcacatagtgtcctgcccaccctaccagctcctccagccctgccgggcacatgcccgggggacgcctgccctgcccaggtggcctcctggcccgccctcacctctgatagactttgtgaatctgaactgctctactttgagaagatgaccggtttggagtaatcagaatgaaccctcctcctttttaagggttttttttttttcctttttctaaaaagctatgtatcgctcctattgaaagaccagatccttagagaagtttgtggtataaaaaggaagtggggacagattcgcagcacagagtcgctggcatgtttcactcctgcttctctcagccagctgtttaagcctgcggcgccagcctcacggagggccgtgtgacactctcgtggtatgtatgggagatggcagcagtgaagcagcagccaccagggagtggccatttggggttgggacagggagggtgttttgggtggcatagaggttttgtattgagggccagtgatgatgttttgatatttatttcctgctacttaaatttgaatctgagtgaattgtacctatttctgatgatgtcggtcttgcaaagcgacagattcataaagtaatgatgaaatctttctttcttcccgtgtgtatttctaagaaatagagccaactgattttgtatgtaaataccaagagcaatttacctggtactaaacccgcaccccagtgcggacccttcccagccctcatcccacttcctttcctactgtcctggaacctgtctccattgtgtgatccagccctggttctggctgtggtcagcagatgccagtgaagggttttgtgtgtttaggcctcatttctttgtctttttcctactccgttcctggcatttgctgatttctagtgtatactctgtagtctcagttcgtgtttgattccattccatggaaataaaaagtatgttgtacatactgccgaagaattgtcttgcaagttaaggcttccccctttactataagactataaataaaaacttattttatccttaaaaaaaaaaaaaaaaaaaaaaaaaaaaaaaaaaaaaaaaaaaaaaaaaaaaaaaaaaaaaaaaaa

SEQ ID NO: 12975 - DNA, 2755 bp, Homo sapiens
gtgttgctcctcccctggcagccgtgaggggggttagatctcagccggagccggagctgggcctagctgtcccacgggccaccactacctcctttggttcgggagaaagctacgaccaagtacgcccagctcgggccttagaacttctgaacgggcagtgcgggtaggccctgcttagcccttcccggaggacacctgaccaaaagaggaagatagtcttgggacccttgcatggtgtttcaaagggtggtgaagaactaaggtagaagaatacatgttcacttccagtgaacaagagcatgttcccaaactcaattttgggtcacccacccttcactccaaatcatcaacaacataataacttctttaccctgtcacctactgtttattcacaccagcagcttatagatgcacaattcaactttcagaatgcagacttgtctagagctgtgtcattacagcagctgacatatggaaatgtcagtccaatacagacctcagcttccccattatttcgaggaaggaagagattaagcgatgaaaaaaaccttcctcttgacggtaaacggcaacgtttccattcaccccaccaagagccaactgtagttaaccagatagtgcctttatcaggtgaacgaagatactcaatgccaccattgtttcatacacattatgtaccagatatagtcagatgtgttccaccttttcgagaaattgcatttttagaacctagagaaatcacactgcctgaggccaaagataagttgagtcagcagatactggagttatttgaaacatgtcagcagcaaataagtgatttaaagaagaaagaactctgtcgaacacagctgcagagagaaattcagctgttatttccacaaagcagactttttttggttgggtcctctttaaatggatttggtacccggagcagtgatggtgatttatgcctagttgttaaggaagaaccatgtttttttcaggtaaatcagaagactgaagcacggcatatactcaccttagtccataaacacttctgtactagactttcgggctacattgagagacctcagctgattcgagcaaaagtgccaattgtgaagttcagggataaagtcagttgtgtggagtttgacttgaatgtaaacaatattgttggaataagaaacacattccttctcagaacttatgcataccttgaaaatcgagttcgtccgttagtgctggtgattaagaagtgggcaagtcaccatcagataaatgatgccagtcgtggtactttaagcagctatagtcttgtattgatggttttgcactatttacaaaccctacctgaacccatccttccatccctccaaaaaatttacccagagtcttttagtcctgctatacagctgcaccttgtacatcaagctccatgtaatgttcctccttacctctcaaagaatgaatcaaaccttggggacctcttactgggctttcttaaatattatgctacagaatttgactggaatagtcaaatgatttcagttcgtgaagccaaagccattccaaggcctgatggtattgaatggagaaataaatacatctgtgtagaagaaccttttgatggaacaaatacagccagagcagtgcacgaaaagcagaaatttgatatgatcaaggatcaatttttaaagtcatggcacagattgaaaaacaagagagatttgaacagtatactacctgtaagagctgctgtcctgaaaagataactggcctctatttcttaataaattcttccaagaaataaagaacaatagtttcatcataatacattatgtttacctccatcatagttgcttttttcatagttcttgttttcatgttttatttttaaaaagacatataaagattgcatattttattatgacatttcctaataaacccctttgatttaaaaatgtatttttaaaaatgtttacattgatgatgagtaatattgcatgtgttttcaggtgatcagataaaatatattttgggaaattaacaaataaaaagtttttgatataacttcaattaattgtaccacatgctaatcctgaagagatgtgtagaattttggaaagggtctaattcatacatgcttaaagtataacctacgttagatagtttgttgtcaaagtctgttctagtaaagtgaagattcaagtcagttgttcatttacttgaagcaaaacgaaatctttcatttcagtcaaatcactgcagtcatgaaatactgaacaattgccttaagtctttgcttgactcactgggatagactgaggctttgggtgtgtctgtattagcatttcattagtacttcacatgcttttgatgtactcttgagattgctttaaattttgtattgaaacaacaatacattttgcactgtagtaatgggagcactaactcttacaacagttagtgaatcgttttaaagaatcagttcagtgtagacattttgaaaagattgtttcctgtgctttacgatagcttagtgcaatgtgcacttctgttttacttgccattttcctgctctgttttctctgtgacatgaagcaacagaaactgagatcaaagttaagattatatcctgtttgtagtatcagatatttttctgtgtacaattataggattgtaatctaaactggaatttttaggcagtaagtcaccacaaaatgttttagataagacacaataaaattattataaataaaagcttaatgtttgt

SEQ ID NO: 12976 - DNA, 3239 bp, Homo sapiens
ccgttgtcccgaagagcgagatcgagcttggccccctcccccccctccttccctccctccttccttccgccgcaacatggctaacaacagccccgcgctgacaggcaactcgcagccgcagcaccaggcggctgcagctgcggctcagcaacagcagcagtgcggcggcggcggcgctaccaagccggcggtctccggcaagcagggcaatgtgctcccgctctggggcagcgagaagaccatgaacctcaaccccatgatcctgaccaacatcctgtcgtcgccttacttcaaagtacagctctacgagctcaagacctaccacgaggtggtggacgagatctactttaaggtcacgcacgttgaaccatgggagaaaggaagcaggaaaacagcgggccagacagggatgtgcggaggggttcgaggtgttggaacaggaggaattgtttctacagcattttgcctgttatacaaattatttaccctgaagttaactcgaaagcaagtgatgggtcttataacacacacagactctccatatattagagcgcttggatttatgtatataagatatacacagccccctacagatctgtgggactggtttgaatccttccttgatgatgaagaggacctagatgtgaaggctggtggaggctgtgtaatgaccattggagaaatgctacgatcttttctcacaaaactggagtggttttctaccttgtttccaagaattccagttccagttcaaaagaatattgatcaacagattaaaacccgacctagaaaaatcaagaaagatgggaaggaaggtgctgaggaaatagacagacatgttgaacgcagacgttcaaggtctccaaggagatctctgagtccacggaggtccccaagaaggtcaagaagtagaagtcatcatcgggagggccatgggtcttctagttttgacagagaattagaaagagagaaagaacgccagcgactagagcgtgaagccaaagaaagggagaaagaacggcgaagatcccgaagtattgaccgggggttagaacgcaggcgcagcagaagtagggaaaggcatagaagtcgcagtcgaagtcgtgataggaaaggggatagaagggacagggatcgagaaagagagaaagaaaatgagagaggtagaagacgagatcgtgactatgataaggaaagaggaaatgaacgagaaaaagagagagagcgatcaagagaaaggtccaaggaacagagaagtaggggagaggtagaagagaagaaacataaagaagacaaagatgataggcggcacagagatgacaaaagagattccaagaaagagaaaaaacacagtagaagcagaagcagagaaaggaaacacagaagtaggagtcgaagtagaaatgcagggaaacgaagtagaagtagaagcaaagagaaatcaagtaaacataaaaatgaaagtaaagaaaaatcaaataaacgaagtcgaagtggcagtcaaggaagaactgacagtgttgaaaaatcaaaaaaacgggaacatagtcccagcaaagaaaaatctagaaagcgtagtagaagcaaagaacgttcccacaaacgagatcacagtgatagtaaggaccagtcagacaaacatgatcgtcgaaggagccaaagtatagaacaagagagccaagaaaaacagcataaaaacaaagatgagactgtgtgaaaatattttgtaaaagtggttcacattgaatcctataaatgattaaatctgcttttttcccccacgttgagattgtgcagtagttcgcactcctcaagctctccctgtaggctgcattttcatttcctctttcgtgtagggaagtgcctttgtaattccatttattgcattggtgttttcacccaattgttaagtttgatacatgatgcacagattgttcttgcatttttattgtttgtttttgaaatgtacagtctgtacatatgtcctgaaaatgttttaattcctttggcatggttgccatgttggttaaatttgtataaggcaataaactgccactaatctatttttgttttgtaggtgtgggattatggtttgtgtactgaagttagcatggctgtgcttttcgtaatagaatgctaaagactttgagaatggatcttggatgtctattataggagaagtatgtgctgccaatgtacaagaaggcagcattgtaggattaacattcttgtctactgtatattatcttggaaggctcttgttaatatgttacacttaatattctccacagttacctttagagagaatttatgagaagttagtttctgatgcagaggtttttaggctgtgatttcatcaaaagtccttttagcattctacctcaaagggacacttagtatgcctaaaatttattcacttagttttcctttttttatttgaaaaaatacatgacatgtaatctttttttcttgaattctttctcagattttaaagtactatattaaagaaaaaaattaatgtctaaagcctagcattcttgcagaaccctatactaacatgtaatggggagagggtggggcagatgagtagagaaacagattcaagcctcaagcttccaaagcatttttataaatggaaaatccttaaattatgaaacagcttgatatagtgtcctttttttaaaattcagaactttttttattgataatggagattgctgtttgagtttttaaacttaatctagaacagaggagtattaaaagtaatgctgtgctgcattatttaagactatcagcaaattatttgatagattgttcttacaacttgtattctgattacagaaccatcatgagtgtggaataaatactggattaaatcctttatcctgggtcttggcttttcccccatttgttaaatttttttagcatatttatattgtggaaattgatgaaacgtcagtagagtcacactttgtgtacagggatgtcttagtgcccagatgacaagtgaattttggagaaatgcatagactgggattgggcatgtggtaatcaataatctttattagaatacttgataatggcagttccctttgtcagtggttgttacatgtgtcatttgattactttgttccatgtcaaagacgtttattgggataccttttacttggacaatatgttagcattttttaaaatttggacttgaaattctttaagataattcacccaattctttttag

SEQ ID NO: 12977 - DNA, 3277 bp, Homo sapiens
agtggccgagcggcgtcgtggggttaccccgcccgcgccagcgctgcatccctggccgctacccggggagagccggaggatgaattgaacctcgcagccgctgctatctccagtgctcatcacagggtgtggtgtctatctgaagaatattttactttcaaaggaaagatgctgtctccaaatgataaaatgttaggaaaactggatccattttatcaaccttcagtgtccaagcagaagaccagtgcagaaatcataagtgaagcaagaaatgcattaagaacagttagaacccaaagaccatttacaccacaggaggctcaaagaaaactattcggacctgcatcctcaagaacatcagaaaatagacctccttcctccttcagcctccatgcatccagttttgagtcatctgattccaggcctatctctggcacacgtcttagtccactagagctgaaaccgaaagttccagcatctcccaccagagaggaggattcctgcttttcctttcctaagcccccagtggaccctgcgaagattagaagagtaagcaacgccagggctcgcttattcagggctgcctcccagcgggcccttctgccggacagatcccttcctccctccgactcaaagaagacagtggaatccaaagaaacagttatgatgggggactctatggtgaaaataaatgggatttatttaacaaaatcaaatgctatttgccacttaaagagtcacccacttcagctaactgatgatggaggcttcagtgaaataaaggagcaagaaatgttcaaaggaacaacatctttaccatctcatctcaagaatggaggggaccaggggaagagacatgcgagggcctcatcatgccccagtagctcagacctgagcaggctgcaaaccaaagcagtcccaaaagctgacctgcaagaagaggacgcagaaatagaagtagacgaagtcttttggaatacaaggattgtaccgattttgcgtgaattagaaaaggaagaaaacattgaaacggtttgtgctgcttgcacacaacttcatcatgctttagaggaaggaaacatgcttggaaataaatttaagggaagaagtattctcctgaagaccctgtgtaaactagttgatgttggttcagactcgctcagccttaaacttgcaaaaataattctagcacttaaagtgagtagaaagaatcttcttaatgtctgcaaacttatatttaaaattagcaggaatgagaagaatgattctttgattcaaaatgacagcattctggaatcattattggaggtactaagaagtgaagacctgcaaactaacatggaagcttttttatactgtatggggtctataaagttcatttctggaaatctgggatttcttaatgaaatgatcagcaaaggtgctgtggaaatactgataaatttgataaaacaaataaatgaggacatcaagaaatgtggtacatttttgcctaattcgggccacttgctagtccaggtgactgctacattgagaaacttggttgattcatcattagtaagaagtaagttcctaaacatcagtgcccttccccagctctgcacggcaatggaacagtacaagggtgacaaggacgtctgtaccaatattgccagaatattcagcaaacttacttcttaccgtgactgctgcacagccttggccagctattccagatgttatgccttatttctgaatctaattaacaaataccagaagaagcaggatttagtcgtccgtgttgtttttattcttggcaacctgacggcaaaaaataaccaggctcgtgaacaattttccaaagagaaagggagcatccaaactctgctgtcattattccagacgttccatcagctggatctgcattcccagaagccggtgggccaacgaggcgagcagcacagggcgcagaggccgccgtcagaggcagaggacgtgctcatcaagctgactcgtgtgctggccaacattgccatccacccgggcgtgggcccggtgctggccgccaacccggggatagtgggcctgctcctgaccacgctggaatacaagtcacttgatgattgtgaggagctggtgatcaatgctacagcgacaatcaacaatttatcttactaccaagtgaagaattccataattcaagacaaaaagctatatattgctgaattgctcttaaagcttcttgtcagtaacaacatggatggaatcctggaggctgtgcgtgttttcggaaatctctcccaggaccatgatgtctgcgatttcattgtgcagaacaatgtccacaggttcatgatggcgctgctggatgctcagcatcaggatatctgcttttctgcctgtggtgttctcctcaatctcactgtggataaagacaagcgtgtcatcttgaaagaaggaggtggcattaaaaagttagtggactgtttaagagatttgggtcctactgattggcagctggcctgcttggtttgtaaaactttatggaacttcagtgaaaacatcactaatgcttcgtcatgttttggaaatgaagacaccaacacactcttactcttgctctcatcatttttagatgaagaactagcactggatggcagttttgatccagacctaaaaaactatcacaaactccattgggaaacagaattcaaacctgtggcacagcagcttctaaaccgaattcagagacatcacaccttcctggaacccctgcccattccctctttctaacatgatgcagattaacagtagaaacgagaactcacgtctccctcattcttaagaactggtaacaaacgtgaacatttttttcagcattaacaaatgtggaaagtttttcaagaactggttttagtgagtagctgaagtattttttaaaattaagcatttcttcttgttaggtattatggaaaaatgaatatacacattatatttcctgttgagagaaatgtaagatgaaaatatgtgcattttcaagtaaatgactttttcttctattctctattaaacaatttagttctagtcttaaaatcttgatttaacaattttggaattgaagtgttcataagttaaatgaactgtgcaatgaaggctgttagattatatagaaagaagggtaggcaacatgagtggaacacgttacaacataggatctgtactaattcttactatgtcaaataataaatgctctcattaggaaaaaaaaaaaaaaaaaaaaataaaaaaaaaaaaaaaa

SEQ ID NO: 12978 - DNA, 3148 bp, Homo sapiens
cctcccgtcccgccgagccggcgccaagatggcggcgctgactcctggagagcggtcgcgccggaggccgcgggggccggagcggagcagccgcggctgaggttcccgagtcgccgctcggggctgcgctccgccgccgggaccccggcctctggccgcgccggctccggcctccgggggggccggggccgccgggacatggtgccagtcgcaccccttccccgccgccgctgagctcgccggccgcgcccgggctgggacgtccgagcgggaagatgttttccgccctgaagaagctggtggggtcggaccaggccccgggccgggacaagaacatccccgccgggctgcagtccatgaaccaggcgttgcagaggcgcttcgccaagggggtgcagtacaacatgaagatagtgatccggggagacaggaacacgggcaagacagcgctgtggcaccgcctgcagggccggccgttcgtggaggagtacatccccacacaggagatccaggtcaccagcatccactggagctacaagaccacggatgacatcgtgaaggttgaagtctgggatgtagtagacaaaggaaaatgcaaaaagcgaggcgacggcttaaagatggagaacgacccccaggaggcggagtctgaaatggccctggatgctgagttcctggacgtgtacaagaactgcaacggggtggtcatgatgttcgacattaccaagcagtggaccttcaattacattctccgggagcttccaaaagtgcccacccacgtgccagtgtgcgtgctgggaaactaccgggacatgggcgagcaccgagtcatcctgccggacgacgtgcgtgacttcatcgacaacctggacagacctccaggttcctcctacttccgctatgctgagtcttccatgaagaacagcttcggcctaaagtaccttcataagttcttcaatatcccatttttgcagcttcagagggagacgctgttgcggcagctggagacgaaccagctggacatggacgccacgctggaggagctgtcggtgcagcaggagacggaggaccagaactacggcatcttcctggagatgatggaggctcgcagccgtggccatgcgtccccactggcggccaacgggcagagcccatccccgggctcccagtcaccagtggtgcctgcaggcgctgtgtccacggggagctccagccccggcacaccccagcccgccccacagctgcccctcaatgccgccccaccatcctctgtgccccctgtaccaccctcagaggccctgcccccacctgcgtgcccctcagcccccgccccacggcgcagcatcatctctaggctgtttgggacgtcacctgccaccgaggcagcccctccacctccagagccagtcccggccgcagagggcccagcaacggtccagagtgtggaggactttgttcctgacgaccgcctggaccgcagcttcctggaagacacaacccccgccagggacgagaagaaggtgggggccaaggctgcccagcaggacagcgacagtgatggggaggccctgggcggcaacccgatggtggcagggttccaggacgatgtggacctcgaagaccagccacgtgggagtcccccgctgcctgcaggccccgtccccagtcaagacatcactctttcgagtgaggaggaagcagaagtggcagctcccacaaaaggccctgccccagctccccagcagtgctcagagccagagaccaagtggtcctccataccagcttcgaagccacggagggggacagctcccacgaggaccgcagcacccccctggccaggcggtgtctctgttcgcacaggtccggagaagcgcagcagcaccaggccccctgctgagatggagccggggaagggtgagcaggcctcctcgtcggagagtgaccccgagggacccattgctgcacaaatgctgtccttcgtcatggatgaccccgactttgagagcgagggatcagacacacagcgcagggcggatgactttcccgtgcgagatgacccctccgatgtgactgacgaggatgagggccctgccgagccgcccccaccccccaagctccctctccccgccttcagactgaagaatgactcggacctcttcgggctggggctggaggaggccggacccaaggagagcagtgaggaaggtaaggagggcaaaaccccctctaaggagaagaagaagaagaagaaaaaaggcaaagaggaagaagaaaaagctgccaagaagaagagcaaacacaagaagagcaaggacaaggaggagggcaaggaggagcggcgacggcggcagcagcggcccccgcgcagcagggagaggacggctgccgatgagctggaggctttcctggggggcggggccccgggcggccgccaccctgggggtggcgactacgaggagctctaggccggcgtgggcagtggccgccctggggcggggggcgtgcctgtcactgcctggggaggcatttgcctctgtaccatcgcctttgccgctgccccgtggctgccgtgtgcgcttctgagctggaagaggccgggcattggtggtccccaggctgggccctgcaggtgctgggccttcaggcccagtgtgagcctgctctgcaagaagggaggggacagctggcttcagccaggctcggtggacaccctggccctctcggggcagagccgccagtgtttctcagggatgtgactgaggcccaggagggacctgtgagggtctgtttacagaggctgggcaggggccgcttggctgtggggtgtgcgctgccccggcacctgcttgccctccgcgctcatctggggccgcagcatgcctatggttccgcttccggccgggagccctgaacacgggtgtgcagactcaccctaaagggcggcccaggccccacgctagaaggctggcgagaccgaaggcagcatgtgaggcctctcctgggagtgggggttgtgtttcccacagtggcctcagctgcgcccccgctcaggtgagcccgaaggcaggagccgggaggcactcctcccaaacactccactcagaccataaagcactcctgtttcactctgaaaaaaaaaaaaaaaaaa

SEQ ID NO: 12979 - DNA, 3148 bp, Homo sapiens
ggagagcgcgccacagaacgacttttacgcaggcgcagaagcctgtttcccctcacccgcggcttccaccctgcgcaggcgcaaaaagccgcgctggcaacctccgcagcggtcgcgcgcacccttcacccctcttgctgcttttgtctggcacaaccttctcaggccctccgcgaggccggccctttttttctttcactttccccacccggagagccaggtgccgagaactaggacctcgtccccttctctatcccttcccctgatccatctcgtctctgttctccttcccttttccgttcccgaagccggaaggagccgaggtacccacggaaaaagtcgaagctgtccccggagagtgaggccttcacgaagcggtggcggaaggagccgaagttctctgatcggaggcgtgagcaagtggcatctccggaaagagccgaaacacggactcgagcttaatcccaggaggggcccgagggcgagatccggaaatctccggaaagagccgaaggccgggacggttaggattgtcggaagtggccgattgcttggacagggccggcggagaagatcggagcaagtccgtggaagaagccaaagactgggacggattgaattgttggaagaacccgaactcgcagaggggactgggcgcagtggcacacgaggacacacggaaacctccgaacgttgaggagataatctcggaaaagttacggaaacctgggaagtcggcgaaaccctacgttcgggtgttttcggaagcagccgaagcggccgcctgcttcgccttcgtccagtatccggagatagccgaggcgcttcggagccaggctcggggggaggggcaagctcgcgggcgggcgggcgggtgagggggcggagcccgggcggggcggggagggctgccggaggcttgattaggtaggaggtggcgaagcgccggcggcggccggaagtagccgaagccagcggcggaagtagccgaagcggctggagcgggcggcaaggcgaggcgaaagctgcacagggccctacgcggccgcctcagcatgtcggacttcgacgagttcgagcggcagctcaacgagaataaacaagagcgggacaaggagaaccggcatcggaagcgcagccacagccgctctcggagccgggaccgcaaacgccggagccggagccgcgaccggcgcaaccgggaccagcggagcgcctcccgggacaggcgacgacgcagcaaacctttgaccagaggcgctaaagaggagcacggtggactgattcgttccccccgccacgagaagaagaagaaggtccgtaaatactgggacgtgccacccccaggctttgagcacatcaccccaatgcagtacaaggccatgcaagctgcgggtcagattccagccactgctcttctccccaccatgacccctgacggtctggctgtgaccccaacgccggtgcccgtggtcgggagccagatgaccagacaagcccggcgcctctacgtgggcaacatcccctttggcatcactgaggaggccatgatggatttcttcaacgcccagatgcgcctgggggggctgacccaggcccctggcaacccagtgttggctgtgcagattaaccaggacaagaattttgcctttttggagttccgctcagtggacgagactacccaggctatggcctttgatggcatcatcttccagggccagtcactaaagatccgcaggcctcacgactaccagccgcttcctggcatgtcagagaacccctccgtctatgtgcctggggttgtgtccactgtggtccccgactctgcccacaagctgttcatcgggggcttacccaactacctgaacgatgaccaggtcaaagagctgctgacatcctttgggcccctcaaggccttcaacctggtcaaggacagtgccacggggctctccaagggctacgccttctgtgagtacgtggacatcaacgtcacggatcaggccattgcggggctgaacggcatgcagctgggggataagaagctgctggtccagagggcgagtgtgggagccaagaatgccacgctggtgagccccccgagcaccatcaatcagacgcctgtgaccctgcaagtgccgggcttgatgagctcccaggtgcagatgggcggccacccgactgaggtcctgtgcctcatgaacatggtgctgcctgaggagctgctggacgacgaggagtatgaggagatcgtggaggatgtgcgggacgagtgcagcaagtacgggcttgtcaagtccatcgagatcccccggcctgtggacggcgtcgaggtgcccggctgcggaaagatctttgtggagttcacctctgtgtttgactgccagaaagccatgcagggcctgacgggccgcaagttcgccaacagagtggttgtcacaaaatactgtgaccccgactcttatcaccgccgggacttctggtagaggcggctgggggagggtgggggcagggctggctgggggcttctccccactcccgccccccccttatccccctctgaagacgatgggcagaggagtgacagccgcagacacacgacagccggcagcaactggaatggcagcaattaagggtggggggcgggggttggggggttggggggttagggcagggaggggactggggaagtgcgcacacagcccacacagacaacacgcacccacacagacacagagggaaggggttgggatggggacagggtgcacagcagggcggggtaggaccccagcccctcccaaaacagcctctccttctcccatagacccctttcttctccccttccccacggtaggaacatagcgtgtttatattttatggccaaactattttgaattttgttgtccggccctcagtgccctgccctctcccttaccaggaccacagctctgttccttcggcctctggtcctctctggtcccctcctgggtttcttacgtagttgatttttcctctttagtctcccccgacctgcgcccagccccgtggcccctgcccctctcctactctctgtggcagtttcatatttgctaagacgaatttgctcattaaacattttgttgtattttactttaaaaaaaaaaaaaaaaaa

SEQ ID NO: 12980 - DNA, 7002 bp, Homo sapiens
ttaaataagtagggattgtttaaaaaaaaagctgtaatatgttatctgggggtggatgatcctggtgttagttaaagctctcagtgatgtctgtgctgggacttccgggttcctgttggacttttcctcccaaacttcaccaggaactgacaatggcgaagcccttcccgaatccatcccatcagctcctgggacactgcctcatttcatagaggagccagatgatgcttatattatcaagagcaaccctattgcactcaggtgcaaagcgaggccagccatgcagatattcttcaaatgcaacggcgagtgggtccatcagaacgagcacgtctctgaagagactctggacgagagctcaggtttgaaggtccgcgaagtgttcatcaatgttactaggcaacaggtggaggacttccatgggcccgaggactattggtgccagtgtgtggcgtggagccacctgggtacctccaagagcaggaaggcctctgtgcgcatagcctatttacggaaaaactttgaacaagacccacaaggaagggaagttcccattgaaggcatgattgtactgcactgccgcccaccagagggagtccctgctgccgaggtggaatggctgaaaaatgaagagcccattgactctgaacaagacgagaacattgacaccagggctgaccataacctgatcatcaggcaggcacggctctcggactcaggaaattacacctgcatggcagccaacatcgtggctaagaggagaagcctgtcggccactgttgtggtctacgtgaatggaggctggtcttcctggacagagtggtcagcctgcaatgttcgctgtggtagaggatggcagaaacgttcccggacctgcaccaacccagctcctctcaatggtggggccttttgtgagggaatgtcagtgcagaaaataacctgcacttctctttgtcctgtggatgggagctgggaagtgtggagcgaatggtccgtctgcagtccagagtgtgaacatttgcggatccgggagtgcacagcaccacccccgagaaatgggggcaaattctgtgaaggtctaagccaggaatctgaaaactgcacagatggtctttgcatcctagataaaaaacctcttcatgaaataaaaccccaaagcattgagaatgccagcgacattgctttgtactcgggcttgggtgctgccgtcgtggccgttgcagtcctggtcattggtgtcaccctttacagacggagccagagtgactatggcgtggacgtcattgactcttctgcattgacaggtggcttccagaccttcaacttcaaaacagtccgtcaaggtaactccctgctcctgaattctgccatgcagccagatctgacagtgagccggacatacagcggacccatctgtctgcaggaccctctggacaaggagctcatgacagagtcctcactctttaaccctttgtcggacatcaaagtgaaagtccagagctcgttcatggtttccctgggagtgtctgagagagctgagtaccacggcaagaatcattccaggacttttccccatggaaacaaccacagctttagtacaatgcatcccagaaataaaatgccctacatccaaaatctgtcatcactccccacaaggacagaactgaggacaactggtgtctttggccatttaggggggcgcttagtaatgccaaatacaggggtgagcttactcataccacacggtgccatcccagaggagaattcttgggagatttatatgtccatcaaccaaggtgaacccagcctccagtcagatggctctgaggtgctcctgagtcctgaagtcacctgtggtcctccagacatgatcgtcaccactccctttgcattgaccatcccgcactgtgcagatgtcagttctgagcattggaatatccatttaaagaagaggacacagcagggcaaatgggaggaagtgatgtcagtggaagatgaatctacatcctgttactgccttttggacccctttgcgtgtcatgtgctcctggacagctttgggacctatgcgctcactggagagccaatcacagactgtgccgtgaagcaactgaaggtggcggtttttggctgcatgtcctgtaactccctggattacaacttgagagtttactgtgtggacaataccccttgtgcatttcaggaagtggtttcagatgaaaggcatcaaggtggacagctcctggaagaaccaaaattgctgcatttcaaagggaatacctttagtcttcagatttctgtccttgatattcccccattcctctggagaattaaaccattcactgcctgccaggaagtcccgttctcccgcgtgtggtgcagtaaccggcagcccctgcactgtgccttctccctggagcgttatacgcccactaccacccagctgtcctgcaaaatctgcattcggcagctcaaaggccatgaacagatcctccaagtgcagacatcaatcctagagagtgaacgagaaaccatcactttcttcgcacaagaggacagcactttccctgcacagactggccccaaagccttcaaaattccctactccatcagacagcggatttgtgctacatttgatacccccaatgccaaaggcaaggactggcagatgttagcacagaaaaacagcatcaacaggaatttatcttatttcgctacacaaagtagcccatctgctgtcattttgaacctgtgggaagctcgtcatcagcatgatggtgatcttgactccctggcctgtgcccttgaagagattgggaggacacacacgaaactctcaaacatttcagaatcccagcttgatgaagccgacttcaactacagcaggcaaaatggactctagtccacttcctcccatgagacagagtgatggccagcttggggacatttgctttaaatgggaaagaggccgctttctgcccagtggcgttgggggaattcagccttcatttataatcagtgagattcccctgttgaagaaactaaattttatataggtaaaacatgttaatagggaagagtacaagctctcttacatataagagggctctactatctccttggaatccacatttgggttaactcctcagatttggagtggcaaggataaaagtgagggcagaagtagctgtgggaaaagatgagctatgataatgctgggaaggcagagattgattaagtgcatgctttgaaataggtttttaatgatgtgccccaaagggccagctgattctggtactagattgtcagagttttctaccaactggcatctgtgatgtcagagatcattgtaaaaatggcttttagacgtgaaacagggttgccaacccatttgtatgacttcaacaacgtcaaggagggcatttagaatttagaatctgagcacatcacaccagcaccagctccctgtctcttctagccacttaatggagacacaatggagaggtaagacagaccacaaactagttcttatagtgtactccaccttttacttttttcctgagacaaatctacccttattctttcttcctcttccttaccccttgcagtagggaggtatcaaggagcataattaaacttgtcaatacggaaagttgttttttctaacacaacaaagtgggaccatctctattcccatctaagccactcaaattgctgagtgctattagaacacagcttattacatggatatggggacaggagagattaaagcaggttcaaaaacacatgaactgcagatgccataggcctcaaatcagctgtaattctaggagacacgtgttgatctagttatctaacattgttgttataagaaaatgagtttactgcatttttcaatccagattcttgaaattgtctaacatgtgggtactgtgtcatcacaaaatctctcagtaaggctatatgtgatcctcattttgcctcttgggaaattagcagatagtctttgctctaaatgatatctgagtaaatagacttgaggaatcctctaccacagtgtccctgaaaccacatgcatcattcaggaagccttcaccctgtgactattcagcctccctgaatatgctttctctatagaaccactaacatatggctattgctctatgattttttttttttacattaggaggcagtgatattgtggaagattgaaatccacagataattcatgaccctcatcttatcactttactccatctttttatcctattaaattatttttgacaagatgtcctggtagactaaaggtgaacagatttgctcttgctcatcttctggtggatattttaacttgctattcacaatcaggacaaccaaagtcaaggacccagatgaaccacaaggcagctagtcagctacttagaggttggttacattcgaataaaaagtagtcagggaatgggggaggtggggagttggggagtacttggcagttgggatatgatccatttttttaaacaagttttttgtagatcccttgtaaaataataataataatgttgtgaatctccatgccaagtgaaaaaggcctaaagatgagttgaatttgtgataccatgggtaaggcatggaagaactcttgaatgtgttggccattttctctaactaacatgtggtatgtatggtcccctatattagatagaagtctttgctacatgtaattcaaaagcatctcgcttttctcaggaaccaaaggcttatgatgtaggacaaagaaatcatcttagaactgtcaagcatattttcacaataccatgtcaagatcaggaaaacacccttttgctagtgtgcttaacttatttatttcttctaggaaacaatagataaacagcatgaaaatgtaaatcatctggcatcactgatagaatttctgaaagagaaagagaagtagatggtcaaccagtcactagttggttggcatgaggtggtgtgcagaggaaagctgcattcactattgagtaaaaacttgtagaaagcacattatagagcttatgttggaatccatcttggaggatttttgttttaaactgtctttagcattttccctcttcccttctaatgggcattataattgtttcatctactctgtgaatctacataggtctttttttttagatgtttgatacattttaagtatttttaaatagatgaaaattctaaatgattttccctcaaatctatctagattattttaagatgagacaagattattgtcaatccctgaatgtctggagttacctcccatggatttttttttcctttggcctgggttttataaacaacttgaacatcatatcatataggataacaaaggaggaagttaacttaattcacctcagacttcagcctaagattcaatcaaattcatccttcagcctgtcttgtttcttctttatgtttcttttacttattgctgctaggatcctacataggatttctatagaaatgtatgaaattctgtggtcactgcatgtcaggattgcacagtatgttacaatacaatttcaaagagaacccacatttgtgagatttacagaccaaggtgtggtggaggaggtagaattgcagatcagataaaaagtgagcttacacttgaacttagttattcactgtgacctaaatttagtcctattgtaatatgtgcctgtcacaacacaaatacccctcttgaaagagatttactcatctatccaagcacttaatttggaaattttattgtcctattgcaaaatgaaacaaaattaaaagtggcctcgagtacttggtaagttacttaaaatttttacaaaaatatcccactcaatgccaaatctttcagtcctcaaaggcatttaagtccaatagtcatgctttaaatatggctttaaattatgccaccaaaatggtgcacttcacagattcaccagactgtagcatcataaagttaatttacagtttttacaacattgcttctacattcttactggtttacattaaaatcctttaagccaaaaggaagcttgctctatggatttaaatgcaaacttcatttaccagtgcaggaagtctcataaaactcagatgtactcccacaaaaattttattggcctttttgtaagagatgaaaaagaattgacacagttctctttaaagagaagaacttttttattattatttttatctccaactgcaggtggtgtcttttgccaaggtctctgtatttttctttcagttgtctttgggaggggatgttaagtcaaatcactaaaacagggttctctttggattaaaagttctggatttattgcaactattttccttgagaaacattctcagcatcaggattgataaacaaatgtagatgattaaaataggataattggttttagataatatcttctactgccaaacttctggcaaatttacctgtgaatttcaaaatgttataaaatctcttgatatgcttttgtttttccttttagccattttctcttcaatttcttagtccctctgccctctgtaaatgtgttgagtgatatagctatcagatgtattgaaggcaaagttctcgcagaggtctctgttccagctctgtaaaggtcacaggaatcgtgaaggagctgagaaatcttcctctccggcccactgtctgtggcccattgtcattgtttcctcatgaaacattgcagagtttgaatcctcagtaactctcattgactggattagaggtgatggccacagcaaatgggagagcaaaatgttggcctacagagaatgacacaattttattcgcctttggtgttagttgccatagtgctgtatttgaaaatcgatgctttagccaaaagctgaatgaccaccgtttccgtagtttccactgttttgtctgcatagaattttcctgaactacaagcaaaaatgtattttgtccaatgtcacaaaagtgaaaatgttactaatctt

SEQ ID NO: 12981 - DNA, 4759 bp, Homo sapiens
tagttattaaagttcctatgcagctccgcctcgcgtccggcctcatttcctcggaaaatccctgctttccccgctcgccacgccctcctcctacccggctttaaagctagtgaggcacagcctgcggggaacgtagctagctgcaagcagaggccggcatgaccaccgagcagcgacgcagcctgcaagccttccaggattatatccggaagaccctggaccctacctacatcctgagctacatggccccctggtttagggaggaagaggtgcagtatattcaggctgagaaaaacaacaagggcccaatggaggctgccacactttttctcaagttcctgttggagctccaggaggaaggctggttccgtggctttttggatgccctagaccatgcaggttattctggactttatgaagccattgaaagttgggatttcaaaaaaattgaaaagttggaggagtatagattacttttaaaacgtttacaaccagaatttaaaaccagaattatcccaaccgatatcatttctgatctgtctgaatgtttaattaatcaggaatgtgaagaaattctacagatttgctctactaaggggatgatggcaggtgcagagaaattggtggaatgccttctcagatcagacaaggaaaactggcccaaaactttgaaacttgctttggagaaagaaaggaacaagttcagtgaactgtggattgtagagaaaggtataaaagatgttgaaacagaagatcttgaggataagatggaaacttctgacatacagattttctaccaagaagatccagaatgccagaatcttagtgagaattcatgtccaccttcagaagtgtctgatacaaacttgtacagcccatttaaaccaagaaattaccaattagagcttgctttgcctgctatgaaaggaaaaaacacaataatatgtgctcctacaggttgtggaaaaacctttgtttcactgcttatatgtgaacatcatcttaaaaaattcccacaaggacaaaaggggaaagttgtcttttttgcgaatcagatcccagtgtatgaacagcagaaatctgtattctcaaaatactttgaaagacatgggtatagagttacaggcatttctggagcaacagctgagaatgtcccagtggaacagattgttgagaacaatgacatcatcattttaactccacagattcttgtgaacaaccttaaaaagggaacgattccatcactatccatctttactttgatgatatttgatgaatgccacaacactagtaaacaacacccgtacaatatgatcatgtttaattatctagatcagaaacttggaggatcttcaggcccactgccccaggtcattgggctgactgcctcggttggtgttggggatgccaaaaacacagatgaagccttggattatatctgcaagctgtgtgcttctcttgatgcgtcagtgatagcaacagtcaaacacaatctggaggaactggagcaagttgtttataagccccagaagtttttcaggaaagtggaatcacggattagcgacaaatttaaatacatcatagctcagctgatgagggacacagagagtctggcaaagagaatctgcaaagacctcgaaaacttatctcaaattcaaaatagggaatttggaacacagaaatatgaacaatggattgttacagttcagaaagcatgcatggtgttccagatgccagacaaagatgaagagagcaggatttgtaaagccctgtttttatacacttcacatttgcggaaatataatgatgccctcattatcagtgagcatgcacgaatgaaagatgctctggattacttgaaagacttcttcagcaatgtccgagcagcaggattcgatgagattgagcaagatcttactcagagatttgaagaaaagctgcaggaactagaaagtgtttccagggatcccagcaatgagaatcctaaacttgaagacctctgcttcatcttacaagaagagtaccacttaaacccagagacaataacaattctctttgtgaaaaccagagcacttgtggacgctttaaaaaattggattgaaggaaatcctaaactcagttttctaaaacctggcatattgactggacgtggcaaaacaaatcagaacacaggaatgaccctcccggcacagaagtgtatattggatgcattcaaagccagtggagatcacaatattctgattgccacctcagttgctgatgaaggcattgacattgcacagtgcaatcttgtcatcctttatgagtatgtgggcaatgtcatcaaaatgatccaaaccagaggcagaggaagagcaagaggtagcaagtgcttccttctgactagtaatgctggtgtaattgaaaaagaacaaataaacatgtacaaagaaaaaatgatgaatgactctattttacgccttcagacatgggacgaagcagtatttagggaaaagattctgcatatacagactcatgaaaaattcatcagagatagtcaagaaaaaccaaaacctgtacctgataaggaaaataaaaaactgctctgcagaaagtgcaaagccttggcatgttacacagctgacgtaagagtgatagaggaatgccattacactgtgcttggagatgcttttaaggaatgctttgtgagtagaccacatcccaagccaaagcagttttcaagttttgaaaaaagagcaaagatattctgtgcccgacagaactgcagccatgactggggaatccatgtgaagtacaagacatttgagattccagttataaaaattgaaagttttgtggtggaggatattgcaactggagttcagacactgtactcgaagtggaaggactttcattttgagaagataccatttgatccagcagaaatgtccaaatgatatcaggtcctcaatcttcagctacagggaatgagtaactttgagtggagaagaaacaaacatagtgggtataatcatggatcgcttgtacccctgtgaaaatatattttttaaaaatatctttagcagtttgtactatattatatatgcaaagcacaaatgagtgaatcacagcactgagtattttgtaggccaacagagctcatagtacttgggaaaaattaaaaagcctcatttctagccttctttttagagtcaactgccaacaaacacacagtaatcactctgtacacactgggatagatgaatgaatggaatgttgggaatttttatctccctttgtctccttaacctactgtaaactggcttttgcccttaacaatctactgaaattgttcttttgaaggttaccagtgactctggttgccaaatccactgggcacttcttaaccttctatttgacctctgcgcatttggccctgttgagcactcttcttgaagctctccctgggcttctctctcttctagttctattctagtctttttttattgagtcctcctctttgctgatcccttccaagggttcaatatatatacatgtatatactgtacatatgtatatgtaactaatatacatacatacaggtatgtatatgtaatggttatatgtactcatgttcctggtgtagcaacgtgtggtatggctacacagagaacatgagaacataaagccatttttatgcttactactaaaagctgtccactgtagagttgctgtatgtagcaatgtgtatccactctacagtggtcagcttttagtagagagcataaaaatgataaaatacttcttgaaaacttagtttactatacatcttgccctattaatatgttctcttaacgtgtgccattgttctctttgaccattttcctataatgatgttgatgttcaacacctggactgaatgtctgttctcagatcccttggatgttacagatgaggcagtctgactgtcctttctacttgaaagattagaatatgtatccaaatggcattcacgtgtcacttagcaaggtttgctgatgcttcaaagagcttagtttgcggtttcctggacgtggaaacaagtatctgagttccctggagatcaacgggatgaggtgttacagctgcctccctcttcatgcaatctggtgagcagtggtgcaggcggggagccagagaaacttgccagttatataacttctctttggcttttcttcatctgtaaaacaaggataatactgaactgtaagggttagtggagagtttttaattaaaagaatgtgtgaaaagtacatgacacagtagttgcttgataatagttactagtagtagtattcttactaagacccaatacaaatggattatttaaaccaagtttatgagttggttttttttcattttctatttgtattttattaagagtgtcttttcttatgtgattttttttaattgctatttgatatggtttggctatatgtccccacccaaatctcatcttgaattataatccccatgtgtcaagggagggacctgacgggaggtgattggatcacgggggcagttgtccccatgctgttcttgggatagtgagttagttctcatgagatctgatggttttataagtgtttgacaattcctcctttacacacactctctctctcatctgctgccatgtaagacttgcctgcttccccttctgccatgattgtaagtttcctgaggcctcctcagccatgtggaactgtgaatctattaagcctcttttctttataaatgaaaa

SEQ ID NO: 12982 - DNA, 3243 bp, Homo sapiens
gggcttcgtgttcctgggtgctgaccgtgcactccccgccgcccgaggacttagagctctggaagtagctctccagcttccttcgtactcgggggccggacttgtacacccgcacgaggagcggggacggcgggcgcagaagtgggccaccatatctggaaactacagtctatgctttgaagcgcaaaagggaataaacatttaaagactcccccggggacctggaggatggacttttccatggtggccggagcagcagcttacaatgaaaaatcaggtaggattacctcgctctcactcttgtttcagaaagtctttgctcagatctttcctcagtggagaaaggggaatacagaagaatgtctcccctacaagtgctcagagactggtgctcttggagaaaactatagttggcaaattcccattaaccacaatgacttcaaaattttaaaaaataatgagcgtcagctgtgtgaagtcctccagaataagtttggctgtatctctaccctggtctctccagttcaggaaggcaacagcaaatctctgcaagtgttcagaaaaatgctgactcctaggatagagttatcagtctggaaagatgacctcaccacacatgctgttgatgctgtggtgaatgcagccaatgaagatcttctgcatgggggaggcctggccctggccctggtaaaagctggtggatttgaaatccaagaagagagcaaacagtttgttgccagatatggtaaagtgtcagctggtgagatagctgtcacgggagcagggaggcttccctgcaaacagatcatccatgctgttgggcctcggtggatggaatgggataaacagggatgtactggaaagctgcagagggccattgtaagtattctgaattatgtcatctataaaaatactcacattaagacagtagcaattccagccttgagctctgggatttttcagttccctctgaatttgtgtacaaagactattgtagagactatccgggttagtttgcaagggaagccaatgatgagtaatttgaaagaaattcacctggtgagcaatgaggaccctactgttgctgcctttaaagctgcttcagaattcatcctagggaagagtgagctgggacaagaaaccaccccttctttcaatgcaatggtcgtgaacaacctgaccctccagattgtccagggccacattgaatggcagacggcagatgtaattgttaattctgtaaacccacatgatattacagttggacctgtggcaaagtcaattctacaacaagcaggagttgaaatgaaatcggaatttcttgccacaaaggctaaacagtttcaacggtcccagttggtactggtcacaaaaggatttaacttgttctgtaaatatatataccatgtactgtggcattcagaatttcctaaacctcagatattaaaacatgcaatgaaggagtgtttggaaaaatgcattgagcaaaatataacttccatttcctttcctgcccttgggactggaaacatggaaataaagaaggaaacagcagcagagattttgtttgatgaagttttaacatttgccaaagaccatgtaaaacaccagttaactgtaaaatttgtgatctttccaacagatttggagatatataaggctttcagttctgaaatggcaaagaggtccaagatgctgagtttgaacaattacagtgtcccccagtcaaccagagaggagaaaagagaaaatgggcttgaagctagatctcctgccatcaatctgatgggattcaacgtggaagagatgtgtgaggcccacgcatggatccaaagaatcctgagtctccagaaccaccacatcattgagaataatcatattctgtaccttgggagaaaggaacatgacattttgtctcagcttcagaaaacttcaagtgtctccatcacagaaattatcagcccaggaaggacagagttagagattgaaggagcccgggctgacctcattgaggtggttatgaacattgaagatatgctttgtaaagtacaggaggaaatggcaaggaaaaaggagcgaggcctttggcgctcgttaggacagtggactattcagcaacaaaaaacccaagacgaaatgaaagaaaatatcatatttctgaaatgtcctgtgcctccaactcaagagcttctagatcaaaagaaacagtttgaaaaatgtggtttgcaggttctaaaggtggagaagatagacaatgaggtccttatggctgcctttcaaagaaagaagaaaatgatggaagaaaaactgcacaggcaacctgtgagccataggctgtttcagcaagtcccataccagttctgcaatgtggtatgcagagttggctttcaaagaatgtactcgacaccttgcgatccaaaatacggagctggcatatacttcaccaagaacctcaaaaacctggcagagaaggccaagaaaatctctgctgcagataagctgatctatgtgtttgaggctgaagtactcacaggcttcttctgccagggacatccgttaaatattgttcccccaccactgagtcctggagctatagatggtcatgacagtgtggttgacaatgtctccagccctgaaacctttgttatttttagtggcatgcaggctatacctcagtatttgtggacatgcacccaggaatatgtacagtcacaagattactcatcaggaccaatgagaccctttgcacagcatccttggaggggattcgcaagtggcagccctgttgattaatctctacatcattttaacagctggtatggccttaccttgggtgaactaaccaaataatgaccatcgatggctcaaagagtggcttgaatatatcccatgggttatctgtatggactgactgggttattgaaaggactagccacatactagcatcttagtgcctttatctgtctttatgtcttggggttggggtaggtagataccaaatgaaacactttcaggaccttccttcctcttgcagttgttctttaatctcctttactagaggagataaatattttgcatataatgaagaaatttttctagtatataacgcaggccttttattttctaaaatgatgatagtataaaaatgttaggataacagaatgattttagattttccagagaatattataaagtgctttaggtatgaaaataaatcatctttgtctgattaaaaaaaaaaaa

SEQ ID NO: 12983 - DNA, 2033 bp, Homo sapiens
cagacatctgctcctcacatgaatgcactcacctcctagagaccaggctgccatcatgctctggaagcttgtggagaatgtcaagtacgaagatatctatgaggaccggcacgatggtgtcccgagccacagctcgcggctctcccagctgggctcggtgtcccaaggaccctactcgagcgccccgccgctgtcccacaccccgtcgtcggacttccagccgccctacttcccacccccctaccagccgctcccctaccaccagagccaggacccctactcccacgtcaacgacccctactccctgaacccactgcaccagccccagcaacatccctgggggcaacggcagcggcaagaagtgggttcggaagccggctctctcctgccccagcctcgggccgccttgccccagctctcgggccttgacccccggagggactaccactcggtccgccggccggacgtgctgctgcattcggcgcaccacggcctggacgcgggcatgggtgacagcctctcgctgcacggcctcggccatcccggaatggaagacgtccagtcagttgaagatgccaataacagcggcatgaatctattggaccagtctgtcattaaaaaagttccagttcctcccaaatcggtgacttctctaatgatgaataaagacggcttcctgggaggcatgtctgtcaacaccggcgaggtgttttgctccgtcccaggccgtttgtctctgctcagttcaacttcgaagtacaaagtaactgtgggagaagttcagagacggctgtcgccccctgaatgcctcaatgcatctctcctcggcggagtcctcagaagagccaaatcgaaaaatggggggagatctttgcgagaaaggctagaaaaaatcggtttgaatttacccgcgggcaggcgcaaagcagcaaatgtcacgttactcacctccctggtggaaggagaagctgttcacttagctagggattttgggtacatttgcgaaacggagtttcccgccaaagccgtctctgagtatttgaaccggcagcacacagacccgagtgacctgcactcccgaaagaatatgctgttggccaccaagcaactttgtaaagaatttacggatctactggcgcaggaccggacaccgatagggaacagccgacccagccccatcctggagccggggatccagagctgcctcacgcacttcagcctcatcacgcacggcttcggcgccccggccatttgcgccgcgctcacggccctgcagaactatctcaccgaggcgctcaaaggcatggacaagatgttcttgaacaacaccaccactaacaggcacacgtctggggaaggcccaggtagtaaaactggcgacaaggaggagaaacacaggaaatgaaaaatttttaaaaaaagaaggaaaaatgttttaaatacaaaaggaaaaacagacaaaaatttaattttagctttaaaatattggattggctttggaagaattatattaggtagaatacacatacaatcaaaatttaaaaaaaaaaagctaaataacttaaaaaaaaactgaggcgtacaacggagcaacaatatcggttctcagtgtctatttcaagatacatttggagacaaccgtccggattttccacttcggttctttcgagtttagtaatactgataataaaagaaaaccatgatttccccttccctttggaaaataaacataagactaaacatgagaaaaacgctaacttattggaagaaaatcggagaaacgttggtgtcaatgctttgagagctggttgactgagacgcacgaactttttaattttaaatatatttttaggaaactctcgcagtccccgccctccatctcacctcacccgtctcccaaccacccttttccatgttaccctcccttcctcacattgttacgggaatcttctgggatgaaaatgagtgtggttggaaaaaaaaaaaaaaaaaaaaaaaaaaaaaaaaaaaaaaaaaaaaaaaaaaaaaaaaaa

SEQ ID NO: 12984 - DNA, 1613 bp, Homo sapiens
aagctactcagataagaggctccaagaggacatttttggatgtgaaaaacaatgagaaggaggacaacacacatttacaatcgtcttaattttgtactcagaaaaaggatgtgaagacaatgcacagggaatacaatagtttcagatctgtgtacagtttccttttgcttcatctcctgcaacaatgtaatgaagacaccatgatatcattaacatttcacacaaaaggaaaatgaggctgaaatggtgtgggcaaggcccaggaatctggagcatccctaaccaagcagcagagcacctgggatagagaaagtgctcaagaatgttcacttactgattactacaatcaaaaaaagatacgacactaatttaccacattcttcttacttattttatgagatactattcttccaaggtggagaaagtggagaaagtagagtgacgcagctaagggagtaaatcgaccctcagccaacaagtggcaaaagcctgaagaaagtgatcaagatcactgatgaccccgcggcccatctccaagggggcgggtatcacaaccccgacgccacaccacgtatcattccgcaaaactcccgcgcctcccacgcagaactggcaagagggaaggcgagacagcagtgaacagctggtacgcagcacccacagcaccgcggcagcagctagtgccgactcccgcctagctcttttgactctgttcgcgggaagaatggggaaacagtaaggttgcggcgcctcccgcgagacgaggtacctgaggctggccccgcagtcccccgccgcaccagcaccggagcttcacaccccacttccggggtcaagtcaccgccgggaatcctgtgatcgcagaaaggtagtctcaggttccgcccctatccaagtcccgcctccactgcctctcgccctgtatctgtcaacttccgggacgccgcgcgtcactaagcagccaatctccacttccggactcatccagccccttctccacccctttcagagacagcgcgattgcgatttaggtttccgcgcatttaattggcgaagctggagcgctagtcttcgctgattggtgccgagaaatctgccccatagacacccgcggggcgcacagtttcagtcgtccgtgggtttcccgccagccgcagtcttggaccataatcatggtggacatgatggacttgcccaggtcgcgcatcaacgccggcatgctagctcaattcatcgacaagcctgtctgcttcgtagggaggctggaaaagattcatcccaccggaaaaatgtttattctttcagatggagaaggaaaaaatggaaccatcgagttgatggaaccccttgatgaagaaatctctggaattgtggaagtggttggaagagtaaccgccaaggccaccatcttgtgtacatcttatgtccagtttaaagaagatagccatccttttgatcttggactttacaatgaagctgtgaaaattatccatgacttccctcagttttatcctttagggattgtgcaacatgattgatcttgatggattttcatacgattgtaaatgagctatattaaagtctattaaaggaaaaaaaaaaaaaaaaaaaaa

SEQ ID NO: 12985 - DNA, 3685 bp, Homo sapiens
gcccggagccgccgaagcgcctcggtgcgttgcaccgccggaggctgggcagctcgcagcgctgctcggcgctggaccccacccggcaggcgcaggccacccacacccggctctgtgcggctgccccccgcagcattgcacggccgaccctcgcccgcccactgccaccggccgcgggactggctgggactggctcggccgagggcactgctcctcggtgcattgctgctcgggcgccgcagcccgcagccgccagcctcccccggccgtgcccctcccccgtggagccggctgtccgtcggcgcccactgcccggcggcagcggcggagccaggcagccccgcggcggccgagcgcgctcgcgcatcgggccctctggccttctttacctagggcagcccgcgccccggtgcgagggagcggtccttaccgagacccgcccggcccggcggtgcgatgagcttcttcggcttcgggcagagcgtggaggtggaaatccttctgaacgatgcagagagtaggaagcgggccgagcacaagacggaggacgggaagaaggagaaatatttcctcttctacgacggggagacggtctccgggaaggtgagccttgccctcaagaaccccaacaagcggctggagcaccagggcatcaagatcgagttcatcgggcagatcgaactctactacgatcgcgggaaccaccatgagtttgtgtccctggtgaaggacctggcccggcctggagagatcacccagtcgcaggccttcgactttgagtttacccacgtggagaagccgtatgagtcctacacagggcagaatgtgaagctacgctatttccttcgtgctaccatcagccgccgcctcaatgatgttgtcaaagagatggacattgtagttcacacactcagcacatacccagagctgaactcttccatcaagatggaggttgggattgaggactgtctgcacattgaatttgagtacaataaatccaaataccacttgaaagatgtcattgtagggaagatatacttcctgctggtgagaatcaaaatcaagcacatggagatagacatcatcaagcgagaaacgacgggtacaggccccaacgtgtaccatgagaatgacacgatagccaagtacgagatcatggacggggcaccagtgcgaggagagtccatcccgatccggctcttcctggccgggtatgagctcacgcccaccatgcgggacatcaacaagaagttctctgtgcgctattacctcaacctggtgctgatagacgaggaggagcggcgctacttcaagcagcaggaagtggtgttgtggcggaagggtgacatcgtacggaagagcatgtcccaccaggcggccatcgcctcacagcgctttgagggcaccacctccctgggtgaggtgcggacccccagccagctgtctgacaacaactgcaggcagtaggcccccagggccgagaagatgctgggcacccacccagcacccccatctaccaacaccagcggctgggggcgggggcggaccttgtgaggctcagttgacccgttacttgcaacctgaaaacaaatcatgtttttgacttaaattcttttctctggagaacccaaggggcttggggtgggaagcagtctctccttgggattctgcggccgatgtgggatagaagaggtagcatcctggaagccagcctctctggggaacatgagcccccttcctcggggggctgccttgcgtcttagaggagggagagcagagagcacgcatccttggctcctggctctctgagcttcctgatacaggatctgagcatgtccctgggattctgagctgccaacagggccctgggtagtcacatcttgtactcccctttgctgtcccggaggtagtggcaggagttgggccagcccccactaagtggcaggggaagactcacgattgggaagctacctctttgggaatcttggatgtggtgatctcaagttcccacaggccacctccttctggccactcactgctgggacccaggcacctcccttctccatcctctctggattgtcagtaatgtcctggaacagaagcctgtgggatggccttgggcacggagaagccctggggtcagtgtcgtgcacggatggcggcagtgttgaacccaggaggctgaacccggcccaccacggaagatgagtgcatggcaaccgcctgccttcacgtcgctccacttggtaaccccaaggtctgggctgttctaggtattgcttcacgtgccccagcaagcccttaacaagagggcctggttccctgaagaaccaatcccaggaaggggccttgatccctccgccttgctgagagtgaaccctcgtctctcctcaccctccatttcatttctgggaattggggcttagtttcgaacctttggcaaggctgttcttactaatgcccaagcccctttacccctctccctataggttacacaggggagaccagggcctcggcagaagactgctgccacacttccgaatcattctgcttgccaaataggtcatcttcaccagttgactgacccaagtttaggaccattggtatcgtgtgtttaaaaaacacatataaaaaaactcttgtgaatattcttgttatgctagagaggaaggtacttctccctctacggctctgcgctggggcctatggtagtaaagttgtttactgtcctttttctgcttcccctggaaatgacaggcattactctcccattggcctcccttccctttatagaaagaccaagcaggccccactggccaagaggtacggtatttggcagtctgagttctcagtaatttggaaagttaaggagttggttcctgtgtcacctttcagttagtgtgggaaaggaagacttctgttttcctgagatcagtgcagtctcaggcctttggcagggctcatggatcagagctgagactggagggagaggcatttcgggtagcctaggagggcgactggcggcagcagaaccgaggaaggcaaggttgtttcccccacgctgtgtcctgtgttcaggtgcgacacacaatcctcatgggaacaggatcacccatgcgctgcccttgatgatcaaggttggggcttaagtggataagggaggcaagttctgggttccttgccttttcagagcatgaggtcaggctctgtatccctccttttcctagctgatattctaactagaagcatttgtcaattcctttgcctcccaactgacaacacacgttcattttccaaccttcctaacatcttaaacctttcttctgggagaactagaagacagaatttgctttgattctctcaggcgctgtgcacaagccaggtcttctgttttctctttcttactctacccacattcttgccttctctatccaactgtgaaagtgaggggaggctcctgtccccctctcttaaggtccccaaacctgggagtgcataggtactaaatcaagcagtgcaacttgtaattaagcagctgcagtgtttacatgtttcttaatgtgtcatcttttcaatggctgtattaaaagaagaacgtttgttttaatggtctttctgattaaagaaagcccctgtggctttggaggcattgtgcccacggtccaccaaaaaaaaaaaaaaaaaa

SEQ ID NO: 12986 - DNA, 2707 bp, Homo sapiens
gagcggtcacgtgtgaggggcggcccgaggtcacgtgacggagcgccggagcggagggagccggggctgggagttctcctgagggaagaggagtggagtaggggggacgcggcggcggcgttgacaatgagttttcttggaggcttttttggtccaatttgtgagatcgatattgttcttaatgatggggaaaccaggaaaatggcagaaatgaaaactgaagatggcaaagtagaaaaacactatctcttctatgacggagaatccgtttcaggaaaggtaaacctagcctttaagcaacctggaaagaggctagaacaccaaggaattagaattgaatttgtaggtcaaattgaacttttcaatgacaagagtaatactcatgaatttgtaaacctagtgaaagaactagccttacctggagaactgactcagagcagaagttatgattttgaatttatgcaagttgaaaagccatatgaatcttacatcggtgccaatgtccgcttgaggtattttcttaaagtgacaatagtgagaagactgacagatttggtaaaagagtatgatcttattgttcaccagcttgccacctatcctgatgttaacaactctattaagatggaagtgggcattgaagattgtctacatatagaatttgaatataataaatcaaagtatcatttaaaggatgtgattgttggaaaaatttacttcttattagtaagaataaaaatacaacatatggagttacagctgatcaaaaaagagatcacaggaattggacccagtaccacaacagaaacagaaacaatcgccaaatatgaaataatggatggtgcaccagtaaaaggtgaatcaattccaataaggctatttttagcaggatatgacccaactccaacaatgagagatgtgaacaaaaaattttcagtaaggtactttttgaatttagtgcttgttgatgaggaagaccggaggtacttcaaacagcaggagataattttatggagaaaagctcctgaaaaactgaggaaacagagaacaaactttcaccagcgatttgaatctccagaatcacaggcatctgccgaacagcctgaaatgtgaactgaacaggagaaaaaaagaaaagcaaaaaactcctgtaacccttgagattaagttcagcaggttaaagatggttgcagctggagggggcggaaaaaggccaaaactccatatatgttagtcttcctttatcttacagcgcagcatttattttatgatataatgaaatgttcgttcatgtatatacatttttaaaagtgctttctttgaaacactggaactttgttaagctgcctttttttttttaacttcctactttgatgataagcactcagatatatatcagcgtaaacatgaaaaattttcatgtgagtaggctggtatttgtaattttgctttctttctgcataatgttgattataaatcctctcttttcaggctaatgattacctcttattctctacatgcaaaaaattaaatattttgtgttcaaataaaattagaaaacctgagtggcctcttgtgtcctgcagagatttaaaacatggcatctcaatatttttgagaactacatttgtttttaacatatgtgtttgagaaaagcatatggagtgtttcaccgcaggcacttctgagtaccattccatggcttccagaattttatcctctttgaggtcttctgtgctatgaatattagatttctttccccaagggattatgtggcaggtcattatggccttcttttttttggccatattaagtaacagttttgctatattccagtagtaccgttgtgtgttttctgcaatgtggagttgacttagcttggcattttagatttgttaaaactattttttccataaatactttgaaacatatttatatatttcaatttaaggaatctttttgccatgtgtatgcaaatattattttcttcatacattcattttcttttcaggggaaaattttgggatgggggactcaggaggacctgtgaagcatgtagttatctagatctgggtaatttcatgtttattaaactcgaactttggctagttaaactcatattgaaacttcatctagtctcttaattttttaacactaaattcaagtcatttgttttaagtctctaaaaaagaagattgcagtcatccattcatatgcatggggtctgatcgcaaatacactaaatgtggagtgtaggaaccaaaatgaaacctgctgtatggaaactactttcacttatggttcattggtttttgtaccaatattttttatgcacttcagtgcaagtcttgtcagttaaccttactttatgagtaagctaaataacccaaattacatttctttaaacctgttttactactatggcactttgataaaatggtcaggaaccaactttactggcaaaagggtccatgtaccaccatgtgctggagcatctgttctacatgtggatatctatgaatggtaatgttttccttcatgtaagtgcctattcagagtttcagaattttaaaatgccaaatattttcatggtcatttgcatgtagtaagccagaaaatattcaaagagattttgaaaaccaattgtatttaaccagcctcaaattgtgcaaccatgatgtataataaagaatttgaaacagaaaaaaaa

SEQ ID NO: 12987 - DNA, 2101 bp, Homo sapiens
ggatgagtctcaagatggacaaccgggatgttgcaggaaaggctaaccggtggtttggggttgctccccctaaatctggaaaaatgaacatgaacatccttcaccaggaagagctcatcgctcagaagaaacgggaaattgaagccaaaatggaacagaaagccaagcagaatcaggtggccagccctcagcccccacatcctggcgaaatcacaaatgcacacaactcttcctgcatttccaacaagtttgccaacgatggtagcttcttgcagcagtttctgaagttgcagaaggcacagaccagcacagacgccccgaccagtgcgcccagcgcccctcccagcacacccacccccagcgctgggaagaggtccctgctcatcagcaggcggacaggcctggggctggccagcctgccgggccctgtgaagagctactcccacgccaagcagctgcccgtggcgcaccgcccgagtgtcttccagtcccctgacgaggacgaggaggaggactatgagcagtggctggagatcaaagtttcacccccagagggagccgagactcggaaagtgatagagaaattggcccgctttgtggcagaaggaggccccgagttagaaaaagtagctatggaggactacaaggataacccagcatttgcatttttgcacgataagaatagcagggaattcctctactacaggaagaaggtggctgagataagaaaggaagcacagaagtcgcaggcagcctctcagaaagtttcacccccagaggacgaagaggtcaagaaccttgcagaaaagttggccaggttcatagcggacgggggtcccgaggtggaaaccattgccctccagaacaaccgtgagaaccaggcattcagctttctgtatgagcccaatagccaagggtacaagtactaccgacagaagctggaggagttccggaaagccaaggccagctccacaggcagcttcacagcacctgatcccggcctgaagcgcaagtcccctcctgaggccctgtcagggtccttacccccagccaccacctgccccgcctcgtccacgcctgcgcccactatcatccctgctccagctgcccccgggaagccagcctccgcagccaccgtgaagaggaagcggaagagccggtgggggcctgaagaggataaggtagagctcccacctgctgaactggtgcagagggacgtggatgcctctccctcgcctctgtcagttcaggacctcaaggggctcggctatgagaaggggaagcctgtgggtctagtgggcgtcacagagctttcagacgcccagaagaagcagctgaaggagcagcaggagatgcagcagatgtacgacatgatcatgcagcacaagcgggccatgcaggacatgcagctgctgtgggagaaggcagtccaacagcaccagcacggctatgacagtgatgaggaggtggacagcgagctgggcacctgggagcaccagctgcggcgcatggagatggataagaccagggaatgggccgagcagctgacaaagatgggccggggcaagcacttcatcggagacttcctgcctccagacgagctggaaaagtttatggagaccttcaaggccctgaaggagggccgtgagcctgactactcagagtacaaggagttcaagctgactgtggagaacatcggctaccagatgctgatgaagatgggctggaaggagggcgaggggctgggctcagagggccagggcatcaagaacccagtgaacaagggcaccaccacagtggacggcgctggcttcggcattgaccggccggcggagctctccaaggaggacgacgagtatgaggcgttccgcaagaggatgatgctggcctaccgcttccggcccaaccccctgaacaatcccagacggccttactactgagtgttctggaaatacatactttctgaatgaccaaccgtccctggactgtggaatgttccggcctgcatttctgcccaccccttccgttgtcacgagtgccgtgccgtgtaataaagtcccagtgctcatccaccaaaaaaaaaaaaaaaaaaaaaaaaaaa

SEQ ID NO: 12988 - DNA, 9717 bp, Homo sapiens
cagggagggacgcccccgccgacaggagaattggttcccgggcccgcggcgatgcccccccggtagctcgggcccgtggtcgggtgtttgtgagtgtttctatgtgggagaaggaggaggaggaggaagaagaagcaacgatttgtcttctcggctggtctccccccggctctacatgttccccgcactgaggagacggaagaggagccgtagccaccccccctcccggcccggattatagtctctcgccacagcggcctcggcctccccttggattcagacgccgattcgcccagtgtttgggaaatgggaagtaatgacagctggcacctgaactaagtacttttataggcaacaccattccagaaattcaggatgaatggggatatgccccatgtccccattactactcttgcggggattgctagtctcacagacctcctgaaccagctgcctcttccatctcctttacctgctacaactacaaagagccttctctttaatgcacgaatagcagaagaggtgaactgccttttggcttgtagggatgacaatttggtttcacagcttgtccatagcctcaaccaggtatcaacagatcacatagagttgaaagataaccttggcagtgatgacccagaaggtgacataccagtcttgttgcaggccgtcctggcaaggagtcctaatgttttcagggagaaaagcatgcagaacagatatgtacaaagtggaatgatgatgtctcagtataaactttctcagaattccatgcacagtagtcctgcatcttccaattatcaacaaaccactatctcacatagcccctccagccggtttgtgccaccacagacaagctctgggaacagatttatgccacagcaaaatagcccagtgcctagtccatacgccccacaaagccctgcaggatacatgccatattcccatccttcaagttacacaacacatccacagatgcaacaagcatcggtatcaagtcccattgttgcaggtggtttgagaaacatacatgataataaagtttctggtccgttgtctggcaattcagctaatcatcatgctgataatcctagacatggttcaagtgaggactacctacacatggtgcacaggctaagtagtgacgatggagattcttcaacaatgaggaatgctgcatcttttcccttgagatctccacagccagtatgctcccctgctggaagtgaaggaactcctaaaggctcaagaccacctttaatcctacaatctcagtctctaccttgttcatcacctcgagatgttccaccagatatcttgctagattctccagaaagaaaacaaaagaagcagaagaaaatgaaattaggcaaggatgaaaaagagcagagtgagaaagcggcaatgtatgatataattagttctccatccaaggactctactaaacttacattaagactttctcgtgtaaggtcttcagacatggaccagcaagaggatatgatttctggtgtggaaaatagcaatgtttcagaaaatgatattccttttaatgtgcagtacccaggacagacttcaaaaacacccattactccacaagatataaaccgcccactaaatgctgctcaatgtttgtcgcagcaagaacaaacagcattccttccagcaaatcaagtgcctgttttacaacagaacacttcagttgctgcaaaacaaccccagacttctgtggtacagaatcaacaacagatatcacaacagggacctatatatgatgaagtggaattggatgcattggctgaaattgagcgaatagagagagaatcagctattgaaagggagcgcttctcaaaagaagttcaagataaagataagcctttgaaaaaaagaaaacaagattcttacccacaggaggctgggggtgctacaggaggtaatagaccagcttctcaggagacgggttctacgggaaatgggtcaaggccagcattaatggttagcattgatcttcatcaggcaggaagagtggactctcaggcttctataactcaggattcagactccataaaaaagcctgaagaaatcaaacaatgtaatgatgcacctgtttctgttcttcaggaagatattgttggaagtcttaaatctacaccagaaaaccatcctgagacacctaaaaaaaagtctgatcctgagctttcaaagagtgaaatgaaacaaagtgaaagtagattagcagaatctaaaccaaatgaaaaccgattggtggagacaaaatcaagtgaaaataagttagaaactaaagttgagacccaaacagaagaacttaaacagaatgagagcagaacaactgaatgcaaacaaaacgagagcaccatagttgagcctaaacaaaatgaaaatagactgtctgacacaaaaccaaatgacaacaaacaaaataatggcagatcagaaacaacaaaatcaaggcctgaaaccccaaagcaaaagggtgaaagccggcctgagactccaaaacaaaagagtgatgggcatcctgaaaccccaaaacagaagggtgatggaaggcctgaaactccaaagcaaaaaggtgagagccgccctgaaactccaaagcaaaaaaatgaagggcgacctgaaacaccaaaacacaggcatgacaataggagggattctggaaagccatctacagagaaaaaacctgaagtgtctaaacataaacaagatactaaatctgactcacctcggttaaaatcagaacgagctgaagccttaaagcagagacctgatgggcgatctgtttctgagtcactaagacgtgaccatgataataaacaaaaatcagatgacaggggtgaatcagagcgacatcgaggggatcagtctagggttcgaagaccagaaacattgagatcctctagtagaaatgaacatggcattaaatctgatagttcaaaaactgataaactagaacgaaaacacaggcatgaatcaggggactcaagggaaagaccatcttctggggaacaaaaatcaagacctgacagtcctcgtgttaaacaaggagattctaataaatcaagatctgataaacttggttttaaatcaccaactagtaaagatgacaaaaggacagagggtaacaagagtaaagtagacactaataaagcacaccctgacaataaggcagaatttccaagttatttgttggggggcaggtctggtgcgttgaaaaattttgtcattccgaaaatcaagagggataaagatggcaatgttactcaggagacaaagaaaatggaaatgaaaggagagccgaaagacaaagtagaaaaaataggattagttgaagatctaaataaaggagctaagcctgtagttgtgctacaaaaactgtctttggatgatgttcagaaacttattaaagatagagaggacaaatcaagaagttcccttaaacctatcaagaataaaccatcaaagtcaaataaaggtagtatagatcaatcagtgttaaaagaattaccccctgaactcctggcagaaattgagtccaccatgccactttgtgaacgtgtgaaaatgaacaaacgcaagcgtagcacagttaatgaaaagccaaaatatgctgaaatcagttcagatgaagataatgatagtgatgaagcttttgaatcctctaggaaacgacataaaaaagatgatgataaagcttgggaatatgaagagcgtgacagaagaagctctggggatcataggagaagtggccactctcatgaaggaagaaggagttcaggtggtggtcgttatcgaaaccgaagtccgtcagattctgacatggaagattattctcctcctcccagccttagtgaggttgctaggaaaatgaagaaaaaagaaaaacagaagaaaaggaaagcatatgaaccaaaactaacacctgaagaaatgatggactcttcaacttttaagagattcacagcctcaatagagaatattttggataatttggaagatatggattttactgcgtttggtgatgatgatgaaattcctcaggaactgctcttaggaaaacatcagcttaatgaacttggcagtgaatctgctaaaataaaagcaatgggtataatggataagctttcaactgacaaaactgtgaaagtcttaaatatcttggagaagaatattcaggatgggtcaaagctttccactttgttaaatcataataacgatactgaagaagaagaaaggttatggagagaccttattatggagagagttacaaaatcagcggatgcttgtcttacaactatcaacattatgacatcccctaacatgccaaaagctgtgtacattgaggatgtaattgaaagagttatacagtacactaaatttcatttgcagaatacactttatcctcagtatgatcctgtttacagattagatcctcatggaggaggcttattaagttcaaaagcaaaacgggctaaatgttctacccataagcagagagtaatagtaatgctttataacaaagtttgtgacattgttagcagcttatcagaattgctagagatacaacttcttacagacacaacaattcttcaggtttcatctatgggaataacaccattttttgtggaaaatgtcagtgaactacagttgtgtgccattaagttagtcactgcagtattctcaagatatgaaaaacataggcagttaattttggaagaaatttttacttcacttgcaagattaccaaccagcaagaggagtttaaggaacttcaggttaaacagtagtgatatggatggagaacctatgtatattcagatggttacagcactggttttacaacttattcagtgtgtggtacacttaccatcatcagagaaggactctaatgcagaagaagattcaaataaaaaaattgaccaggatgttgtcattactaactcttatgaaacagctatgcgaacagcccaaaacttcctctccatcttccttaaaaaatgtggtagtaagcaaggtgaagaagattacagaccactgtttgaaaattttgttcaagaccttctttcaacagtcaataagcctgaatggccagctgctgaactactccttagtttgttagggagactgttggttcatcagttcagtaacaagtcaacagagatggctttaagagtggcatctcttgattaccttggaactgttgctgcacggctaagaaaagatgctgttacaagcaaaatggatcaaggatctatagaacgcattttaaaacaggtttcaggaggggaagatgaaatccaacaattacaaaaagcattgcttgattacttggatgaaaacactgagactgatccttcactagtgttttctcgtaaattctatatagcccagtggtttcgagacacaactctggaaacagaaaaagcaatgaaatcacaaaaagatgaagaatcatctgaaggaacacatcatgcaaaggaaattgagacaactggccaaattatgcatcgagctgaaaaccgaaaaaagtttcttagaagcattatcaaaaccacaccttctcagtttagcacattaaagatgaactctgatactgtggactatgatgatgcttgcttgattgttcgatacttggcctccatgaggccgtttgcccagagctttgatatttatttgacacagatcctacgagttcttggtgaaaatgcaattgctgttcgaacaaaagccatgaagtgtttgtctgaggttgttgctgtagaccccagtattctagcaaggcttgatatgcaacgaggtgttcatggacgattgatggataattcgactagtgtccgagaagcagcagtagaattactaggtcgatttgtcctttgtcgacctcagcttgctgaacagtattatgatatgctgattgaaagaatattggatactggtatcagtgtcaggaaaagagtaataaagattctcagagacatttgtattgaacaaccaacatttccaaaaatcacagaaatgtgtgtaaaaatgattcgcagagtcaatgatgaagagggcattaagaaattagtaaatgaaacattccagaaactctggtttactccaactccacacaatgacaaagaagcaatgacaaggaaaattttaaacattaccgatgtggttgcagcatgcagagatactggatatgactggtttgagcaactgcttcaaaacttgttgaagtccgaagaggattcctcatataaacctgtgaagaaagcttgtactcaacttgttgataacctagttgagcacattcttaaatatgaggaatctctagctgactctgacaataaaggtgtgaattctggaagattggtagcttgcataaccactttgttcttattcagcaaaataagaccccagctcatggttaaacatgcaatgactatgcaaccataccttaccactaaatgtagtacgcaaaatgatttcatggttatctgcaatgttgcaaaaatcctagagctagttgtaccactgatggagcatccaagtgaaacttttcttgccactattgaggaagatctaatgaagctcatcatcaaatatggcatgactgtagtgcaacattgtgtgagctgtcttggagctgttgtaaataaagtgacacaaaattttaaatttgtgtgggcttgtttcaatagatactatggtgccatttcaaaattaaaaagtcaacaccaagaggacccaaataacacttcacttctaacaaacaaaccagcacttcttagatcccttttcaccgttggagcactatgtcggcattttgattttgatctggaagattttaaaggcaacagcaaggttaacataaaagataaagtacttgaactattgatgtattttacaaaacactcagatgaagaagtacaaacaaaagctatcattggtctaggatttgcctttattcagcatccaagtctaatgttcgagcaagaagtgaagaatctatataataatattttatctgataagaactcctcagtcaatttaaaaatacaagtgttaaaaaacctccagacctacctacaagaagaagatacacgtatgcagcaggcagatagagactggaagaaagttgcaaaacaggaagacttaaaagaaatgggtgatgtttcctcagggatgagtagttccatcatgcagctttatctcaaacaggtgcttgaggcattttttcacacccagtcaagtgtacgccactttgccctaaatgtcattgcattgactctaaatcaaggtcttattcatccagttcagtgtgtgccatatttaattgctatgggcacagacccagaacctgctatgcggaacaaggctgatcagcaacttgtggaaatagacaaaaaatatgctggattcattcatatgaaagcagtggctggtatgaagatgtcttaccaggtacaacaggcaatcaacacatgcctaaaagatcctgtaaggggtttcagacaagacgagtcctctagcgctttgtgttcacacctttactccatgatccgtggaaaccgccaacacagacgagcctttcttatttctttactcaacctctttgatgacacagcaaaaacagacgtgactatgctcttgtatatagcagacaatctagcctgttttccataccagacacaggaagagccgttgtttataatgcatcatatagacattacactctcagtttctggtagtaacctactgcagtcattcaaggagtctatggtaaaggacaaaaggaaagagagaaaatcatcacctagtaaggaaaatgagtcaagcgacagtgaagaagaagtttccaggcctcggaagtcacggaaacgtgtagattcagattcagattcagattcagaagacgatataaattcagtgatgaaatgtttgccagaaaattcagctcctttaatcgaatttgcaaatgtgtcccagggtattttattacttctcatgttaaaacaacatttgaagaatctttgtggattttctgatagtaaaattcagaagtactctccatctgaatctgcaaaagtatatgataaagcgataaaccgaaaaacaggagttcattttcatccaaaacaaacactggacttcctgcggagtgacatggctaattccaaaatcacagaagaggtgaaaaggagtatagtaaaacagtatctagatttcaaacttctcatggaacatctggaccctgatgaagaagaagaagaaggggaggtttcagctagcacaaatgctcggaacaaagcaattacctcactgcttggaggaggcagccctaaaaataatacagcagcagagacagaagatgatgaaagtgatggggaggatagaggaggaggcacttcagggtcattgagaaggtcaaaacgaaattcagactctacggagttggcagcacagatgaatgaaagtgttgacgtcatggatgtcatcgctatttgctgtccaaagtacaaagatcgaccacaaattgcaagagtagtgcagaaaaccagcagtggcttcagtgttcagtggatggcaggctcctacagtggctcctggactgaggctaagcgccgtgatggccgcaaactggtgccttgggtagacactattaaagagtcagacattatttacaaaaaaattgctctaacgagtgctaataagctgactaataaagttgttcagactttacgatccctgtatgccgccaaggatgggacttccagctaatgaatttgtacatgcagccaaatttacaggaatttttttaaaaggcagaaaaacttgaaataccaacattctggcaaaaaaaaatcagttttatgaagagtaagtggaacctgggatgcaggaacaaaagaaggaaatgttgggcaaacatttttgtgggagctcccttcgctgttgtgcagcagaaacagattctcagttcatttttactcccactgtattatagtttaacaaaaattgtttatatcttggaaaaaaaactttctgtttaaaaaaaataaacaagtgaatgttggaaattagtctgttaatgttcttaataaagtgttcttggagtttaacctagcagcggatggctttctttagcttagcccagtttccagggaagcattgttttttccaggctgtaaaatggcagaatctcctggatatataatttattctgttgaaaaaaaaaaaagcatgcagtatctatgacctatctgcagaaggagtttttgtaaatgtagattttgatgtattaggtcaccctgaaaacaatacaagaaaagggatccccaggtaatctggtggagcgaatactgcaataaatttttttacttctctttgttacttgtctgtttccatttgaatttcttattgtaaaaatctgtttaaatccatttatattattttacagtcttttatgtaaaatttattatatcactggttttcaaagcaaaacataaaatattgtttatacagtttgtataggctgacttctgaataattggtatctattattttcattcccataagagggtgtaaacaattaactccagggttttattgtatcctgcaatatttagtattaactatatatgatttagcactgtgccaaacacattttcaagagtacattttgatataaaaagaaactatagttta

SEQ ID NO: 12989 - DNA, 8648 bp, Homo sapiens
cagggagggacgcccccgccgacaggagaattggttcccgggcccgcggcgatgcccccccggtagctcgggcccgtggtcgggtgtttgtgagtgtttctatgtgggagaaggaggaggaggaggaagaagaagcaacgatttgtcttctcggctggtctccccccggctctacatgttccccgcactgaggagacggaagaggagccgtagccaccccccctcccggcccggattatagtctctcgccacagcggcctcggcctccccttggattcagacgccgattcgcccagtgtttgggaaatgggaagtaatgacagctggcacctgaactaagtacttttataggcaacaccattccagaaattcaggatgaatggggatatgccccatgtccccattactactcttgcggggattgctagtctcacagacctcctgaaccagctgcctcttccatctcctttacctgctacaactacaaagagccttctctttaatgcacgaatagcagaagaggtgaactgccttttggcttgtagggatgacaatttggtttcacagcttgtccatagcctcaaccaggtatcaacagatcacatagagttgaaagataaccttggcagtgatgacccagaaggtgacataccagtcttgttgcaggccgtcctggcaaggagtcctaatgttttcagggagaaaagcatgcagaacagatatgtacaaagtggaatgatgatgtctcagtataaactttctcagaattccatgcacagtagtcctgcatcttccaattatcaacaaaccactatctcacatagcccctccagccggtttgtgccaccacagacaagctctgggaacagatttatgccacagcaaaatagcccagtgcctagtccatacgccccacaaagccctgcaggatacatgccatattcccatccttcaagttacacaacacatccacagatgcaacaagcatcggtatcaagtcccattgttgcaggtggtttgagaaacatacatgataataaagtttctggtccgttgtctggcaattcagctaatcatcatgctgataatcctagacatggttcaagtgaggactacctacacatggtgcacaggctaagtagtgacgatggagattcttcaacaatgaggaatgctgcatcttttcccttgagatctccacagccagtatgctcccctgctggaagtgaaggaactcctaaaggctcaagaccacctttaatcctacaatctcagtctctaccttgttcatcacctcgagatgttccaccagatatcttgctagattctccagaaagaaaacaaaagaagcagaagaaaatgaaattaggcaaggatgaaaaagagcagagtgagaaagcggcaatgtatgatataattagttctccatccaaggactctactaaacttacattaagactttctcgtgtaaggtcttcagacatggaccagcaagaggatatgatttctggtgtggaaaatagcaatgtttcagaaaatgatattccttttaatgtgcagtacccaggacagacttcaaaaacacccattactccacaagatataaaccgcccactaaatgctgctcaatgtttgtcgcagcaagaacaaacagcattccttccagcaaatcaagtgcctgttttacaacagaacacttcagttgctgcaaaacaaccccagacttctgtggtacagaatcaacaacagatatcacaacagggacctatatatgatgaagtggaattggatgcattggctgaaattgagcgaatagagagagaatcagctattgaaagggagcgcttctcaaaagaagttcaagataaagataagcctttgaaaaaaagaaaacaagattcttacccacaggaggctgggggtgctacaggaggtaatagaccagcttctcaggagacgggttctacgggaaatgggtcaaggccagcattaatggttagcattgatcttcatcaggcaggaagagtggactctcaggcttctataactcaggattcagactccataaaaaagcctgaagaaatcaaacaatgtaatgatgcacctgtttctgttcttcaggaagatattgttggaagtcttaaatctacaccagaaaaccatcctgagacacctaaaaaaaagtctgatcctgagctttcaaagagtgaaatgaaacaaagtgaaagtagattagcagaatctaaaccaaatgaaaaccgattggtggagacaaaatcaagtgaaaataagttagaaactaaagttgagacccaaacagaagaacttaaacagaatgagagcagaacaactgaatgcaaacaaaacgagagcaccatagttgagcctaaacaaaatgaaaatagactgtctgacacaaaaccaaatgacaacaaacaaaataatggcagatcagaaacaacaaaatcaaggcctgaaaccccaaagcaaaagggtgaaagccggcctgagactccaaaacaaaagagtgatgggcatcctgaaaccccaaaacagaagggtgatggaaggcctgaaactccaaagcaaaaaggtgagagccgccctgaaactccaaagcaaaaaaatgaagggcgacctgaaacaccaaaacacaggcatgacaataggagggattctggaaagccatctacagagaaaaaacctgaagtgtctaaacataaacaagatactaaatctgactcacctcggttaaaatcagaacgagctgaagccttaaagcagagacctgatgggcgatctgtttctgagtcactaagacgtgaccatgataataaacaaaaatcagatgacaggggtgaatcagagcgacatcgaggggatcagtctagggttcgaagaccagaaacattgagatcctctagtagaaatgaacatggcattaaatctgatagttcaaaaactgataaactagaacgaaaacacaggcatgaatcaggggactcaagggaaagaccatcttctggggaacaaaaatcaagacctgacagtcctcgtgttaaacaaggagattctaataaatcaagatctgataaacttggttttaaatcaccaactagtaaagatgacaaaaggacagagggtaacaagagtaaagtagacactaataaagcacaccctgacaataaggcagaatttccaagttatttgttggggggcaggtctggtgcgttgaaaaattttgtcattccgaaaatcaagagggataaagatggcaatgttactcaggagacaaagaaaatggaaatgaaaggagagccgaaagacaaagtagaaaaaataggattagttgaagatctaaataaaggagctaagcctgtagttgtgctacaaaaactgtctttggatgatgttcagaaacttattaaagatagagaggacaaatcaagaagttcccttaaacctatcaagaataaaccatcaaagtcaaataaaggtagtatagatcaatcagtgttaaaagaattaccccctgaactcctggcagaaattgagtccaccatgccactttgtgaacgtgtgaaaatgaacaaacgcaagcgtagcacagttaatgaaaagccaaaatatgctgaaatcagttcagatgaagataatgatagtgatgaagcttttgaatcctctaggaaacgacataaaaaagatgatgataaagcttgggaatatgaagagcgtgacagaagaagctctggggatcataggagaagtggccactctcatgaaggaagaaggagttcaggtggtggtcgttatcgaaaccgaagtccgtcagattctgacatggaagattattctcctcctcccagccttagtgaggttgctaggaaaatgaagaaaaaagaaaaacagaagaaaaggaaagcatatgaaccaaaactaacacctgaagaaatgatggactcttcaacttttaagagattcacagcctcaatagagaatattttggataatttggaagatatggattttactgcgtttggtgatgatgatgaaattcctcaggaactgctcttaggaaaacatcagcttaatgaacttggcagtgaatctgctaaaataaaagcaatgggtataatggataagctttcaactgacaaaactgtgaaagtcttaaatatcttggagaagaatattcaggatgggtcaaagctttccactttgttaaatcataataacgatactgaagaagaagaaaggttatggagagaccttattatggagagagttacaaaatcagcggatgcttgtcttacaactatcaacattatgacatcccctaacatgccaaaagctgtgtacattgaggatgtaattgaaagagttatacagtacactaaatttcatttgcagaatacactttatcctcagtatgatcctgtttacagattagatcctcatggaggaggcttattaagttcaaaagcaaaacgggctaaatgttctacccataagcagagagtaatagtaatgctttataacaaagtttgtgacattgttagcagcttatcagaattgctagagatacaacttcttacagacacaacaattcttcaggtttcatctatgggaataacaccattttttgtggaaaatgtcagtgaactacagttgtgtgccattaagttagtcactgcagtattctcaagatatgaaaaacataggcagttaattttggaagaaatttttacttcacttgcaagattaccaaccagcaagaggagtttaaggaacttcaggttaaacagtagtgatatggatggagaacctatgtatattcagatggttacagcactggttttacaacttattcagtgtgtggtacacttaccatcatcagagaaggactctaatgcagaagaagattcaaataaaaaaattgaccaggatgttgtcattactaactcttatgaaacagctatgcgaacagcccaaaacttcctctccatcttccttaaaaaatgtggtagtaagcaaggtgaagaagattacagaccactgtttgaaaattttgttcaagaccttctttcaacagtcaataagcctgaatggccagctgctgaactactccttagtttgttagggagactgttggttcatcagttcagtaacaagtcaacagagatggctttaagagtggcatctcttgattaccttggaactgttgctgcacggctaagaaaagatgctgttacaagcaaaatggatcaaggatctatagaacgcattttaaaacaggtttcaggaggggaagatgaaatccaacaattacaaaaagcattgcttgattacttggatgaaaacactgagactgatccttcactagtgttttctcgtaaattctatatagcccagtggtttcgagacacaactctggaaacagaaaaagcaatgaaatcacaaaaagatgaagaatcatctgaaggaacacatcatgcaaaggaaattgagacaactggccaaattatgcatcgagctgaaaaccgaaaaaagtttcttagaagcattatcaaaaccacaccttctcagtttagcacattaaagatgaactctgatactgtggactatgatgatgcttgcttgattgttcgatacttggcctccatgaggccgtttgcccagagctttgatatttatttgacacagatcctacgagttcttggtgaaaatgcaattgctgttcgaacaaaagccatgaagtgtttgtctgaggttgttgctgtagaccccagtattctagcaaggcttgatatgcaacgaggtgttcatggacgattgatggataattcgactagtgtccgagaagcagcagtagaattactaggtcgatttgtcctttgtcgacctcagcttgctgaacagtattatgatatgctgattgaaagaatattggatactggtatcagtgtcaggaaaagagtaataaagattctcagagacatttgtattgaacaaccaacatttccaaaaatcacagaaatgtgtgtaaaaatgattcgcagagtcaatgatgaagagggcattaagaaattagtaaatgaaacattccagaaactctggtttactccaactccacacaatgacaaagaagcaatgacaaggaaaattttaaacattaccgatgtggttgcagcatgcagagatactggatatgactggtttgagcaactgcttcaaaacttgttgaagtccgaagaggattcctcatataaacctgtgaagaaagcttgtactcaacttgttgataacctagttgagcacattcttaaatatgaggaatctctagctgactctgacaataaaggtgtgaattctggaagattggtagcttgcataaccactttgttcttattcagcaaaataagaccccagctcatggttaaacatgcaatgactatgcaaccataccttaccactaaatgtagtacgcaaaatgatttcatggttatctgcaatgttgcaaaaatcctagagctagttgtaccactgatggagcatccaagtgaaacttttcttgccactattgaggaagatctaatgaagctcatcatcaaatatggcatgactgtagtgcaacattgtgtgagctgtcttggagctgttgtaaataaagtgacacaaaattttaaatttgtgtgggcttgtttcaatagatactatggtgccatttcaaaattaaaaagtcaacaccaagaggacccaaataacacttcacttctaacaaacaaaccagcacttcttagatcccttttcaccgttggagcactatgtcggcattttgattttgatctggaagattttaaaggcaacagcaaggttaacataaaagataaagtacttgaactattgatgtattttacaaaacactcagatgaagaagtacaaacaaaagctatcattggtctaggatttgcctttattcagcatccaagtctaatgttcgagcaagaagtgaagaatctatataataatattttatctgataagaactcctcagtcaatttaaaaatacaagtgttaaaaaacctccagacctacctacaagaagaagatacacgtatgcagcaggcagatagagactggaagaaagttgcaaaacaggaagacttaaaagaaatgggtgatgtttcctcagggatgagtagttccatcatgcagctttatctcaaacaggtgcttgaggcattttttcacacccagtcaagtgtacgccactttgccctaaatgtcattgcattgactctaaatcaaggtcttattcatccagttcagtgtgtgccatatttaattgctatgggcacagacccagaacctgctatgcggaacaaggctgatcagcaacttgtggaaatagacaaaaaatatgctggattcattcatatgaaagcagtggctggtatgaagatgtcttaccaggtacaacaggcaatcaacacatgcctaaaagatcctgtaaggggtttcagacaagacgagtcctctagcgctttgtgttcacacctttactccatgatccgtggaaaccgccaacacagacgagcctttcttatttctttactcaacctctttgatgacacagcaaaaacagacgtgactatgctcttgtatatagcagacaatctagcctgttttccataccagacacaggaagagccgttgtttataatgcatcatatagacattacactctcagtttctggtagtaacctactgcagtcattcaaggagtctatggtaaaggacaaaaggaaagagagaaaatcatcacctagtaaggaaaatgagtcaagcgacagtgaagaagaagtttccaggcctcggaagtcacggaaacgtgtagattcagattcagattcagattcagaagacgatataaattcagtgatgaaatgtttgccagaaaattcagctcctttaatcgaatttgcaaatgtgtcccagggtattttattacttctcatgttaaaacaacatttgaagaatctttgtggattttctgatagtaaaattcagaagtactctccatctgaatctgcaaaagtatatgataaagcgataaaccgaaaaacaggagttcattttcatccaaaacaaacactggacttcctgcggagtgacatggctaattccaaaatcacagaagaggtgaaaaggagtatagtaaaacagtatctagatttcaaacttctcatggaacatctggaccctgatgaagaagaagaagaaggggaggtttcagctagcacaaatgctcggaacaaagcaattacctcactgcttggaggaggcagccctaaaaataatacagcagcagagacagaagatgatgaaagtgatggggaggatagaggaggaggcacttcaggggtgaggcggaggaggagtcaacgtatttcgcagcgtattacgtaaaatgatttttatgtgcttatatatgtcagtctattaaatgtacaccaagtaatgtaatacttaaaagagaaaacattttgtagatagagattctctacttacccgtttatacatccttttgtagaaagtttaacataaaagacaataaaaaaacagaaatgagatttatccagcaaaaa

SEQ ID NO: 12990 - DNA, 4259 bp, Homo sapiens
gtatccgggtcgctgctttccctattgtctgaggcagccgccctcgcgctgtgcaatttctggtctttcgttgcttctggtccaggctaataaagtttttctttctttaattttttttcttctagttttaacgggagaaattaactccccggggccgccgggttgactgcgctgcctgggccggaggtcttctccggccagggagcgctgtgggaaggggctcgagcggccagggccaggcgaggccgggggggcggggggttaggggaccgcggggctactcttgggagcgcccctgtccggctggctgcgcgccggttttaaatagcatctttcggacttgtcttcgcggccccagtccccgacctcggcgctgcctgggctcctgcagcctctccctaagtcttctccaaacgaccacctcacggattccttatggatcgcagctccaagaggaggcaggtgaagcctttggcagcttctctgctggaagctcttgattatgatagttcagatgacagtgattttaaagttggagatgcctcagattctgaagggagtggtaatggaagtgaagatgcttcaaaggacagtggagaaggttcctgtagtgattctgaagaaaatattttagaagaagaactgaatgaagatattaaagtaaaagaagaacaacttaaaaattctgcagaggaagaagtactatcatcagaaaaacaattaattaaaatggaaaagaaggaagaagaagaaaatggagaaagacctagaaagaaaaaggagaaagagaaggaaaaagaaaaggaaaaggagaaagagaaggaaagagagaaggaaaaagaaaaagcaacagtatctgagaatgtggctgcttctgctgctgccaccacaccagccacaagtcctcctgctgttaacacatccccttctgttcccactacgacaaccgctacagaggaacaagtcagcgagccaaaaaaatggaaccttcgacgaaaccgaccacttctggattttgtgtccatggaagagctgaatgacatggatgactatgacagtgaggatgacaatgattggcgacctactgtagtaaagagaaaagggagatctgcgtctcagaaagagggaagtgatggagacaatgaggatgatgaagatgagggaagcgggagtgatgaagacgagaatgatgaaggcaatgatgaagatcatagtagccctgccagtgaagggggttgcaagaagaagaagagtaaagttcttagcagaaacagtgctgatgatgaggaactgaccaatgatagcctgaccctatctcaaagcaagagtaatgaggactcgctgattcttgagaagagtcaaaactggagctctcaaaaaatggaccatattctgatttgctgtgtttgtctgggagataatagtgaggacgctgatgaaataattcagtgtgacaattgtggcattacagtccatgaaggttgttatggagttgatggagagagtgactctattatgagttcagcttctgaaaactccactgaaccttggttttgtgatgcctgtaaatgtggtgtttctcctagctgtgaactgtgtcctaatcaggatggaattttcaaggagacagatgctggaagatgggttcatattgtttgtgccctgtatgttcctggagtagcctttggagatattgacaaattacgaccagtaacactaacggaaatgaactattccaaatatggtgccaaggagtgtagcttttgtgaagaccctcgctttgctagaactggggtttgcattagctgtgatgcagggatgtgcagagcctatttccatgtgacctgtgctcaaaaggaaggtctgctttcagaggcagcggcggaagaggatatagcagatccattctttgcttattgtaagcaacatgcagataggttagacagaaagtggaagagaaaaaactacttggctctacagtcctattgtaaaatgtctttgcaagagagagagaagcaactatcaccagaagcacaggcaaggatcaatgcccggcttcagcagtatcgtgccaaagcagaactagctcgatctaccagaccccaggcctgggttccaagggaaaaattgcccagaccactcaccagcagtgcttcagctattcgtaaacttatgcggaaagcagaactcatggggatcagtacagatatctttccagtggacaattcagatactagttctagtgtggatggaaggagaaaacataagcaaccagctctcactgcagattttgtgaattattattttgagagaaatatgcgcatgattcaaattcaggaaaatatggctgaacaaaagaatataaaagataaattagagaatgaacaagaaaagcttcatgtagaatataataagctatgtgaatctttagaagaactacaaaacctgaatggaaaacttcgaagtgaaggacaaggaatatgggctttactaggcagaatcacagggcagaagttgaatataccggcaattttgcgagcacccaaggagagaaaaccaagtaaaaaagaaggaggcacacaaaagacatctactcttcctgcagtactttatagttgtgggatttgtaagaagaaccatgatcagcatcttcttttattgtgtgatacctgtaaactacattaccatcttggatgtctggatcctcctcttacaaggatgccaagaaagaccaaaaacagttattggcagtgctcggaatgtgaccaggcagggagcagtgacatggaagcagatatggccatggaaaccctaccagatggaaccaaacgatcaaggaggcagattaaggaaccagtgaaatttgttccacaggatgtgccaccagaacccaagaagattccgataagaaacacgagaaccagaggacgaaaacgaagcttcgttcctgaggaagaaaaacatgaggaaagagttcctagagagagaagacaaagacagtctgtgttgcaaaagaagcccaaggctgaagatttaagaactgaatgtgcaacttgcaagggaactggagacaatgaaaatcttgtcagatacccttcatgagacccaactctgccacagctcatcctcggaggcaatcccggaaacctcttttataagtgtgattttaaaaatgtggattaaactctcgatagagtacataaagtaaaggagaacagctatattgtcctttctataagcttgtcactgcaaaaagttgccttttgcttgtcaggtttggatagaatataattgattggtttgttacttggactaacaaggcagtagatttgcctgtgtggaattttttttcctatttttcttctttttgctttttttgcacttatcagaaatatttgatgtgtgcattgttgaaaaatactggatacatgtcttgtcagaattgtcgtattaagtaatgtctttccctcttgcttctttggcaaatgttgatacacagtgtttggacttactgaagagttactgaagcctgtgggacttaataaatacaatatgctactccctgttgtgattgaacaatacaaataacaaacaagaaagacaatgcattccattagtctgctattctgtttccttcaacttcatacatagattcatatatgaagtactgcattgtaaaacaactatagactcatattaaatgttatttctatttataatattcagcaaaagtgaaagacttgtgaagcatatgacattctatttttgacttattagtcctagtgtgaaagcattaatattattagcatgaaatttttacttcagattttaagctcatgaataaagatatatctgtgttgatctctagatatttttagtaatacccaaatatattcagtccttattgttttaatataagctttctgtgttcagtataattttatttttctcaaccttaaatatgaacttaggaaataaggagggaagtacaaagattattgactatacaacctaccagctgaaagaaagatcttcatcaacatctgtatctttccagaggtatacagaattaaaatttgatcttcaagctttaatgatccagttttaagtcaacggcagaagtatgttgaatatttcatcactcaatcttgaactgatttagaagagactctttgctgaaattgaattgcacttatacatgtaaattgtcaacatgtaatttggaattttctgattaataaatgtggttttggacatct

SEQ ID NO: 12991 - DNA, 1674 bp, Homo sapiens
gagcggctgaaaggcggaagtggaggccggagcctgggacaccgccggcggggagagaagcggatcccgtccgagccccggccccaagtaacgccgccgccccggagccgccttggaggtccccctccccactaagtgcctctttgcatagcaccagtccccacccgcacgctctctggaccactacagctggacgggcaatggcgggtcggggaggcgcagcacgacccaatggaccagctgctgggaacaagatctgtcaatttaagctggttctgctgggggagtctgcggtaggcaaatccagcctcgtcctccgctttgtcaagggacagtttcacgagtaccaggagagcacaattggagcggccttcctcacacagactgtctgcctggatgacacaacagtcaagtttgagatctgggacacagctggacaggagcggtatcacagcctggcccccatgtactatcggggggcccaggctgccatcgtggtctatgacatcaccaacacagatacatttgcacgggccaagaactgggtgaaggagctacagaggcaggccagccccaacatcgtcattgcactcgcgggtaacaaggcagacctggccagcaagagagccgtggaattccaggaagcacaagcctatgcagacgacaacagtttgctgttcatggagacatcagcaaagactgcaatgaacgtgaacgaaatcttcatggcaatagctaagaagcttcccaagaacgagccccagaatgcaactggtgctccaggccgaaaccgaggtgtggacctccaggagaacaacccagccagccggagccagtgctgcagcaactgagccccccttgcctgcccgctgcccccgcctcctccgcctgaatgacccgactggaatccactctaaccaatcgcacttaacgactcgggccaccactgggggggcagggggaggggtccaccatgatttctccatataattttgatcataggccggagtgagtcattccacctgcacctttctgtacaaatactaattcaattttaagtcttaagtcacttttttaatatatatgatcttctgctcttcccacttcctcccctttctactgctctcccattttcccttgctgggagtagccacatgctcttgccccccaacccttgtatatggggacagtggggtcagtgcagctaccctttctttccctcctgcggaacagcggacccagcaagagcatccacatcctcactttgttcggagtggtctttggtttgggcggtggggcagaccttgggaaggggcttaggaagggagaggcagctcttccttcagctggctctcatcaggctgcagccccctccccgctcccacctccctgctgggaaaccacagcattatcacagcattattgtgacagccacgaacccattgcccacaacccctccaccctcggtcaccccaacctctggctctgagccctgttctgaccaaatcatgatgatgagtatttgggggtgggtgggtaagggggggagtgggaggggacggaaccaactttttctgtattttgtattgtatgttttcttcaacatgtaaccaatcagtatcttgtcaatatagtcagccgatcgatcgacctcaaaaaaaaaaaaaaaaaaaa

SEQ ID NO: 12992 - DNA, 7191 bp, Homo sapiens
cttagcggtagccccttggtttccgtggcaacggaaaagcgcgggaattacagataaattaaaactgcgactgcgcggcgtgagctcgctgagacttcctggacgggggacaggctgtggggtttctcagataactgggcccctgcgctcaggaggccttcaccctctgctctgggtaaagttcattggaacagaaagaaatggatttatctgctcttcgcgttgaagaagtacaaaatgtcattaatgctatgcagaaaatcttagagtgtcccatctgtctggagttgatcaaggaacctgtctccacaaagtgtgaccacatattttgcaaattttgcatgctgaaacttctcaaccagaagaaagggccttcacagtgtcctttatgtaagaatgatataaccaaaaggagcctacaagaaagtacgagatttagtcaacttgttgaagagctattgaaaatcatttgtgcttttcagcttgacacaggtttggagtatgcaaacagctataattttgcaaaaaaggaaaataactctcctgaacatctaaaagatgaagtttctatcatccaaagtatgggctacagaaaccgtgccaaaagacttctacagagtgaacccgaaaatccttccttgcaggaaaccagtctcagtgtccaactctctaaccttggaactgtgagaactctgaggacaaagcagcggatacaacctcaaaagacgtctgtctacattgaattgggatctgattcttctgaagataccgttaataaggcaacttattgcagtgtgggagatcaagaattgttacaaatcacccctcaaggaaccagggatgaaatcagtttggattctgcaaaaaaggctgcttgtgaattttctgagacggatgtaacaaatactgaacatcatcaacccagtaataatgatttgaacaccactgagaagcgtgcagctgagaggcatccagaaaagtatcagggtagttctgtttcaaacttgcatgtggagccatgtggcacaaatactcatgccagctcattacagcatgagaacagcagtttattactcactaaagacagaatgaatgtagaaaaggctgaattctgtaataaaagcaaacagcctggcttagcaaggagccaacataacagatgggctggaagtaaggaaacatgtaatgataggcggactcccagcacagaaaaaaaggtagatctgaatgctgatcccctgtgtgagagaaaagaatggaataagcagaaactgccatgctcagagaatcctagagatactgaagatgttccttggataacactaaatagcagcattcagaaagttaatgagtggttttccagaagtgatgaactgttaggttctgatgactcacatgatggggagtctgaatcaaatgccaaagtagctgatgtattggacgttctaaatgaggtagatgaatattctggttcttcagagaaaatagacttactggccagtgatcctcatgaggctttaatatgtaaaagtgaaagagttcactccaaatcagtagagagtaatattgaagacaaaatatttgggaaaacctatcggaagaaggcaagcctccccaacttaagccatgtaactgaaaatctaattataggagcatttgttactgagccacagataatacaagagcgtcccctcacaaataaattaaagcgtaaaaggagacctacatcaggccttcatcctgaggattttatcaagaaagcagatttggcagttcaaaagactcctgaaatgataaatcagggaactaaccaaacggagcagaatggtcaagtgatgaatattactaatagtggtcatgagaataaaacaaaaggtgattctattcagaatgagaaaaatcctaacccaatagaatcactcgaaaaagaatctgctttcaaaacgaaagctgaacctataagcagcagtataagcaatatggaactcgaattaaatatccacaattcaaaagcacctaaaaagaataggctgaggaggaagtcttctaccaggcatattcatgcgcttgaactagtagtcagtagaaatctaagcccacctaattgtactgaattgcaaattgatagttgttctagcagtgaagagataaagaaaaaaaagtacaaccaaatgccagtcaggcacagcagaaacctacaactcatggaaggtaaagaacctgcaactggagccaagaagagtaacaagccaaatgaacagacaagtaaaagacatgacagcgatactttcccagagctgaagttaacaaatgcacctggttcttttactaagtgttcaaataccagtgaacttaaagaatttgtcaatcctagccttccaagagaagaaaaagaagagaaactagaaacagttaaagtgtctaataatgctgaagaccccaaagatctcatgttaagtggagaaagggttttgcaaactgaaagatctgtagagagtagcagtatttcattggtacctggtactgattatggcactcaggaaagtatctcgttactggaagttagcactctagggaaggcaaaaacagaaccaaataaatgtgtgagtcagtgtgcagcatttgaaaaccccaagggactaattcatggttgttccaaagataatagaaatgacacagaaggctttaagtatccattgggacatgaagttaaccacagtcgggaaacaagcatagaaatggaagaaagtgaacttgatgctcagtatttgcagaatacattcaaggtttcaaagcgccagtcatttgctccgttttcaaatccaggaaatgcagaagaggaatgtgcaacattctctgcccactctgggtccttaaagaaacaaagtccaaaagtcacttttgaatgtgaacaaaaggaagaaaatcaaggaaagaatgagtctaatatcaagcctgtacagacagttaatatcactgcaggctttcctgtggttggtcagaaagataagccagttgataatgccaaatgtagtatcaaaggaggctctaggttttgtctatcatctcagttcagaggcaacgaaactggactcattactccaaataaacatggacttttacaaaacccatatcgtataccaccactttttcccatcaagtcatttgttaaaactaaatgtaagaaaaatctgctagaggaaaactttgaggaacattcaatgtcacctgaaagagaaatgggaaatgagaacattccaagtacagtgagcacaattagccgtaataacattagagaaaatgtttttaaagaagccagctcaagcaatattaatgaagtaggttccagtactaatgaagtgggctccagtattaatgaaataggttccagtgatgaaaacattcaagcagaactaggtagaaacagagggccaaaattgaatgctatgcttagattaggggttttgcaacctgaggtctataaacaaagtcttcctggaagtaattgtaagcatcctgaaataaaaaagcaagaatatgaagaagtagttcagactgttaatacagatttctctccatatctgatttcagataacttagaacagcctatgggaagtagtcatgcatctcaggtttgttctgagacacctgatgacctgttagatgatggtgaaataaaggaagatactagttttgctgaaaatgacattaaggaaagttctgctgtttttagcaaaagcgtccagaaaggagagcttagcaggagtcctagccctttcacccatacacatttggctcagggttaccgaagaggggccaagaaattagagtcctcagaagagaacttatctagtgaggatgaagagcttccctgcttccaacacttgttatttggtaaagtaaacaatataccttctcagtctactaggcatagcaccgttgctaccgagtgtctgtctaagaacacagaggagaatttattatcattgaagaatagcttaaatgactgcagtaaccaggtaatattggcaaaggcatctcaggaacatcaccttagtgaggaaacaaaatgttctgctagcttgttttcttcacagtgcagtgaattggaagacttgactgcaaatacaaacacccaggatcctttcttgattggttcttccaaacaaatgaggcatcagtctgaaagccagggagttggtctgagtgacaaggaattggtttcagatgatgaagaaagaggaacgggcttggaagaaaataatcaagaagagcaaagcatggattcaaacttaggtgaagcagcatctgggtgtgagagtgaaacaagcgtctctgaagactgctcagggctatcctctcagagtgacattttaaccactcagcagagggataccatgcaacataacctgataaagctccagcaggaaatggctgaactagaagctgtgttagaacagcatgggagccagccttctaacagctacccttccatcataagtgactcttctgcccttgaggacctgcgaaatccagaacaaagcacatcagaaaaagcagtattaacttcacagaaaagtagtgaataccctataagccagaatccagaaggcctttctgctgacaagtttgaggtgtctgcagatagttctaccagtaaaaataaagaaccaggagtggaaaggtcatccccttctaaatgcccatcattagatgataggtggtacatgcacagttgctctgggagtcttcagaatagaaactacccatctcaagaggagctcattaaggttgttgatgtggaggagcaacagctggaagagtctgggccacacgatttgacggaaacatcttacttgccaaggcaagatctagagggaaccccttacctggaatctggaatcagcctcttctctgatgaccctgaatctgatccttctgaagacagagccccagagtcagctcgtgttggcaacataccatcttcaacctctgcattgaaagttccccaattgaaagttgcagaatctgcccagagtccagctgctgctcatactactgatactgctgggtataatgcaatggaagaaagtgtgagcagggagaagccagaattgacagcttcaacagaaagggtcaacaaaagaatgtccatggtggtgtctggcctgaccccagaagaatttatgctcgtgtacaagtttgccagaaaacaccacatcactttaactaatctaattactgaagagactactcatgttgttatgaaaacagatgctgagtttgtgtgtgaacggacactgaaatattttctaggaattgcgggaggaaaatgggtagttagctatttctgggtgacccagtctattaaagaaagaaaaatgctgaatgagcatgattttgaagtcagaggagatgtggtcaatggaagaaaccaccaaggtccaaagcgagcaagagaatcccaggacagaaagatcttcagggggctagaaatctgttgctatgggcccttcaccaacatgcccacagatcaactggaatggatggtacagctgtgtggtgcttctgtggtgaaggagctttcatcattcacccttggcacaggtgtccacccaattgtggttgtgcagccagatgcctggacagaggacaatggcttccatgcaattgggcagatgtgtgaggcacctgtggtgacccgagagtgggtgttggacagtgtagcactctaccagtgccaggagctggacacctacctgataccccagatcccccacagccactactgactgcagccagccacaggtacagagccacaggaccccaagaatgagcttacaaagtggcctttccaggccctgggagctcctctcactcttcagtccttctactgtcctggctactaaatattttatgtacatcagcctgaaaaggacttctggctatgcaagggtcccttaaagattttctgcttgaagtctcccttggaaatctgccatgagcacaaaattatggtaatttttcacctgagaagattttaaaaccatttaaacgccaccaattgagcaagatgctgattcattatttatcagccctattctttctattcaggctgttgttggcttagggctggaagcacagagtggcttggcctcaagagaatagctggtttccctaagtttacttctctaaaaccctgtgttcacaaaggcagagagtcagacccttcaatggaaggagagtgcttgggatcgattatgtgacttaaagtcagaatagtccttgggcagttctcaaatgttggagtggaacattggggaggaaattctgaggcaggtattagaaatgaaaaggaaacttgaaacctgggcatggtggctcacgcctgtaatcccagcactttgggaggccaaggtgggcagatcactggaggtcaggagttcgaaaccagcctggccaacatggtgaaaccccatctctactaaaaatacagaaattagccggtcatggtggtggacacctgtaatcccagctactcaggtggctaaggcaggagaatcacttcagcccgggaggtggaggttgcagtgagccaagatcataccacggcactccagcctgggtgacagtgagactgtggctcaaaaaaaaaaaaaaaaaaaggaaaatgaaactagaagagatttctaaaagtctgagatatatttgctagatttctaaagaatgtgttctaaaacagcagaagattttcaagaaccggtttccaaagacagtcttctaattcctcattagtaataagtaaaatgtttattgttgtagctctggtatataatccattcctcttaaaatataagacctctggcatgaatatttcatatctataaaatgacagatcccaccaggaaggaagctgttgctttctttgaggtgatttttttcctttgctccctgttgctgaaaccatacagcttcataaataattttgcttgctgaaggaagaaaaagtgtttttcataaacccattatccaggactgtttatagctgttggaaggactaggtcttccctagcccccccagtgtgcaagggcagtgaagacttgattgtacaaaatacgttttgtaaatgttgtgctgttaacactgcaaataaacttggtagcaaacacttcaaaaaaaaaaaaaaaaaa

SEQ ID NO: 12993 - DNA, 7388 bp, Homo sapiens
ggcagtttgtaggtcgcgagggaagcgctgaggatcaggaagggggcactgagtgtccgtgggggaatcctcgtgataggaactggaatatgccttgagggggacactatgtctttaaaaacgtcggctggtcatgaggtcaggagttccagaccagcctgaccaacgtggtgaaactccgtctctactaaaaatacaaaaattagccgggcgtggtgccgctccagctactcaggaggctgaggcaggagaatcgctagaacccgggaggcggaggttgcagtgagccgagatcgcgccattgcactccagcctgggcgacagagcgagactgtctcaaaacaaaacaaaacaaaacaaaacaaaaaacaccggctgttcattggaacagaaagaaatggatttatctgctcttcgcgttgaagaagtacaaaatgtcattaatgctatgcagaaaatcttagagtgtcccatctgtctggagttgatcaaggaacctgtctccacaaagtgtgaccacatattttgcaaattttgcatgctgaaacttctcaaccagaagaaagggccttcacagtgtcctttatgtaagaatgatataaccaaaaggagcctacaagaaagtacgagatttagtcaacttgttgaagagctattgaaaatcatttgtgcttttcagcttgacacaggtttggagtatgcaaacagctataattttgcaaaaaaggaaaataactctcctgaacatctaaaagatgaagtttctatcatccaaagtatgggctacagaaaccgtgccaaaagacttctacagagtgaacccgaaaatccttccttgcaggaaaccagtctcagtgtccaactctctaaccttggaactgtgagaactctgaggacaaagcagcggatacaacctcaaaagacgtctgtctacattgaattgggatctgattcttctgaagataccgttaataaggcaacttattgcagtgtgggagatcaagaattgttacaaatcacccctcaaggaaccagggatgaaatcagtttggattctgcaaaaaaggctgcttgtgaattttctgagacggatgtaacaaatactgaacatcatcaacccagtaataatgatttgaacaccactgagaagcgtgcagctgagaggcatccagaaaagtatcagggtagttctgtttcaaacttgcatgtggagccatgtggcacaaatactcatgccagctcattacagcatgagaacagcagtttattactcactaaagacagaatgaatgtagaaaaggctgaattctgtaataaaagcaaacagcctggcttagcaaggagccaacataacagatgggctggaagtaaggaaacatgtaatgataggcggactcccagcacagaaaaaaaggtagatctgaatgctgatcccctgtgtgagagaaaagaatggaataagcagaaactgccatgctcagagaatcctagagatactgaagatgttccttggataacactaaatagcagcattcagaaagttaatgagtggttttccagaagtgatgaactgttaggttctgatgactcacatgatggggagtctgaatcaaatgccaaagtagctgatgtattggacgttctaaatgaggtagatgaatattctggttcttcagagaaaatagacttactggccagtgatcctcatgaggctttaatatgtaaaagtgaaagagttcactccaaatcagtagagagtaatattgaagacaaaatatttgggaaaacctatcggaagaaggcaagcctccccaacttaagccatgtaactgaaaatctaattataggagcatttgttactgagccacagataatacaagagcgtcccctcacaaataaattaaagcgtaaaaggagacctacatcaggccttcatcctgaggattttatcaagaaagcagatttggcagttcaaaagactcctgaaatgataaatcagggaactaaccaaacggagcagaatggtcaagtgatgaatattactaatagtggtcatgagaataaaacaaaaggtgattctattcagaatgagaaaaatcctaacccaatagaatcactcgaaaaagaatctgctttcaaaacgaaagctgaacctataagcagcagtataagcaatatggaactcgaattaaatatccacaattcaaaagcacctaaaaagaataggctgaggaggaagtcttctaccaggcatattcatgcgcttgaactagtagtcagtagaaatctaagcccacctaattgtactgaattgcaaattgatagttgttctagcagtgaagagataaagaaaaaaaagtacaaccaaatgccagtcaggcacagcagaaacctacaactcatggaaggtaaagaacctgcaactggagccaagaagagtaacaagccaaatgaacagacaagtaaaagacatgacagcgatactttcccagagctgaagttaacaaatgcacctggttcttttactaagtgttcaaataccagtgaacttaaagaatttgtcaatcctagccttccaagagaagaaaaagaagagaaactagaaacagttaaagtgtctaataatgctgaagaccccaaagatctcatgttaagtggagaaagggttttgcaaactgaaagatctgtagagagtagcagtatttcattggtacctggtactgattatggcactcaggaaagtatctcgttactggaagttagcactctagggaaggcaaaaacagaaccaaataaatgtgtgagtcagtgtgcagcatttgaaaaccccaagggactaattcatggttgttccaaagataatagaaatgacacagaaggctttaagtatccattgggacatgaagttaaccacagtcgggaaacaagcatagaaatggaagaaagtgaacttgatgctcagtatttgcagaatacattcaaggtttcaaagcgccagtcatttgctccgttttcaaatccaggaaatgcagaagaggaatgtgcaacattctctgcccactctgggtccttaaagaaacaaagtccaaaagtcacttttgaatgtgaacaaaaggaagaaaatcaaggaaagaatgagtctaatatcaagcctgtacagacagttaatatcactgcaggctttcctgtggttggtcagaaagataagccagttgataatgccaaatgtagtatcaaaggaggctctaggttttgtctatcatctcagttcagaggcaacgaaactggactcattactccaaataaacatggacttttacaaaacccatatcgtataccaccactttttcccatcaagtcatttgttaaaactaaatgtaagaaaaatctgctagaggaaaactttgaggaacattcaatgtcacctgaaagagaaatgggaaatgagaacattccaagtacagtgagcacaattagccgtaataacattagagaaaatgtttttaaagaagccagctcaagcaatattaatgaagtaggttccagtactaatgaagtgggctccagtattaatgaaataggttccagtgatgaaaacattcaagcagaactaggtagaaacagagggccaaaattgaatgctatgcttagattaggggttttgcaacctgaggtctataaacaaagtcttcctggaagtaattgtaagcatcctgaaataaaaaagcaagaatatgaagaagtagttcagactgttaatacagatttctctccatatctgatttcagataacttagaacagcctatgggaagtagtcatgcatctcaggtttgttctgagacacctgatgacctgttagatgatggtgaaataaaggaagatactagttttgctgaaaatgacattaaggaaagttctgctgtttttagcaaaagcgtccagaaaggagagcttagcaggagtcctagccctttcacccatacacatttggctcagggttaccgaagaggggccaagaaattagagtcctcagaagagaacttatctagtgaggatgaagagcttccctgcttccaacacttgttatttggtaaagtaaacaatataccttctcagtctactaggcatagcaccgttgctaccgagtgtctgtctaagaacacagaggagaatttattatcattgaagaatagcttaaatgactgcagtaaccaggtaatattggcaaaggcatctcaggaacatcaccttagtgaggaaacaaaatgttctgctagcttgttttcttcacagtgcagtgaattggaagacttgactgcaaatacaaacacccaggatcctttcttgattggttcttccaaacaaatgaggcatcagtctgaaagccagggagttggtctgagtgacaaggaattggtttcagatgatgaagaaagaggaacgggcttggaagaaaataatcaagaagagcaaagcatggattcaaacttaggtgaagcagcatctgggtgtgagagtgaaacaagcgtctctgaagactgctcagggctatcctctcagagtgacattttaaccactcagcagagggataccatgcaacataacctgataaagctccagcaggaaatggctgaactagaagctgtgttagaacagcatgggagccagccttctaacagctacccttccatcataagtgactcttctgcccttgaggacctgcgaaatccagaacaaagcacatcagaaaaagcagtattaacttcacagaaaagtagtgaataccctataagccagaatccagaaggcctttctgctgacaagtttgaggtgtctgcagatagttctaccagtaaaaataaagaaccaggagtggaaaggtcatccccttctaaatgcccatcattagatgataggtggtacatgcacagttgctctgggagtcttcagaatagaaactacccatctcaagaggagctcattaaggttgttgatgtggaggagcaacagctggaagagtctgggccacacgatttgacggaaacatcttacttgccaaggcaagatctagagggaaccccttacctggaatctggaatcagcctcttctctgatgaccctgaatctgatccttctgaagacagagccccagagtcagctcgtgttggcaacataccatcttcaacctctgcattgaaagttccccaattgaaagttgcagaatctgcccagagtccagctgctgctcatactactgatactgctgggtataatgcaatggaagaaagtgtgagcagggagaagccagaattgacagcttcaacagaaagggtcaacaaaagaatgtccatggtggtgtctggcctgaccccagaagaatttatgctcgtgtacaagtttgccagaaaacaccacatcactttaactaatctaattactgaagagactactcatgttgttatgaaaacagatgctgagtttgtgtgtgaacggacactgaaatattttctaggaattgcgggaggaaaatgggtagttagctatttctgggtgacccagtctattaaagaaagaaaaatgctgaatgagcatgattttgaagtcagaggagatgtggtcaatggaagaaaccaccaaggtccaaagcgagcaagagaatcccaggacagaaagatcttcagggggctagaaatctgttgctatgggcccttcaccaacatgcccacagatcaactggaatggatggtacagctgtgtggtgcttctgtggtgaaggagctttcatcattcacccttggcacaggtgtccacccaattgtggttgtgcagccagatgcctggacagaggacaatggcttccatgcaattgggcagatgtgtgaggcacctgtggtgacccgagagtgggtgttggacagtgtagcactctaccagtgccaggagctggacacctacctgataccccagatcccccacagccactactgactgcagccagccacaggtacagagccacaggaccccaagaatgagcttacaaagtggcctttccaggccctgggagctcctctcactcttcagtccttctactgtcctggctactaaatattttatgtacatcagcctgaaaaggacttctggctatgcaagggtcccttaaagattttctgcttgaagtctcccttggaaatctgccatgagcacaaaattatggtaatttttcacctgagaagattttaaaaccatttaaacgccaccaattgagcaagatgctgattcattatttatcagccctattctttctattcaggctgttgttggcttagggctggaagcacagagtggcttggcctcaagagaatagctggtttccctaagtttacttctctaaaaccctgtgttcacaaaggcagagagtcagacccttcaatggaaggagagtgcttgggatcgattatgtgacttaaagtcagaatagtccttgggcagttctcaaatgttggagtggaacattggggaggaaattctgaggcaggtattagaaatgaaaaggaaacttgaaacctgggcatggtggctcacgcctgtaatcccagcactttgggaggccaaggtgggcagatcactggaggtcaggagttcgaaaccagcctggccaacatggtgaaaccccatctctactaaaaatacagaaattagccggtcatggtggtggacacctgtaatcccagctactcaggtggctaaggcaggagaatcacttcagcccgggaggtggaggttgcagtgagccaagatcataccacggcactccagcctgggtgacagtgagactgtggctcaaaaaaaaaaaaaaaaaaaggaaaatgaaactagaagagatttctaaaagtctgagatatatttgctagatttctaaagaatgtgttctaaaacagcagaagattttcaagaaccggtttccaaagacagtcttctaattcctcattagtaataagtaaaatgtttattgttgtagctctggtatataatccattcctcttaaaatataagacctctggcatgaatatttcatatctataaaatgacagatcccaccaggaaggaagctgttgctttctttgaggtgatttttttcctttgctccctgttgctgaaaccatacagcttcataaataattttgcttgctgaaggaagaaaaagtgtttttcataaacccattatccaggactgtttatagctgttggaaggactaggtcttccctagcccccccagtgtgcaagggcagtgaagacttgattgtacaaaatacgttttgtaaatgttgtgctgttaacactgcaaataaacttggtagcaaacacttcaaaaaaaaaaaaaaaaaa

SEQ ID NO: 12994 - DNA, 7185 bp, Homo sapiens
cttagcggtagccccttggtttccgtggcaacggaaaagcgcgggaattacagataaattaaaactgcgactgcgcggcgtgagctcgctgagacttcctggacgggggacaggctgtggggtttctcagataactgggcccctgcgctcaggaggccttcaccctctgctctggttcattggaacagaaagaaatggatttatctgctcttcgcgttgaagaagtacaaaatgtcattaatgctatgcagaaaatcttagagtgtcccatctgtctggagttgatcaaggaacctgtctccacaaagtgtgaccacatattttgcaaattttgcatgctgaaacttctcaaccagaagaaagggccttcacagtgtcctttatgtaagaatgatataaccaaaaggagcctacaagaaagtacgagatttagtcaacttgttgaagagctattgaaaatcatttgtgcttttcagcttgacacaggtttggagtatgcaaacagctataattttgcaaaaaaggaaaataactctcctgaacatctaaaagatgaagtttctatcatccaaagtatgggctacagaaaccgtgccaaaagacttctacagagtgaacccgaaaatccttccttgcaggaaaccagtctcagtgtccaactctctaaccttggaactgtgagaactctgaggacaaagcagcggatacaacctcaaaagacgtctgtctacattgaattgggatctgattcttctgaagataccgttaataaggcaacttattgcagtgtgggagatcaagaattgttacaaatcacccctcaaggaaccagggatgaaatcagtttggattctgcaaaaaaggctgcttgtgaattttctgagacggatgtaacaaatactgaacatcatcaacccagtaataatgatttgaacaccactgagaagcgtgcagctgagaggcatccagaaaagtatcagggtagttctgtttcaaacttgcatgtggagccatgtggcacaaatactcatgccagctcattacagcatgagaacagcagtttattactcactaaagacagaatgaatgtagaaaaggctgaattctgtaataaaagcaaacagcctggcttagcaaggagccaacataacagatgggctggaagtaaggaaacatgtaatgataggcggactcccagcacagaaaaaaaggtagatctgaatgctgatcccctgtgtgagagaaaagaatggaataagcagaaactgccatgctcagagaatcctagagatactgaagatgttccttggataacactaaatagcagcattcagaaagttaatgagtggttttccagaagtgatgaactgttaggttctgatgactcacatgatggggagtctgaatcaaatgccaaagtagctgatgtattggacgttctaaatgaggtagatgaatattctggttcttcagagaaaatagacttactggccagtgatcctcatgaggctttaatatgtaaaagtgaaagagttcactccaaatcagtagagagtaatattgaagacaaaatatttgggaaaacctatcggaagaaggcaagcctccccaacttaagccatgtaactgaaaatctaattataggagcatttgttactgagccacagataatacaagagcgtcccctcacaaataaattaaagcgtaaaaggagacctacatcaggccttcatcctgaggattttatcaagaaagcagatttggcagttcaaaagactcctgaaatgataaatcagggaactaaccaaacggagcagaatggtcaagtgatgaatattactaatagtggtcatgagaataaaacaaaaggtgattctattcagaatgagaaaaatcctaacccaatagaatcactcgaaaaagaatctgctttcaaaacgaaagctgaacctataagcagcagtataagcaatatggaactcgaattaaatatccacaattcaaaagcacctaaaaagaataggctgaggaggaagtcttctaccaggcatattcatgcgcttgaactagtagtcagtagaaatctaagcccacctaattgtactgaattgcaaattgatagttgttctagcagtgaagagataaagaaaaaaaagtacaaccaaatgccagtcaggcacagcagaaacctacaactcatggaaggtaaagaacctgcaactggagccaagaagagtaacaagccaaatgaacagacaagtaaaagacatgacagcgatactttcccagagctgaagttaacaaatgcacctggttcttttactaagtgttcaaataccagtgaacttaaagaatttgtcaatcctagccttccaagagaagaaaaagaagagaaactagaaacagttaaagtgtctaataatgctgaagaccccaaagatctcatgttaagtggagaaagggttttgcaaactgaaagatctgtagagagtagcagtatttcattggtacctggtactgattatggcactcaggaaagtatctcgttactggaagttagcactctagggaaggcaaaaacagaaccaaataaatgtgtgagtcagtgtgcagcatttgaaaaccccaagggactaattcatggttgttccaaagataatagaaatgacacagaaggctttaagtatccattgggacatgaagttaaccacagtcgggaaacaagcatagaaatggaagaaagtgaacttgatgctcagtatttgcagaatacattcaaggtttcaaagcgccagtcatttgctccgttttcaaatccaggaaatgcagaagaggaatgtgcaacattctctgcccactctgggtccttaaagaaacaaagtccaaaagtcacttttgaatgtgaacaaaaggaagaaaatcaaggaaagaatgagtctaatatcaagcctgtacagacagttaatatcactgcaggctttcctgtggttggtcagaaagataagccagttgataatgccaaatgtagtatcaaaggaggctctaggttttgtctatcatctcagttcagaggcaacgaaactggactcattactccaaataaacatggacttttacaaaacccatatcgtataccaccactttttcccatcaagtcatttgttaaaactaaatgtaagaaaaatctgctagaggaaaactttgaggaacattcaatgtcacctgaaagagaaatgggaaatgagaacattccaagtacagtgagcacaattagccgtaataacattagagaaaatgtttttaaagaagccagctcaagcaatattaatgaagtaggttccagtactaatgaagtgggctccagtattaatgaaataggttccagtgatgaaaacattcaagcagaactaggtagaaacagagggccaaaattgaatgctatgcttagattaggggttttgcaacctgaggtctataaacaaagtcttcctggaagtaattgtaagcatcctgaaataaaaaagcaagaatatgaagaagtagttcagactgttaatacagatttctctccatatctgatttcagataacttagaacagcctatgggaagtagtcatgcatctcaggtttgttctgagacacctgatgacctgttagatgatggtgaaataaaggaagatactagttttgctgaaaatgacattaaggaaagttctgctgtttttagcaaaagcgtccagaaaggagagcttagcaggagtcctagccctttcacccatacacatttggctcagggttaccgaagaggggccaagaaattagagtcctcagaagagaacttatctagtgaggatgaagagcttccctgcttccaacacttgttatttggtaaagtaaacaatataccttctcagtctactaggcatagcaccgttgctaccgagtgtctgtctaagaacacagaggagaatttattatcattgaagaatagcttaaatgactgcagtaaccaggtaatattggcaaaggcatctcaggaacatcaccttagtgaggaaacaaaatgttctgctagcttgttttcttcacagtgcagtgaattggaagacttgactgcaaatacaaacacccaggatcctttcttgattggttcttccaaacaaatgaggcatcagtctgaaagccagggagttggtctgagtgacaaggaattggtttcagatgatgaagaaagaggaacgggcttggaagaaaataatcaagaagagcaaagcatggattcaaacttaggtgaagcagcatctgggtgtgagagtgaaacaagcgtctctgaagactgctcagggctatcctctcagagtgacattttaaccactcagcagagggataccatgcaacataacctgataaagctccagcaggaaatggctgaactagaagctgtgttagaacagcatgggagccagccttctaacagctacccttccatcataagtgactcttctgcccttgaggacctgcgaaatccagaacaaagcacatcagaaaaagcagtattaacttcacagaaaagtagtgaataccctataagccagaatccagaaggcctttctgctgacaagtttgaggtgtctgcagatagttctaccagtaaaaataaagaaccaggagtggaaaggtcatccccttctaaatgcccatcattagatgataggtggtacatgcacagttgctctgggagtcttcagaatagaaactacccatctcaagaggagctcattaaggttgttgatgtggaggagcaacagctggaagagtctgggccacacgatttgacggaaacatcttacttgccaaggcaagatctagagggaaccccttacctggaatctggaatcagcctcttctctgatgaccctgaatctgatccttctgaagacagagccccagagtcagctcgtgttggcaacataccatcttcaacctctgcattgaaagttccccaattgaaagttgcagaatctgcccagagtccagctgctgctcatactactgatactgctgggtataatgcaatggaagaaagtgtgagcagggagaagccagaattgacagcttcaacagaaagggtcaacaaaagaatgtccatggtggtgtctggcctgaccccagaagaatttatgctcgtgtacaagtttgccagaaaacaccacatcactttaactaatctaattactgaagagactactcatgttgttatgaaaacagatgctgagtttgtgtgtgaacggacactgaaatattttctaggaattgcgggaggaaaatgggtagttagctatttctgggtgacccagtctattaaagaaagaaaaatgctgaatgagcatgattttgaagtcagaggagatgtggtcaatggaagaaaccaccaaggtccaaagcgagcaagagaatcccaggacagaaagatcttcagggggctagaaatctgttgctatgggcccttcaccaacatgcccacagatcaactggaatggatggtacagctgtgtggtgcttctgtggtgaaggagctttcatcattcacccttggcacaggtgtccacccaattgtggttgtgcagccagatgcctggacagaggacaatggcttccatgcaattgggcagatgtgtgaggcacctgtggtgacccgagagtgggtgttggacagtgtagcactctaccagtgccaggagctggacacctacctgataccccagatcccccacagccactactgactgcagccagccacaggtacagagccacaggaccccaagaatgagcttacaaagtggcctttccaggccctgggagctcctctcactcttcagtccttctactgtcctggctactaaatattttatgtacatcagcctgaaaaggacttctggctatgcaagggtcccttaaagattttctgcttgaagtctcccttggaaatctgccatgagcacaaaattatggtaatttttcacctgagaagattttaaaaccatttaaacgccaccaattgagcaagatgctgattcattatttatcagccctattctttctattcaggctgttgttggcttagggctggaagcacagagtggcttggcctcaagagaatagctggtttccctaagtttacttctctaaaaccctgtgttcacaaaggcagagagtcagacccttcaatggaaggagagtgcttgggatcgattatgtgacttaaagtcagaatagtccttgggcagttctcaaatgttggagtggaacattggggaggaaattctgaggcaggtattagaaatgaaaaggaaacttgaaacctgggcatggtggctcacgcctgtaatcccagcactttgggaggccaaggtgggcagatcactggaggtcaggagttcgaaaccagcctggccaacatggtgaaaccccatctctactaaaaatacagaaattagccggtcatggtggtggacacctgtaatcccagctactcaggtggctaaggcaggagaatcacttcagcccgggaggtggaggttgcagtgagccaagatcataccacggcactccagcctgggtgacagtgagactgtggctcaaaaaaaaaaaaaaaaaaaggaaaatgaaactagaagagatttctaaaagtctgagatatatttgctagatttctaaagaatgtgttctaaaacagcagaagattttcaagaaccggtttccaaagacagtcttctaattcctcattagtaataagtaaaatgtttattgttgtagctctggtatataatccattcctcttaaaatataagacctctggcatgaatatttcatatctataaaatgacagatcccaccaggaaggaagctgttgctttctttgaggtgatttttttcctttgctccctgttgctgaaaccatacagcttcataaataattttgcttgctgaaggaagaaaaagtgtttttcataaacccattatccaggactgtttatagctgttggaaggactaggtcttccctagcccccccagtgtgcaagggcagtgaagacttgattgtacaaaatacgttttgtaaatgttgtgctgttaacactgcaaataaacttggtagcaaacacttcaaaaaaaaaaaaaaaaaa

SEQ ID NO: 12995 - DNA, 6396 bp, Homo sapiens
cttagcggtagccccttggtttccgtggcaacggaaaagcgcgggaattacagataaattaaaactgcgactgcgcggcgtgagctcgctgagacttcctggacgggggacaggctgtggggtttctcagataactgggcccctgcgctcaggaggccttcaccctctgctctgggtaaagttcattggaacagaaagaaatggatttatctgctcttcgcgttgaagaagtacaaaatgtcattaatgctatgcagaaaatcttagagtgtcccatctgtctggagttgatcaaggaacctgtctccacaaagtgtgaccacatattttgcaaattttgcatgctgaaacttctcaaccagaagaaagggccttcacagtgtcctttatgtaagaatgatataaccaaaaggagcctacaagaaagtacgagatttagtcaacttgttgaagagctattgaaaatcatttgtgcttttcagcttgacacaggtttggagtatgcaaacagctataattttgcaaaaaaggaaaataactctcctgaacatctaaaagatgaagtttctatcatccaaagtatgggctacagaaaccgtgccaaaagacttctacagagtgaacccgaaaatccttccttgcaggaaaccagtctcagtgtccaactctctaaccttggaactgtgagaactctgaggacaaagcagcggatacaacctcaaaagacgtctgtctacattgaattgggatctgattcttctgaagataccgttaataaggcaacttattgcagtgtgggagatcaagaattgttacaaatcacccctcaaggaaccagggatgaaatcagtttggattctgcaaaaaaggctgcttgtgaattttctgagacggatgtaacaaatactgaacatcatcaacccagtaataatgatttgaacaccactgagaagcgtgcagctgagaggcatccagaaaagtatcagggtagttctgtttcaaacttgcatgtggagccatgtggcacaaatactcatgccagctcattacagcatgagaacagcagtttattactcactaaagacagaatgaatgtagaaaaggctgaattctgtaataaaagcaaacagcctggcttagcaaggagccaacataacagatgggctggaagtaaggaaacatgtaatgataggcggactcccagcacagaaaaaaaggtagatctgaatgctgatcccctgtgtgagagaaaagaatggaataagcagaaactgccatgctcagagaatcctagagatactgaagatgttccttggataacactaaatagcagcattcagaaagttaatgagtggttttccagaagtgatgaactgttaggttctgatgactcacatgatggggagtctgaatcaaatgccaaagtagctgatgtattggacgttctaaatgaggtagatgaatattctggttcttcagagaaaatagacttactggccagtgatcctcatgaggctttaatatgtaaaagtgaaagagttcactccaaatcagtagagagtaatattgaagacaaaatatttgggaaaacctatcggaagaaggcaagcctccccaacttaagccatgtaactgaaaatctaattataggagcatttgttactgagccacagataatacaagagcgtcccctcacaaataaattaaagcgtaaaaggagacctacatcaggccttcatcctgaggattttatcaagaaagcagatttggcagttcaaaagactcctgaaatgataaatcagggaactaaccaaacggagcagaatggtcaagtgatgaatattactaatagtggtcatgagaataaaacaaaaggtgattctattcagaatgagaaaaatcctaacccaatagaatcactcgaaaaagaatctgctttcaaaacgaaagctgaacctataagcagcagtataagcaatatggaactcgaattaaatatccacaattcaaaagcacctaaaaagaataggctgaggaggaagtcttctaccaggcatattcatgcgcttgaactagtagtcagtagaaatctaagcccacctaattgtactgaattgcaaattgatagttgttctagcagtgaagagataaagaaaaaaaagtacaaccaaatgccagtcaggcacagcagaaacctacaactcatggaaggtaaagaacctgcaactggagccaagaagagtaacaagccaaatgaacagacaagtaaaagacatgacagcgatactttcccagagctgaagttaacaaatgcacctggttcttttactaagtgttcaaataccagtgaacttaaagaatttgtcaatcctagccttccaagagaagaaaaagaagagaaactagaaacagttaaagtgtctaataatgctgaagaccccaaagatctcatgttaagtggagaaagggttttgcaaactgaaagatctgtagagagtagcagtatttcattggtacctggtactgattatggcactcaggaaagtatctcgttactggaagttagcactctagggaaggcaaaaacagaaccaaataaatgtgtgagtcagtgtgcagcatttgaaaaccccaagggactaattcatggttgttccaaagataatagaaatgacacagaaggctttaagtatccattgggacatgaagttaaccacagtcgggaaacaagcatagaaatggaagaaagtgaacttgatgctcagtatttgcagaatacattcaaggtttcaaagcgccagtcatttgctccgttttcaaatccaggaaatgcagaagaggaatgtgcaacattctctgcccactctgggtccttaaagaaacaaagtccaaaagtcacttttgaatgtgaacaaaaggaagaaaatcaaggaaagaatgagtctaatatcaagcctgtacagacagttaatatcactgcaggctttcctgtggttggtcagaaagataagccagttgataatgccaaatgtagtatcaaaggaggctctaggttttgtctatcatctcagttcagaggcaacgaaactggactcattactccaaataaacatggacttttacaaaacccatatcgtataccaccactttttcccatcaagtcatttgttaaaactaaatgtaagaaaaatctgctagaggaaaactttgaggaacattcaatgtcacctgaaagagaaatgggaaatgagaacattccaagtacagtgagcacaattagccgtaataacattagagaaaatgtttttaaagaagccagctcaagcaatattaatgaagtaggttccagtactaatgaagtgggctccagtattaatgaaataggttccagtgatgaaaacattcaagcagaactaggtagaaacagagggccaaaattgaatgctatgcttagattaggggttttgcaacctgaggtctataaacaaagtcttcctggaagtaattgtaagcatcctgaaataaaaaagcaagaatatgaagaagtagttcagactgttaatacagatttctctccatatctgatttcagataacttagaacagcctatgggaagtagtcatgcatctcaggtttgttctgagacacctgatgacctgttagatgatggtgaaataaaggaagatactagttttgctgaaaatgacattaaggaaagttctgctgtttttagcaaaagcgtccagaaaggagagcttagcaggagtcctagccctttcacccatacacatttggctcagggttaccgaagaggggccaagaaattagagtcctcagaagagaacttatctagtgaggatgaagagcttccctgcttccaacacttgttatttggtaaagtaaacaatataccttctcagtctactaggcatagcaccgttgctaccgagtgtctgtctaagaacacagaggagaatttattatcattgaagaatagcttaaatgactgcagtaaccaggtaatattggcaaaggcatctcaggaacatcaccttagtgaggaaacaaaatgttctgctagcttgttttcttcacagtgcagtgaattggaagacttgactgcaaatacaaacacccaggatcctttcttgattggttcttccaaacaaatgaggcatcagtctgaaagccagggagttggtctgagtgacaaggaattggtttcagatgatgaagaaagaggaacgggcttggaagaaaataatcaagaagagcaaagcatggattcaaacttaggtgaagcagcatctgggtgtgagagtgaaacaagcgtctctgaagactgctcagggctatcctctcagagtgacattttaaccactcagcagagggataccatgcaacataacctgataaagctccagcaggaaatggctgaactagaagctgtgttagaacagcatgggagccagccttctaacagctacccttccatcataagtgactcttctgcccttgaggacctgcgaaatccagaacaaagcacatcagaaaaaggggtgacccagtctattaaagaaagaaaaatgctgaatgagcatgattttgaagtcagaggagatgtggtcaatggaagaaaccaccaaggtccaaagcgagcaagagaatcccaggacagaaagatcttcagggggctagaaatctgttgctatgggcccttcaccaacatgcccacagatcaactggaatggatggtacagctgtgtggtgcttctgtggtgaaggagctttcatcattcacccttggcacaggtgtccacccaattgtggttgtgcagccagatgcctggacagaggacaatggcttccatgcaattgggcagatgtgtgaggcacctgtggtgacccgagagtgggtgttggacagtgtagcactctaccagtgccaggagctggacacctacctgataccccagatcccccacagccactactgactgcagccagccacaggtacagagccacaggaccccaagaatgagcttacaaagtggcctttccaggccctgggagctcctctcactcttcagtccttctactgtcctggctactaaatattttatgtacatcagcctgaaaaggacttctggctatgcaagggtcccttaaagattttctgcttgaagtctcccttggaaatctgccatgagcacaaaattatggtaatttttcacctgagaagattttaaaaccatttaaacgccaccaattgagcaagatgctgattcattatttatcagccctattctttctattcaggctgttgttggcttagggctggaagcacagagtggcttggcctcaagagaatagctggtttccctaagtttacttctctaaaaccctgtgttcacaaaggcagagagtcagacccttcaatggaaggagagtgcttgggatcgattatgtgacttaaagtcagaatagtccttgggcagttctcaaatgttggagtggaacattggggaggaaattctgaggcaggtattagaaatgaaaaggaaacttgaaacctgggcatggtggctcacgcctgtaatcccagcactttgggaggccaaggtgggcagatcactggaggtcaggagttcgaaaccagcctggccaacatggtgaaaccccatctctactaaaaatacagaaattagccggtcatggtggtggacacctgtaatcccagctactcaggtggctaaggcaggagaatcacttcagcccgggaggtggaggttgcagtgagccaagatcataccacggcactccagcctgggtgacagtgagactgtggctcaaaaaaaaaaaaaaaaaaaggaaaatgaaactagaagagatttctaaaagtctgagatatatttgctagatttctaaagaatgtgttctaaaacagcagaagattttcaagaaccggtttccaaagacagtcttctaattcctcattagtaataagtaaaatgtttattgttgtagctctggtatataatccattcctcttaaaatataagacctctggcatgaatatttcatatctataaaatgacagatcccaccaggaaggaagctgttgctttctttgaggtgatttttttcctttgctccctgttgctgaaaccatacagcttcataaataattttgcttgctgaaggaagaaaaagtgtttttcataaacccattatccaggactgtttatagctgttggaaggactaggtcttccctagcccccccagtgtgcaagggcagtgaagacttgattgtacaaaatacgttttgtaaatgttgtgctgttaacactgcaaataaacttggtagcaaacacttcaaaaaaaaaaaaaaaaaa

SEQ ID NO: 12996 - DNA, 6502 bp, Homo sapiens
cttagcggtagccccttggtttccgtggcaacggaaaagcgcgggaattacagataaattaaaactgcgactgcgcggcgtgagctcgctgagacttcctggacgggggacaggctgtggggtttctcagataactgggcccctgcgctcaggaggccttcaccctctgctctgggtaaagctgcttgtgaattttctgagacggatgtaacaaatactgaacatcatcaacccagtaataatgatttgaacaccactgagaagcgtgcagctgagaggcatccagaaaagtatcagggtagttctgtttcaaacttgcatgtggagccatgtggcacaaatactcatgccagctcattacagcatgagaacagcagtttattactcactaaagacagaatgaatgtagaaaaggctgaattctgtaataaaagcaaacagcctggcttagcaaggagccaacataacagatgggctggaagtaaggaaacatgtaatgataggcggactcccagcacagaaaaaaaggtagatctgaatgctgatcccctgtgtgagagaaaagaatggaataagcagaaactgccatgctcagagaatcctagagatactgaagatgttccttggataacactaaatagcagcattcagaaagttaatgagtggttttccagaagtgatgaactgttaggttctgatgactcacatgatggggagtctgaatcaaatgccaaagtagctgatgtattggacgttctaaatgaggtagatgaatattctggttcttcagagaaaatagacttactggccagtgatcctcatgaggctttaatatgtaaaagtgaaagagttcactccaaatcagtagagagtaatattgaagacaaaatatttgggaaaacctatcggaagaaggcaagcctccccaacttaagccatgtaactgaaaatctaattataggagcatttgttactgagccacagataatacaagagcgtcccctcacaaataaattaaagcgtaaaaggagacctacatcaggccttcatcctgaggattttatcaagaaagcagatttggcagttcaaaagactcctgaaatgataaatcagggaactaaccaaacggagcagaatggtcaagtgatgaatattactaatagtggtcatgagaataaaacaaaaggtgattctattcagaatgagaaaaatcctaacccaatagaatcactcgaaaaagaatctgctttcaaaacgaaagctgaacctataagcagcagtataagcaatatggaactcgaattaaatatccacaattcaaaagcacctaaaaagaataggctgaggaggaagtcttctaccaggcatattcatgcgcttgaactagtagtcagtagaaatctaagcccacctaattgtactgaattgcaaattgatagttgttctagcagtgaagagataaagaaaaaaaagtacaaccaaatgccagtcaggcacagcagaaacctacaactcatggaaggtaaagaacctgcaactggagccaagaagagtaacaagccaaatgaacagacaagtaaaagacatgacagcgatactttcccagagctgaagttaacaaatgcacctggttcttttactaagtgttcaaataccagtgaacttaaagaatttgtcaatcctagccttccaagagaagaaaaagaagagaaactagaaacagttaaagtgtctaataatgctgaagaccccaaagatctcatgttaagtggagaaagggttttgcaaactgaaagatctgtagagagtagcagtatttcattggtacctggtactgattatggcactcaggaaagtatctcgttactggaagttagcactctagggaaggcaaaaacagaaccaaataaatgtgtgagtcagtgtgcagcatttgaaaaccccaagggactaattcatggttgttccaaagataatagaaatgacacagaaggctttaagtatccattgggacatgaagttaaccacagtcgggaaacaagcatagaaatggaagaaagtgaacttgatgctcagtatttgcagaatacattcaaggtttcaaagcgccagtcatttgctccgttttcaaatccaggaaatgcagaagaggaatgtgcaacattctctgcccactctgggtccttaaagaaacaaagtccaaaagtcacttttgaatgtgaacaaaaggaagaaaatcaaggaaagaatgagtctaatatcaagcctgtacagacagttaatatcactgcaggctttcctgtggttggtcagaaagataagccagttgataatgccaaatgtagtatcaaaggaggctctaggttttgtctatcatctcagttcagaggcaacgaaactggactcattactccaaataaacatggacttttacaaaacccatatcgtataccaccactttttcccatcaagtcatttgttaaaactaaatgtaagaaaaatctgctagaggaaaactttgaggaacattcaatgtcacctgaaagagaaatgggaaatgagaacattccaagtacagtgagcacaattagccgtaataacattagagaaaatgtttttaaagaagccagctcaagcaatattaatgaagtaggttccagtactaatgaagtgggctccagtattaatgaaataggttccagtgatgaaaacattcaagcagaactaggtagaaacagagggccaaaattgaatgctatgcttagattaggggttttgcaacctgaggtctataaacaaagtcttcctggaagtaattgtaagcatcctgaaataaaaaagcaagaatatgaagaagtagttcagactgttaatacagatttctctccatatctgatttcagataacttagaacagcctatgggaagtagtcatgcatctcaggtttgttctgagacacctgatgacctgttagatgatggtgaaataaaggaagatactagttttgctgaaaatgacattaaggaaagttctgctgtttttagcaaaagcgtccagaaaggagagcttagcaggagtcctagccctttcacccatacacatttggctcagggttaccgaagaggggccaagaaattagagtcctcagaagagaacttatctagtgaggatgaagagcttccctgcttccaacacttgttatttggtaaagtaaacaatataccttctcagtctactaggcatagcaccgttgctaccgagtgtctgtctaagaacacagaggagaatttattatcattgaagaatagcttaaatgactgcagtaaccaggtaatattggcaaaggcatctcaggaacatcaccttagtgaggaaacaaaatgttctgctagcttgttttcttcacagtgcagtgaattggaagacttgactgcaaatacaaacacccaggatcctttcttgattggttcttccaaacaaatgaggcatcagtctgaaagccagggagttggtctgagtgacaaggaattggtttcagatgatgaagaaagaggaacgggcttggaagaaaataatcaagaagagcaaagcatggattcaaacttaggtgaagcagcatctgggtgtgagagtgaaacaagcgtctctgaagactgctcagggctatcctctcagagtgacattttaaccactcagcagagggataccatgcaacataacctgataaagctccagcaggaaatggctgaactagaagctgtgttagaacagcatgggagccagccttctaacagctacccttccatcataagtgactcttctgcccttgaggacctgcgaaatccagaacaaagcacatcagaaaaagcagtattaacttcacagaaaagtagtgaataccctataagccagaatccagaaggcctttctgctgacaagtttgaggtgtctgcagatagttctaccagtaaaaataaagaaccaggagtggaaaggtcatccccttctaaatgcccatcattagatgataggtggtacatgcacagttgctctgggagtcttcagaatagaaactacccatctcaagaggagctcattaaggttgttgatgtggaggagcaacagctggaagagtctgggccacacgatttgacggaaacatcttacttgccaaggcaagatctagagggaaccccttacctggaatctggaatcagcctcttctctgatgaccctgaatctgatccttctgaagacagagccccagagtcagctcgtgttggcaacataccatcttcaacctctgcattgaaagttccccaattgaaagttgcagaatctgcccagagtccagctgctgctcatactactgatactgctgggtataatgcaatggaagaaagtgtgagcagggagaagccagaattgacagcttcaacagaaagggtcaacaaaagaatgtccatggtggtgtctggcctgaccccagaagaatttatgctcgtgtacaagtttgccagaaaacaccacatcactttaactaatctaattactgaagagactactcatgttgttatgaaaacagatgctgagtttgtgtgtgaacggacactgaaatattttctaggaattgcgggaggaaaatgggtagttagctatttctgggtgacccagtctattaaagaaagaaaaatgctgaatgagcatgattttgaagtcagaggagatgtggtcaatggaagaaaccaccaaggtccaaagcgagcaagagaatcccaggacagaaagatcttcagggggctagaaatctgttgctatgggcccttcaccaacatgcccacagatcaactggaatggatggtacagctgtgtggtgcttctgtggtgaaggagctttcatcattcacccttggcacaggtgtccacccaattgtggttgtgcagccagatgcctggacagaggacaatggcttccatgcaattgggcagatgtgtgaggcacctgtggtgacccgagagtgggtgttggacagtgtagcactctaccagtgccaggagctggacacctacctgataccccagatcccccacagccactactgactgcagccagccacaggtacagagccacaggaccccaagaatgagcttacaaagtggcctttccaggccctgggagctcctctcactcttcagtccttctactgtcctggctactaaatattttatgtacatcagcctgaaaaggacttctggctatgcaagggtcccttaaagattttctgcttgaagtctcccttggaaatctgccatgagcacaaaattatggtaatttttcacctgagaagattttaaaaccatttaaacgccaccaattgagcaagatgctgattcattatttatcagccctattctttctattcaggctgttgttggcttagggctggaagcacagagtggcttggcctcaagagaatagctggtttccctaagtttacttctctaaaaccctgtgttcacaaaggcagagagtcagacccttcaatggaaggagagtgcttgggatcgattatgtgacttaaagtcagaatagtccttgggcagttctcaaatgttggagtggaacattggggaggaaattctgaggcaggtattagaaatgaaaaggaaacttgaaacctgggcatggtggctcacgcctgtaatcccagcactttgggaggccaaggtgggcagatcactggaggtcaggagttcgaaaccagcctggccaacatggtgaaaccccatctctactaaaaatacagaaattagccggtcatggtggtggacacctgtaatcccagctactcaggtggctaaggcaggagaatcacttcagcccgggaggtggaggttgcagtgagccaagatcataccacggcactccagcctgggtgacagtgagactgtggctcaaaaaaaaaaaaaaaaaaaggaaaatgaaactagaagagatttctaaaagtctgagatatatttgctagatttctaaagaatgtgttctaaaacagcagaagattttcaagaaccggtttccaaagacagtcttctaattcctcattagtaataagtaaaatgtttattgttgtagctctggtatataatccattcctcttaaaatataagacctctggcatgaatatttcatatctataaaatgacagatcccaccaggaaggaagctgttgctttctttgaggtgatttttttcctttgctccctgttgctgaaaccatacagcttcataaataattttgcttgctgaaggaagaaaaagtgtttttcataaacccattatccaggactgtttatagctgttggaaggactaggtcttccctagcccccccagtgtgcaagggcagtgaagacttgattgtacaaaatacgttttgtaaatgttgtgctgttaacactgcaaataaacttggtagcaaacacttcaaaaaaaaaaaaaaaaaa

SEQ ID NO: 12997 - DNA, 7068 bp, Homo sapiens
cttagcggtagccccttggtttccgtggcaacggaaaagcgcgggaattacagataaattaaaactgcgactgcgcggcgtgagctcgctgagacttcctggacgggggacaggctgtggggtttctcagataactgggcccctgcgctcaggaggccttcaccctctgctctgggtaaagttcattggaacagaaagaaatggatttatctgctcttcgcgttgaagaagtacaaaatgtcattaatgctatgcagaaaatcttagagtgtcccatctgtctggagttgatcaaggaacctgtctccacaaagtgtgaccacatattttgcaaattttgcatgctgaaacttctcaaccagaagaaagggccttcacagtgtcctttatgtaagaatgatataaccaaaaggagcctacaagaaagtacgagatttagtcaacttgttgaagagctattgaaaatcatttgtgcttttcagcttgacacaggtttggagtatgcaaacagctataattttgcaaaaaaggaaaataactctcctgaacatctaaaagatgaagtttctatcatccaaagtatgggctacagaaaccgtgccaaaagacttctacagagtgaacccgaaaatccttccttgcaggaaaccagtctcagtgtccaactctctaaccttggaactgtgagaactctgaggacaaagcagcggatacaacctcaaaagacgtctgtctacattgaattggctgcttgtgaattttctgagacggatgtaacaaatactgaacatcatcaacccagtaataatgatttgaacaccactgagaagcgtgcagctgagaggcatccagaaaagtatcagggtagttctgtttcaaacttgcatgtggagccatgtggcacaaatactcatgccagctcattacagcatgagaacagcagtttattactcactaaagacagaatgaatgtagaaaaggctgaattctgtaataaaagcaaacagcctggcttagcaaggagccaacataacagatgggctggaagtaaggaaacatgtaatgataggcggactcccagcacagaaaaaaaggtagatctgaatgctgatcccctgtgtgagagaaaagaatggaataagcagaaactgccatgctcagagaatcctagagatactgaagatgttccttggataacactaaatagcagcattcagaaagttaatgagtggttttccagaagtgatgaactgttaggttctgatgactcacatgatggggagtctgaatcaaatgccaaagtagctgatgtattggacgttctaaatgaggtagatgaatattctggttcttcagagaaaatagacttactggccagtgatcctcatgaggctttaatatgtaaaagtgaaagagttcactccaaatcagtagagagtaatattgaagacaaaatatttgggaaaacctatcggaagaaggcaagcctccccaacttaagccatgtaactgaaaatctaattataggagcatttgttactgagccacagataatacaagagcgtcccctcacaaataaattaaagcgtaaaaggagacctacatcaggccttcatcctgaggattttatcaagaaagcagatttggcagttcaaaagactcctgaaatgataaatcagggaactaaccaaacggagcagaatggtcaagtgatgaatattactaatagtggtcatgagaataaaacaaaaggtgattctattcagaatgagaaaaatcctaacccaatagaatcactcgaaaaagaatctgctttcaaaacgaaagctgaacctataagcagcagtataagcaatatggaactcgaattaaatatccacaattcaaaagcacctaaaaagaataggctgaggaggaagtcttctaccaggcatattcatgcgcttgaactagtagtcagtagaaatctaagcccacctaattgtactgaattgcaaattgatagttgttctagcagtgaagagataaagaaaaaaaagtacaaccaaatgccagtcaggcacagcagaaacctacaactcatggaaggtaaagaacctgcaactggagccaagaagagtaacaagccaaatgaacagacaagtaaaagacatgacagcgatactttcccagagctgaagttaacaaatgcacctggttcttttactaagtgttcaaataccagtgaacttaaagaatttgtcaatcctagccttccaagagaagaaaaagaagagaaactagaaacagttaaagtgtctaataatgctgaagaccccaaagatctcatgttaagtggagaaagggttttgcaaactgaaagatctgtagagagtagcagtatttcattggtacctggtactgattatggcactcaggaaagtatctcgttactggaagttagcactctagggaaggcaaaaacagaaccaaataaatgtgtgagtcagtgtgcagcatttgaaaaccccaagggactaattcatggttgttccaaagataatagaaatgacacagaaggctttaagtatccattgggacatgaagttaaccacagtcgggaaacaagcatagaaatggaagaaagtgaacttgatgctcagtatttgcagaatacattcaaggtttcaaagcgccagtcatttgctccgttttcaaatccaggaaatgcagaagaggaatgtgcaacattctctgcccactctgggtccttaaagaaacaaagtccaaaagtcacttttgaatgtgaacaaaaggaagaaaatcaaggaaagaatgagtctaatatcaagcctgtacagacagttaatatcactgcaggctttcctgtggttggtcagaaagataagccagttgataatgccaaatgtagtatcaaaggaggctctaggttttgtctatcatctcagttcagaggcaacgaaactggactcattactccaaataaacatggacttttacaaaacccatatcgtataccaccactttttcccatcaagtcatttgttaaaactaaatgtaagaaaaatctgctagaggaaaactttgaggaacattcaatgtcacctgaaagagaaatgggaaatgagaacattccaagtacagtgagcacaattagccgtaataacattagagaaaatgtttttaaagaagccagctcaagcaatattaatgaagtaggttccagtactaatgaagtgggctccagtattaatgaaataggttccagtgatgaaaacattcaagcagaactaggtagaaacagagggccaaaattgaatgctatgcttagattaggggttttgcaacctgaggtctataaacaaagtcttcctggaagtaattgtaagcatcctgaaataaaaaagcaagaatatgaagaagtagttcagactgttaatacagatttctctccatatctgatttcagataacttagaacagcctatgggaagtagtcatgcatctcaggtttgttctgagacacctgatgacctgttagatgatggtgaaataaaggaagatactagttttgctgaaaatgacattaaggaaagttctgctgtttttagcaaaagcgtccagaaaggagagcttagcaggagtcctagccctttcacccatacacatttggctcagggttaccgaagaggggccaagaaattagagtcctcagaagagaacttatctagtgaggatgaagagcttccctgcttccaacacttgttatttggtaaagtaaacaatataccttctcagtctactaggcatagcaccgttgctaccgagtgtctgtctaagaacacagaggagaatttattatcattgaagaatagcttaaatgactgcagtaaccaggtaatattggcaaaggcatctcaggaacatcaccttagtgaggaaacaaaatgttctgctagcttgttttcttcacagtgcagtgaattggaagacttgactgcaaatacaaacacccaggatcctttcttgattggttcttccaaacaaatgaggcatcagtctgaaagccagggagttggtctgagtgacaaggaattggtttcagatgatgaagaaagaggaacgggcttggaagaaaataatcaagaagagcaaagcatggattcaaacttaggtgaagcagcatctgggtgtgagagtgaaacaagcgtctctgaagactgctcagggctatcctctcagagtgacattttaaccactcagcagagggataccatgcaacataacctgataaagctccagcaggaaatggctgaactagaagctgtgttagaacagcatgggagccagccttctaacagctacccttccatcataagtgactcttctgcccttgaggacctgcgaaatccagaacaaagcacatcagaaaaagcagtattaacttcacagaaaagtagtgaataccctataagccagaatccagaaggcctttctgctgacaagtttgaggtgtctgcagatagttctaccagtaaaaataaagaaccaggagtggaaaggtcatccccttctaaatgcccatcattagatgataggtggtacatgcacagttgctctgggagtcttcagaatagaaactacccatctcaagaggagctcattaaggttgttgatgtggaggagcaacagctggaagagtctgggccacacgatttgacggaaacatcttacttgccaaggcaagatctagagggaaccccttacctggaatctggaatcagcctcttctctgatgaccctgaatctgatccttctgaagacagagccccagagtcagctcgtgttggcaacataccatcttcaacctctgcattgaaagttccccaattgaaagttgcagaatctgcccagagtccagctgctgctcatactactgatactgctgggtataatgcaatggaagaaagtgtgagcagggagaagccagaattgacagcttcaacagaaagggtcaacaaaagaatgtccatggtggtgtctggcctgaccccagaagaatttatgctcgtgtacaagtttgccagaaaacaccacatcactttaactaatctaattactgaagagactactcatgttgttatgaaaacagatgctgagtttgtgtgtgaacggacactgaaatattttctaggaattgcgggaggaaaatgggtagttagctatttctgggtgacccagtctattaaagaaagaaaaatgctgaatgagcatgattttgaagtcagaggagatgtggtcaatggaagaaaccaccaaggtccaaagcgagcaagagaatcccaggacagaaagatcttcagggggctagaaatctgttgctatgggcccttcaccaacatgcccacagatcaactggaatggatggtacagctgtgtggtgcttctgtggtgaaggagctttcatcattcacccttggcacaggtgtccacccaattgtggttgtgcagccagatgcctggacagaggacaatggcttccatgcaattgggcagatgtgtgaggcacctgtggtgacccgagagtgggtgttggacagtgtagcactctaccagtgccaggagctggacacctacctgataccccagatcccccacagccactactgactgcagccagccacaggtacagagccacaggaccccaagaatgagcttacaaagtggcctttccaggccctgggagctcctctcactcttcagtccttctactgtcctggctactaaatattttatgtacatcagcctgaaaaggacttctggctatgcaagggtcccttaaagattttctgcttgaagtctcccttggaaatctgccatgagcacaaaattatggtaatttttcacctgagaagattttaaaaccatttaaacgccaccaattgagcaagatgctgattcattatttatcagccctattctttctattcaggctgttgttggcttagggctggaagcacagagtggcttggcctcaagagaatagctggtttccctaagtttacttctctaaaaccctgtgttcacaaaggcagagagtcagacccttcaatggaaggagagtgcttgggatcgattatgtgacttaaagtcagaatagtccttgggcagttctcaaatgttggagtggaacattggggaggaaattctgaggcaggtattagaaatgaaaaggaaacttgaaacctgggcatggtggctcacgcctgtaatcccagcactttgggaggccaaggtgggcagatcactggaggtcaggagttcgaaaccagcctggccaacatggtgaaaccccatctctactaaaaatacagaaattagccggtcatggtggtggacacctgtaatcccagctactcaggtggctaaggcaggagaatcacttcagcccgggaggtggaggttgcagtgagccaagatcataccacggcactccagcctgggtgacagtgagactgtggctcaaaaaaaaaaaaaaaaaaaggaaaatgaaactagaagagatttctaaaagtctgagatatatttgctagatttctaaagaatgtgttctaaaacagcagaagattttcaagaaccggtttccaaagacagtcttctaattcctcattagtaataagtaaaatgtttattgttgtagctctggtatataatccattcctcttaaaatataagacctctggcatgaatatttcatatctataaaatgacagatcccaccaggaaggaagctgttgctttctttgaggtgatttttttcctttgctccctgttgctgaaaccatacagcttcataaataattttgcttgctgaaggaagaaaaagtgtttttcataaacccattatccaggactgtttatagctgttggaaggactaggtcttccctagcccccccagtgtgcaagggcagtgaagacttgattgtacaaaatacgttttgtaaatgttgtgctgttaacactgcaaataaacttggtagcaaacacttcaaaaaaaaaaaaaaaaaa

SEQ ID NO: 12998 - DNA, 6474 bp, Homo sapiens
cttagcggtagccccttggtttccgtggcaacggaaaagcgcgggaattacagataaattaaaactgcgactgcgcggcgtgagctcgctgagacttcctggacgggggacaggctgtggggtttctcagataactgggcccctgcgctcaggaggccttcaccctctgctctgggtaaagttcattggaacagaaagaaatggatttatctgctcttcgcgttgaagaagtacaaaatgtcattaatgctatgcagaaaatcttagagtgtcccatctgtctggagttgatcaaggaacctgtctccacaaagtgtgaccacatattttgcaaattttgcatgctgaaacttctcaaccagaagaaagggccttcacagtgtcctttatgtaagaatgatataaccaaaaggagcctacaagaaagtacgagatttagtcaacttgttgaagagctattgaaaatcatttgtgcttttcagcttgacacaggtttggagtatgcaaacagctataattttgcaaaaaaggaaaataactctcctgaacatctaaaagatgaagtttctatcatccaaagtatgggctacagaaaccgtgccaaaagacttctacagagtgaacccgaaaatccttccttgcaggaaaccagtctcagtgtccaactctctaaccttggaactgtgagaactctgaggacaaagcagcggatacaacctcaaaagacgtctgtctacattgaattgggatctgattcttctgaagataccgttaataaggcaacttattgcagtgtgggagatcaagaattgttacaaatcacccctcaaggaaccagggatgaaatcagtttggattctgcaaaaaaggctgcttgtgaattttctgagacggatgtaacaaatactgaacatcatcaacccagtaataatgatttgaacaccactgagaagcgtgcagctgagaggcatccagaaaagtatcagggtagttctgtttcaaacttgcatgtggagccatgtggcacaaatactcatgccagctcattacagcatgagaacagcagtttattactcactaaagacagaatgaatgtagaaaaggctgaattctgtaataaaagcaaacagcctggcttagcaaggagccaacataacagatgggctggaagtaaggaaacatgtaatgataggcggactcccagcacagaaaaaaaggtagatctgaatgctgatcccctgtgtgagagaaaagaatggaataagcagaaactgccatgctcagagaatcctagagatactgaagatgttccttggataacactaaatagcagcattcagaaagttaatgagtggttttccagaagtgatgaactgttaggttctgatgactcacatgatggggagtctgaatcaaatgccaaagtagctgatgtattggacgttctaaatgaggtagatgaatattctggttcttcagagaaaatagacttactggccagtgatcctcatgaggctttaatatgtaaaagtgaaagagttcactccaaatcagtagagagtaatattgaagacaaaatatttgggaaaacctatcggaagaaggcaagcctccccaacttaagccatgtaactgaaaatctaattataggagcatttgttactgagccacagataatacaagagcgtcccctcacaaataaattaaagcgtaaaaggagacctacatcaggccttcatcctgaggattttatcaagaaagcagatttggcagttcaaaagactcctgaaatgataaatcagggaactaaccaaacggagcagaatggtcaagtgatgaatattactaatagtggtcatgagaataaaacaaaaggtgattctattcagaatgagaaaaatcctaacccaatagaatcactcgaaaaagaatctgctttcaaaacgaaagctgaacctataagcagcagtataagcaatatggaactcgaattaaatatccacaattcaaaagcacctaaaaagaataggctgaggaggaagtcttctaccaggcatattcatgcgcttgaactagtagtcagtagaaatctaagcccacctaattgtactgaattgcaaattgatagttgttctagcagtgaagagataaagaaaaaaaagtacaaccaaatgccagtcaggcacagcagaaacctacaactcatggaaggtaaagaacctgcaactggagccaagaagagtaacaagccaaatgaacagacaagtaaaagacatgacagcgatactttcccagagctgaagttaacaaatgcacctggttcttttactaagtgttcaaataccagtgaacttaaagaatttgtcaatcctagccttccaagagaagaaaaagaagagaaactagaaacagttaaagtgtctaataatgctgaagaccccaaagatctcatgttaagtggagaaagggttttgcaaactgaaagatctgtagagagtagcagtatttcattggtacctggtactgattatggcactcaggaaagtatctcgttactggaagttagcactctagggaaggcaaaaacagaaccaaataaatgtgtgagtcagtgtgcagcatttgaaaaccccaagggactaattcatggttgttccaaagataatagaaatgacacagaaggctttaagtatccattgggacatgaagttaaccacagtcgggaaacaagcatagaaatggaagaaagtgaacttgatgctcagtatttgcagaatacattcaaggtttcaaagcgccagtcatttgctccgttttcaaatccaggaaatgcagaagaggaatgtgcaacattctctgcccactctgggtccttaaagaaacaaagtccaaaagtcacttttgaatgtgaacaaaaggaagaaaatcaaggaaagaatgagtctaatatcaagcctgtacagacagttaatatcactgcaggctttcctgtggttggtcagaaagataagccagttgataatgccaaatgtagtatcaaaggaggctctaggttttgtctatcatctcagttcagaggcaacgaaactggactcattactccaaataaacatggacttttacaaaacccatatcgtataccaccactttttcccatcaagtcatttgttaaaactaaatgtaagaaaaatctgctagaggaaaactttgaggaacattcaatgtcacctgaaagagaaatgggaaatgagaacattccaagtacagtgagcacaattagccgtaataacattagagaaaatgtttttaaagaagccagctcaagcaatattaatgaagtaggttccagtactaatgaagtgggctccagtattaatgaaataggttccagtgatgaaaacattcaagcagaactaggtagaaacagagggccaaaattgaatgctatgcttagattaggggttttgcaacctgaggtctataaacaaagtcttcctggaagtaattgtaagcatcctgaaataaaaaagcaagaatatgaagaagtagttcagactgttaatacagatttctctccatatctgatttcagataacttagaacagcctatgggaagtagtcatgcatctcaggtttgttctgagacacctgatgacctgttagatgatggtgaaataaaggaagatactagttttgctgaaaatgacattaaggaaagttctgctgtttttagcaaaagcgtccagaaaggagagcttagcaggagtcctagccctttcacccatacacatttggctcagggttaccgaagaggggccaagaaattagagtcctcagaagagaacttatctagtgaggatgaagagcttccctgcttccaacacttgttatttggtaaagtaaacaatataccttctcagtctactaggcatagcaccgttgctaccgagtgtctgtctaagaacacagaggagaatttattatcattgaagaatagcttaaatgactgcagtaaccaggtaatattggcaaaggcatctcaggaacatcaccttagtgaggaaacaaaatgttctgctagcttgttttcttcacagtgcagtgaattggaagacttgactgcaaatacaaacacccaggatcctttcttgattggttcttccaaacaaatgaggcatcagtctgaaagccagggagttggtctgagtgacaaggaattggtttcagatgatgaagaaagaggaacgggcttggaagaaaataatcaagaagagcaaagcatggattcaaacttaggtgaagcagcatctgggtgtgagagtgaaacaagcgtctctgaagactgctcagggctatcctctcagagtgacattttaaccactcagcagagggataccatgcaacataacctgataaagctccagcaggaaatggctgaactagaagctgtgttagaacagcatgggagccagccttctaacagctacccttccatcataagtgactcttctgcccttgaggacctgcgaaatccagaacaaagcacatcagaaaaagatgctgagtttgtgtgtgaacggacactgaaatattttctaggaattgcgggaggaaaatgggtagttagctatttctgggtgacccagtctattaaagaaagaaaaatgctgaatgagcatgattttgaagtcagaggagatgtggtcaatggaagaaaccaccaaggtccaaagcgagcaagagaatcccaggacagaaagatcttcagggggctagaaatctgttgctatgggcccttcaccaacatgcccacagatcaactggaatggatggtacagctgtgtggtgcttctgtggtgaaggagctttcatcattcacccttggcacaggtgtccacccaattgtggttgtgcagccagatgcctggacagaggacaatggcttccatgcaattgggcagatgtgtgaggcacctgtggtgacccgagagtgggtgttggacagtgtagcactctaccagtgccaggagctggacacctacctgataccccagatcccccacagccactactgactgcagccagccacaggtacagagccacaggaccccaagaatgagcttacaaagtggcctttccaggccctgggagctcctctcactcttcagtccttctactgtcctggctactaaatattttatgtacatcagcctgaaaaggacttctggctatgcaagggtcccttaaagattttctgcttgaagtctcccttggaaatctgccatgagcacaaaattatggtaatttttcacctgagaagattttaaaaccatttaaacgccaccaattgagcaagatgctgattcattatttatcagccctattctttctattcaggctgttgttggcttagggctggaagcacagagtggcttggcctcaagagaatagctggtttccctaagtttacttctctaaaaccctgtgttcacaaaggcagagagtcagacccttcaatggaaggagagtgcttgggatcgattatgtgacttaaagtcagaatagtccttgggcagttctcaaatgttggagtggaacattggggaggaaattctgaggcaggtattagaaatgaaaaggaaacttgaaacctgggcatggtggctcacgcctgtaatcccagcactttgggaggccaaggtgggcagatcactggaggtcaggagttcgaaaccagcctggccaacatggtgaaaccccatctctactaaaaatacagaaattagccggtcatggtggtggacacctgtaatcccagctactcaggtggctaaggcaggagaatcacttcagcccgggaggtggaggttgcagtgagccaagatcataccacggcactccagcctgggtgacagtgagactgtggctcaaaaaaaaaaaaaaaaaaaggaaaatgaaactagaagagatttctaaaagtctgagatatatttgctagatttctaaagaatgtgttctaaaacagcagaagattttcaagaaccggtttccaaagacagtcttctaattcctcattagtaataagtaaaatgtttattgttgtagctctggtatataatccattcctcttaaaatataagacctctggcatgaatatttcatatctataaaatgacagatcccaccaggaaggaagctgttgctttctttgaggtgatttttttcctttgctccctgttgctgaaaccatacagcttcataaataattttgcttgctgaaggaagaaaaagtgtttttcataaacccattatccaggactgtttatagctgttggaaggactaggtcttccctagcccccccagtgtgcaagggcagtgaagacttgattgtacaaaatacgttttgtaaatgttgtgctgttaacactgcaaataaacttggtagcaaacacttcaaaaaaaaaaaaaaaaaa

SEQ ID NO: 12999 - DNA, 2416 bp, Homo sapiens
ggagtgattgcccggcagagcgcgatactcgtttgtagtttcataaacattgatgttgggtcaatcatgttctcaatgtatttaaccatgtgtttttaaattttttaatttagttatcaaattgagaatctgatggtatggcattaatcaccttgaggaagaacctttatcgtttatctgattttcagatgcatagagctctggctgctttaaaaaataaacctctaaatcatgttcacaaggtagtcaaggagcgtctgtgcccttggttgtgttcacgacaacctgagcctttcggggtcaaattccatcatgcccattgtaaaaagtttcattcgaaaaatggaaatgaccttcatccactcggtggaccagtgttctctcaagtatctgactgcgacaggcttgaacaaaatgttaaaaatgaggagagtcagatgttttacaggagactgagcaacttgacttcatcagaagaagtgctaagttttataagcacgatggaaaccctgcctgacactatggcagcaggagctttacaacgaatttgtgaagtggaaaaaaaggatggtgatcaagggctgccaaaagaaatactggagaatagcatctttcaagctttatgctttcagtttgaaaaggagccctcacagctgtcaaacactagtttagtgactgctttgcaagctctgattctgttgcatgtggatcctcaaagtagcctgttgctgaacctggtggcagaatgccaaaatcgtctcagaaaaggtggcatggaagttcgcaatctttgtattcttggggaaagtctgattacactgcacagttcaggttgtgtgacactagaactcattataaatcaacttcaaggtgaaaaattggaaacatttaccccggaggatattgtggccctttatagaatcttgcaggcatgtactgaaaaagtggatgaacaccaaacatttttaaataagataaacaacttttccctatcaatagtttccaacctgagtcctaaattgattagccaaatgctcactgccctggtggttcttgatcaaagtcaagcatttcctctgattataaaattgggcaaatatgtcgtgaggcatgtcccacatttcactaacgaggagcttaggagagtcttggaggcgttcatatattttgggcaccatgacacattttttacaaaagccctagagcatcgtgtagctgcggtgtgcctcacgttggatcctgaagttgtctgcagggtcatggagtactgcagtagagaactgattctttcaaaacccatcctcaatgcagtggcagaaacttttgtttgccaaacagaaaaattttcacctcgtcagatttctgcgttaatggaaccatttgggaaactcaattatttgccaccaaatgcctctgctttatttagaaagctggaaaacgtgctattcactcatttcaattattttccacccaaatcattattgaaacttcttcattcatgttcacttaatgaatgccatccagtcaactttctggcaaaaatattcaagcctcttttccttcaacggctgcaaggtaaagaatctcatttggacacattgagtcgggcacaactgacccaacttttcttagcctcagtcctggaatgccctttctataagggtccaaaactccttcctaaatatcaagtgaagtcatttcttaccccatgctgttccctggagacccctgtggattctcagctttatagatatgtgaagattgggctgactaaccttttaggagcaagattatattttgctccaaaagtgttgacaccctattgttatacaatagatgttgaaattaaattagatgaagaaggatttgtattgccatccacagctaatgaagatatccataaaaggatagcactgtgtattgatggtccaaaaaggttttgctccaatagcaaacacttactggggaaagaagctattaaacaaagacacctacagttactcggttatcaagttgttcagatcccctatcatgagattgggatgctaaaatcaagacgtgaattggtggaatatttacaaagaaaactgttttctcaaaacactgttcattggttgcaagaatgaatactgacttcagaactcaaacaatggaagaacttgcatttttatggaactcagtattaaaagaaaaatataatgtgaattagccactttgcagaatatgttctagactggtgatctgaaagcatctgtagttttccttatactatgtatacatttattgtggtaaaatttaaaattaattttaatttaatactagtgtcatagatactttttgtacatcaaacaattgatcatgtgctgtaaaggaattcaatgaataaatgttatttttaagtaaaaaaaaaaaaaaa

SEQ ID NO: 13000 - DNA, 753 bp, Homo sapiens
atggacatgctccaggaccttgagtccctgcagtttgagtatggggttccagaggaagatcgtatctggctgtatttgcagggccgttctcggggactgatgatcgaggcttgtgcccatgcaaccttcttctgcaaactattatataatttgagagcatcattaaataagaatcaaagttccagacatctctcaattggctcccttaattcagccactcctgaagagtttaaggtgggcatcattggaggtggccaccttgggaagcagctggctggcacactgctgcagcttggccccatccctgctgaaagcctgcggatctccactcggaggccagagactctgggtgagctccagaagctgggaatcaaatgcttttaccataacgctgatctggtgagttgggccgatgtgatattcctctgctgcttgccgtctcagctgcctaatatctgcgtagaaatttacaccagccttgagaaggccagcattgtgtacagctttgtagctgccatcccactacccaggctgaaactactgttgaaccacaccaatatcttgcggcctcagtatcagtatgatgaagattctgtcagcgtctggggggccaataagggagtcatagctgctctccaagatcctacgattcttcaagctacctgtccctacagtcctgctggtcacggctcaacatatttctggcattcttttgaaaattactttcctgttggcccattgctatcttattaa

SEQ ID NO: 13001 - DNA, 5074 bp, Homo sapiens
tgtttcttagctagaggtacgtgtcacccagtacgcggctggagttttgcataaattattccgataaggagcggggcggggctctgtgcatagattagtcaaatgagcctgggagggagggaagccggctacgaattagcctaagttattaaagatggcgacggagcgcagtcgctccgcgatggactcgccggtcccggcctctatgttcgcccccgagcccagctccccgggggcggccagggccgcggcggccgccgcccgactccacggcggctttgactcggactgcagcgaggacggcgaggcgctcaacggcgagccagagctggacctcaccagcaagctggttctagtgagccctacatcagagcagtatgacagcctacttcggcagatgtgggagaggatggacgagggatgcggagagaccatatatgtcattgggcagggatcagatgggactgagtatgggctgagtgaagctgacatggaggcctcctacgccacagtgaagagcatggcggaacagatagaggccgatgtcatccttctgcgggaacggcaagaagctgggggccgcgtgcgtgattacctggtccggaaacgagtaggagacaatgacttcctggaggtcagggtagcagtggtgggcaacgtggatgctggcaaaagcacgcttctgggggtcctgacacatggggagctggacaatggccgaggctttgcccgccagaaactcttccgccacaaacatgaaattgaatctggtcgcaccagcagtgtgggcaacgacattctgggctttgacagtgaaggcaatgtagtgaacaagcctgacagccacggcggcagcctggagtggaccaagatctgtgagaagtccacgaaagtcattaccttcatcgacttggctggtcatgagaagtacctgaaaaccactgtcttcggcatgacaggccatctgcctgacttctgcatgctcatggtgggcagcaatgctggcatcgtggggatgaccaaagaacacctgggcttggcactggcactcaatgtacctgtctttgtggtagtcaccaagattgacatgtgtcctgccaacatcctgcaagaaaccctgaagctgttacagcgcctgctgaagtcaccaggctgccggaagatccccgtgctggtgcagagcaaagatgatgtgattgtcacagcctccaacttcagctctgaaaggatgtgcccgatattccagatctccaacgttacaggcgagaacctagatctgctgaagatgttcctcaacctcctctccccccgcaccagctacagggaggaggagcctgctgagtttcagattgatgacacctactccgtcccgggtgtggggacagtggtttcggggacaacactgagaggcctgatcaagctgaatgacacgctgctgctgggcccagaccccttgggtaacttcctgtccattgctgtcaaatccatccatcgcaagcgcatgcctgtcaaggaggtgcggggtggccagacagcatcctttgcgctgaagaagatcaagcgctcgtccatccggaagggcatggtgatggtttccccacgtttgaatccccaagcctcctgggagtttgaggccgagattctcgtcctccaccaccccaccacaattagcccgcgctaccaggccatggtgcactgtgggagcatcaggcagacagccaccattctgagcatggacaaggactgtctgcgcactggggacaaggccactgtacacttccgcttcatcaagacccctgagtacctgcacatagaccagcggctggtgttccgggaaggccgcaccaaggctgtcggcaccatcaccaagctcctccagaccaccaacaactccccaatgaactccaagccgcagcagattaaaatgcagtcgacgaaaaagggccccctgacgaaacgagacgaggggggcccgtctggtgggccagcagtaggagcacccccacctggagatgaagcctcctctgtaggggcagggcaaccagctgcgtccagcaatctccagcctcagcctaagcccagcagtggaggccggcgacgagggggccagcgccacaaggtgaagtcccagggggcctgtgtgactcctgccagcggctgctgaaccttcccctggcccaccctcaccacccaaggggtcatcatctctggccaccactccaccagatgggcagagcagctatgaccgccacccagccctcccgctcaggccacagccggagcctccgcattgcccccacccccattttccaggggggttgtaatttataagctgacgaaggtagccagacttccggaggactgaccatctctcactgtcctccccaccttcttcctcactcacacattttttgtacatctgggcccttagtttttattctgtttattatatgtctctgtctctctctattgtgtgtgtgtgtgtgtgtgtgtgtgtgtgtgtgtgtgtggtgcaggagtgccacccccagggccctgtcaacctctcttttctcctccatggctgtctgcctgcgtatctgtctctgagaatcctcggggcggtcaggggatgtcaggaggggaaggagccgccctccctatcttgctgctcctcttggcactcaggggcaccttccatggagccagaccgggtggaggggcttctgggatttggtgtctgctgctgccagagcaggaacccccagtctaggacttgggcattttaacagggagaaagtagtggcttcccttttctctctctcctcctttttccctttaagcccacagattcaggtcatgccaaaagctctctggttgtaacctggagacatgtggaggggaatggcgatgggattataggactctccccatctcgggccctgaccctgacccttgccaccaacccaaagacagctggtgggtttccccttggagacaatcctgcgtttgcctgggccggccctggctgccctcagctttcgctgatctgcccggcctggagcctcccatcaccccgcttcttgttgggcctcaggcactggttaccagaagggggtctgggtctgctcaggatcatgttttgtagcacctcctgttggaggggtggagggatgttcccctgagccaggctgagactagaaccccatcttccctgagccaggctgagactagaaccccatcttccccaccacgccacccctgtggctgctacaggagcacagtagtgaaggcctgagctccaggtttgaaagacccaactggagcgtggggcgggcaggcaggggttagtgaaaggacacttccagggttaggacagagcatttagccttctggaagaacccctgcctggggtgggactgtgcaggccagagaaggtggcatgggcctgaacccacctggactgacttctgcactgaagccacagatggagggtaggctggtgggtgggggtggttcgttctctagccggggcagacacccagctggctgggtccttcctcagccttgcctcctcctgtccccaaccctttcctttcctcctgcttgcggactgctggtcccctctccttccctccttccagctgtttctagttaccacctacccctggccgtggactgatcagaccagcattcaaaataaaagtttgttccaagttgacagtgtggtgctccctgcccagcccctccaggtggaggtgctgccacgggaacgcagttgctctgcctgccctggggcccctggcgacagctgggagcagggcagtgctgtgaggagcccagctttcccagtcaggcaggcatggcttccgtgttcaggctccctcaccagctggtgacacgggacaagcttacaaaccttctctgaacctcagttttctcatttacaagaggcaaagccatccatcaccttgtgtggattcagagaatgtgaggccctggggtgtcctacacaagggaaaggcttgctcagtgagcggtctgcacaccgttagccaccctgccacctctgtgccctgggcaggctccaaaggaaagctctggctgggactgccaggagtctcacacgctcctgttgacattcccagcagccgcccctgaggtcgatgtttgttctgtttttctttttcttttttgagacggagtctcgctgtgttgccaggctggagtgcagtggtgtgatctctgctcactgcaacctccgcctgccagtttcaagtgattctctgcctcagccttctgagtagctgggactacaggtgcacgccaccacgcccagctaactttttgtattttagtagagacagggtttcgccatgtcggccagggtggtcttgatctcctgacctcatgatccacccgcctcagcctcccaaagtgctgggattacaggtatgagccaccgcaccgggcctgttctatttttctagttaagggaactgaagctcagagaggtgtcaccagcaggtgttcattcccatgccagccttgccccccggcttttcccaggcaggctcctgcgtgcccactggctccagcctggtcctctgtctcttggctgcttcactcctgctctttgtcccgactctggccctgcttacaggggccactacctgctggtgcctccataacaagcgtctggcgttgagacccctggcatggcaggggctttggggtctggtttccacaaggcttagccatggcagaacctcgttttattttaactctttgcccctacaaacaaacagcagtacttgccagaaccattcttgggattcaggagctcgggcgactgccttggcctctggccgcacccaggagggtggggttggatctgtgtagttgccaggcccacacctgccagcagggggctgactggatccatgctttactgtgtttaatgggggtaacaggggtccctacagccctcccagctaaacatttggaacaaaacaccagcccttttgtagtggatgcagaataaaattgttaatccaatcacctccaaaaaaaaaaaaaaaaaaaaaaaaaaaaa

SEQ ID NO: 13002 - DNA, 2665 bp, Homo sapiens
gtgggcggtgcactgggtcagtcccgcgatagcttcaggcctggcggcggcttccaagctaaggaacggtttggggcagtgtcgttcccggaggtcggccgccgttacccgctcaccagctacgcggcgcgtcaggtccgcggaggcgcgggctcggggcgcctgcgggacggtgaggccctgctgaggactccggacactgcccatctctaagataagaacctggaaaggggactctgttggccattggaaattgcagaataatgtctcaggtgacatttagtgatgtggctatagacttctctcatgaagagtgggcatgcctagattctgctcagagggacttatacaaggatgtgatggtccagaattatgagaacctggtctctgtaggtctttccgtaactaagccatatgtgatcatgttattggaggatggaaaagagccctggatgatggagaaaaaactgtcaaaagattgggaatcaagatgggaaaacaaggaattatcaacaaagaaggatatttatgatgaagattcaccccaaccagtaacaatggaaaaagttgtaaaacaaagttatgaattttcaaattctaataagaatttggaatatacagaatgcgacacatttagaagcacctttcattcaaagtctactctttctgaaccacaaaacaattctgctgaagggaattcacacaaatatgatatattaaagaagaatttatcaaaaaagtcagttataaaaagtgagagaataaatggtggaaagaaacttttaaattctaataaaagtggggcagccttcaaccagagcaaatctcttacccttccccagacttgtaatagagagaaaatctatacatgcagtgaatgtgggaaagcctttggcaaacagtcaatcctcagtcgccactggagaattcatacaggagagaagccctatgaatgtcgtgaatgtgggaagacttttagccatggttcatcccttacacgacatcagataagccatagtggagagaaaccttacaaatgcattgaatgtgggaaggcctttagccatggctcatcacttactaaccatcagagcactcacacgggagagaaaccgtatgaatgtatgaactgtggaaagtcttttagtcgtgtgtcccttctcattcagcatctaagaattcatacgcaagaaaaacgctatgagtgtcgtatatgtggaaaggccttcattcatagttcgtctctcattcaccatcagaaaagccatactggagagaagccttatgaatgtagagaatgtgggaaagctttctgctgtagctcacaccttactcaacatcaaagaattcacagtatgaagaaaaaatatgaatgcaacaaatgtctcaaggtctttagtagcttctcatttcttgttcaacatcagagtattcatactgaagaaaaaccgtttgaagtttagaaatgcaggaaatccttcaaccagcttgaatcactgaatatgcatttgagaaatcacattagattgaaaccctacgaatgcagtatatgtgggaaagcctttagtcataggtcgtccctgcttcaacatcacagtattcatactggagagaaaccttacgaatgtattaaatgtgggaagaccttcagctgtagttcaaaccttactgtacatcagagaattcatactggagaaaagccatataaatgtagtgagtgtgggaaagcttttagcaaaggctcgaatcttactgcccatcaaagagtacataatggagagaaacccaatagtgtggtaagtgtggaaaagcctttagatcatatgaatccctatacatgtgagaaatcttacagaagagaagcagtgtttatcacggtaaacttcattcatagatcctcccttatttaacatcagaaaaatgtatactggggaaaagttgtatgaaggtggtgaacatgggagacttttagcaatgatgcagatttttttattagagtttatactgtagagaaatcatatgaagtcaataaatgtgggaaagcctttgtcagtattaatcccttaattgacctaagtatactcacactaggaaaaatctgtgtacatgtagcaaatgtgggaaagactataggcaataggaatctcctgcaaactcctacaggagaaaagttgtatgaatgtggaaactttagaaattgaaggaatttttcagttccaagtgcatcccttattctataggaaataaactggagacaaatctcatttaagagatgcagcaaagtgttcactaagagtgtttatcttgccagacataagaagatgaatggtagagcaacctgaaggatttagaaattacatataaatctttgcagttatgctatttgtaaacaggattatataggagagcaaataaacataagtatgcatttcttagagcagtagcttgcagtttcagttgagttctacttagaaattctttttagctagtgggcatgtgaagatatttagtcacccagaggagccagtaaatgttataatgttaaaaattaaagctgcaaaagaaataaaatggtgttaataaaaatttggcatctaataaaatcattttgtatatcatgaacaaaaaaaaaaaaaaaaaaaaaaaaaaaaaaaaaaaaaaaaaa

SEQ ID NO: 13003 - DNA, 4314 bp, Homo sapiens
ggaagttcttgggagcgccagttccgtctgtgtgttcgagtggacaaaatggcgaagatcgccaagactcacgaagatattgaagcacagattcgagaaattcaaggcaagaaggcagctcttgatgaagctcaaggagtgggcctcgattctacaggttattatgaccaggaaatttatggtggaagtgacagcagatttgctggatacgtgacatcaattgctgcaactgaacttgaagatgatgacgatgactattcatcatctacgagtttgcttggtcagaagaagccaggatatcatgcccctgtggcattgcttaatgatataccacagtcaacagaacagtatgatccatttgctgagcacagacctccaaagattgcagaccgggaagatgaatacaaaaagcataggcggaccatgataatttccccagagcgtcttgatccttttgcagatggagggaaaacccctgatcctaaaatgaatgctaggacttacatggatgtaatgcgagaacaacacttgactaaagaagaacgagaaattaggcaacagctagcagaaaaagctaaagctggagaactaaaagtcgtcaatggagcagcagcgtcccagcctccatcaaaacgaaaacggcgttgggatcaaacagctgatcagactcctggtgccactcccaaaaaactatcaagttgggatcaggcagagacccctgggcatactccttccttaagatgggatgagacaccaggtcgtgcaaagggaagcgagactcctggagcaaccccaggctcaaaaatatgggatcctacacctagccacacaccagcgggagctgctactcctggacgaggtgatacaccaggccatgcgacaccaggccatggaggcgcaacttccagtgctcgtaaaaacagatgggatgaaacccccaaaacagagagagatactcctgggcatggaagtggatgggctgagactcctcgaacagatcgaggtggagattctattggtgaaacaccgactcctggagccagtaaaagaaaatcacggtgggatgaaacaccagctagtcagatgggtggaagcactccagttctgacccctggaaagacaccaattggcacaccagccatgaacatggctacccctactccaggtcacataatgagtatgactcctgaacagcttcaggcttggcggtgggaaagagaaattgatgagagaaatcgcccactttctgatgaggaattagatgctatgttcccagaaggatataaggtacttcctcctccagctggttatgttcctattcgaactccagctcgaaagctgacagctactccaacacctttgggtggtatgactggtttccacatgcaaactgaagatcgaactatgaaaagtgttaatgaccagccatctggaaatcttccatttttaaaacctgatgatattcaatactttgataaactattggttgatgttgatgaatcaacacttagtccagaagagcaaaaagagagaaaaataatgaagttgcttttaaaaattaagaatggaacaccaccaatgagaaaggctgcattgcgtcagattactgataaagctcgtgaatttggagctggtcctttgtttaatcagattcttcctctgctgatgtctcctacacttgaggatcaagagcgtcatttacttgtgaaagttattgataggatactgtacaaacttgatgacttagttcgtccatatgtgcataagatcctcgtggtcattgaaccgctattgattgatgaagattactatgctagagtggaaggccgagagatcatttctaatttggcaaaggctgctggtctggctactatgatctctaccatgagacctgatatagataacatggatgagtatgtccgtaacacaacagctagagcttttgctgttgtagcctctgccctgggcattccttctttattgcccttcttaaaagctgtgtgcaaaagcaagaagtcctggcaagcgagacacactggtattaagattgtacaacagatagctattcttatgggctgtgccatcttgccacatcttagaagtttagttgaaatcattgaacatggtcttgtggatgagcagcagaaagttcggaccatcagtgctttggccattgctgccttggctgaagcagcaactccttatggtatcgaatcttttgattctgtgttaaagcctttatggaagggtatccgccaacacagaggaaagggtttggctgctttcttgaaggctattgggtatcttattcctcttatggatgcagaatatgccaactactatactagagaagtgatgttaatccttattcgagaattccagtctcctgatgaggaaatgaaaaaaattgtgctgaaggtggtaaaacagtgttgtgggacagatggtgtagaagcaaactacattaaaacagagattcttcctcccttttttaaacacttctggcagcacaggatggctttggatagaagaaattaccgacagttagttgatactactgtggagttggcaaacaaagtaggtgcagcagaaattatatccaggattgtggatgatctgaaagatgaagccgaacagtacagaaaaatggtgatggagacaattgagaaaattatgggtaatttgggagcagcagatattgatcataaacttgaagaacaactgattgatggtattctttatgctttccaagaacagactacagaggactcagtaatgttgaacggctttggcacagtggttaatgctcttggcaaacgagtcaaaccatacttgcctcagatctgtggtacagttttgtggcgtttaaataacaaatctgctaaagttaggcaacaggcagctgacttgatttctcgaactgctgttgtcatgaagacttgtcaagaggaaaaattgatgggacacttgggtgttgtattgtatgagtatttgggtgaagagtaccctgaagtattgggcagcattcttggagcactgaaggccattgtaaatgtcataggtatgcataagatgactccaccaattaaagatctgctgcctagactcacccccatcttaaagaacagacatgaaaaagtacaagagaattgtattgatcttgttggtcgtattgctgacaggggagctgaatatgtatctgcaagagagtggatgaggatttgctttgagcttttagagctcttaaaagcccacaaaaaggctattcgtagagccacagtcaacacatttggttatattgcaaaggccattggccctcatgatgtattggctacacttctgaacaacctcaaagttcaagaaaggcagaacagagtttgtaccactgtagcaatagctattgttgcagaaacatgttcaccctttacagtactccctgccttaatgaatgaatacagagttcctgaactgaatgttcaaaatggagtgttaaaatcgctttccttcttgtttgaatatattggtgaaatgggaaaagactacatttatgccgtaacaccgttacttgaagatgctttaatggatagagaccttgtacacagacagacggctagtgcagtggtacagcacatgtcacttggggtttatggatttggttgtgaagattcgctgaatcacttgttgaactatgtatggcccaatgtatttgagacatctcctcatgtaattcaggcagttatgggagccctagagggcctgagagttgctattggaccatgtagaatgttgcaatattgtttacagggtctgtttcacccagcccggaaagtcagagatgtatattggaaaatttacaactccatctacattggttcccaggacgctctcatagcacattacccaagaatctacaacgatgataagaacacctatattcgttatgaacttgactatatcttataattttattgtttattttgtgtttaatgcacagctacttcacaccttaaacttgctttgatttggtgatgtaaacttttaaacattgcagatcagtgtagaactggtcatagaggaagagctagaaatccagtagcatgatttttaaataacctgtctttgtttttgatgttaaacagtaaatgccagtagtgaccaagaacacagtgattatatacactatactggagggatttcatttttaattcatctttatgaagatttagaactcattccttgtgtttaaagggaatgtttaattgagaaataaacatttgtgtacaaaatgctaaaaaaaaaaaaaaaaaaaaaaaa

SEQ ID NO: 13004 - DNA, 4403 bp, Homo sapiens
cggtgcggagcctgtctccttcactggatcccgcattttcagcgcgttgcatcacctccgtgcgcccggttgcagcgtggacgccggatgagttgcttttaggcttgctggcccgcggggctgtccaggcacgcgaggcccctcaacaaaatgcttcaacaagttccagaaaacataaattttcctgctgaagaagagaaaatcttggagttttggactgaatttaattgttttcaggaatgcttaaagcaatcaaaacataaaccaaaatttaccttctatgatggtcctccttttgcaactggactgcctcactatggacatatacttgcgggtacaattaaagatatagttacaagatatgctcaccagagtgggtttcatgttgacagaagatttggatgggattgccatggcttacctgtggaatatgaaattgataagacactgggaatcagaggaccagaggatgtggccaaaatggggattacagagtataacaatcagtgccgagcaattgtgatgagatattctgctgagtggaagtctactgttagcagacttggccgatggattgactttgacaatgactataaaactctgtatccacaattcatggaatcagtctggtgggtcttcaaacaactctatgataaaggccttgtttatagaggtgtgaaagtcatgcccttctctacggcatgtaacactccactttccaacttcgagtcacaccagaattataaggatgttcaagatccttcagtatttgtaactttccctttggaagaagatgaaactgtatctttagttgcttggacaaccactccctggactctacctagtaaccttgctgtgtgtgttaatccagaaatgcaatatgtgaaaattaaagatgttgccagaggacgattactcattttaatggaagccagattgtcagccctctataaattggagagtgactatgagatccttgaaagatttcctggtgcctatcttaaaggcaagaagtacaggcccctgtttgactatttcctgaagtgtaaagagaatggcgctttcactgtgcttgttgacaactatgtgaaggaagaagaaggcacaggggttgtccaccaagctccttacttcggtgctgaggactatcgggtctgtatggactttaacattattcggaaagactcactccctgtttgccctgtggatgcttcaggctgcttcacaacggaggtgacagatttcgcaggacagtatgtgaaggatgctgacaaaagtatcatcaggactttgaaggaacaaggccgacttctggttgccaccaccttcactcacagctaccctttttgctggagatcagacactcctctaatttacaaagcagtgcccagctggtttgtgcgagtggagaacatggtggaccagctcctaaggaacaatgacctgtgctactgggtcccagagttggtacgagaaaaacgatttggaaattggctgaaagatgcacgtgactggacaatttccagaaacagatactggggcacccccatcccactgtgggtcagcgatgactttgaggaggtggtatgcattgggtcagtggcggaacttgaagaactgtcaggagcaaagatctcagatctccacagagagagtgttgaccacctgaccattccttcacgctgtgggaagggatccttgcaccgcatctctgaagtgtttgactgttggtttgagagtggcagcatgccctatgctcaggttcattacccgtttgaaaacaagagggagtttgaggatgcttttcctgcagatttcattgccgagggcatcgaccaaaccagaggatggttttataccctgctggtgctggccacggccctctttggacaaccgcctttcaagaacgtaattgtgaatgggcttgtcctggcaagtgatggccaaaaaatgagcaaacggaaaaagaattatccagatccagtttccatcatccagaagtatggtgctgatgccctcagattatatctgattaactcccctgtggtgagagcagaaaacctccgctttaaagaagagggtgtgcgggacgtccttaaggatgtactgctcccatggtacaatgcctatcgcttcttaatccagaacgttctgaggctccagaaggaggaagaaatagaatttctctacaatgagaacacggttagagaaagccccaacattacagaccggtggatcctgtccttcatgcagtctctcattggcttctttgagactgaaatggcagcttataggctttatactgtggtgcctcgcctggtcaagtttgtagatattctgaccaattggtatgttagaatgaaccgcagaagattaaagggtgaaaatgggatggaggattgtgtcatggccctagaaaccttgtttagtgttctgctttctctttgcagacttatggctccctacacaccttttctcactgaattgatgtaccagaatctaaaggtgctgattgaccctgtttctgttcaggacaaggacacactcagcattcactacctcatgctgccccgtgttcgagaagaattgattgacaagaaaacagagagtgcagtatctcagatgcagtctgtgattgaacttggaagagtgatcagagaccgaaaaactattcccataaagtatcctttgaaagaaattgtggttatccatcaagatccagaagctcttaaagatatcaagtctttggagaagtatatcattgaggaactcaatgttcgaaaagttacactgtctacagataaaaacaagtatggcattcggctaagggcagaaccagatcacatggtcctggggaagcgtctgaagggagcctttaaggcagtgatgacgtccatcaagcagttgagcagtgaggagctggagcagttccagaagactgggaccattgttgtggaaggccatgaattgcacgatgaagacatccgcctcatgtacacctttgatcaggccacaggtgggactgcgcaatttgaagcacactcagatgctcaggctttggtcctcttagatgtcactcctgaccagtcaatggtagatgaaggaatggctcgggaagtcatcaatcgcatacagaaacttcgcaaaaagtgcaatctggttccaactgatgaaatcacagtgtactataaagcaaagtctgaaggaacatatctgaatagtgttattgaaagccacacagagttcatatttaccaccataaaggctcccttgaaaccatatccagtttctccatcggataaagtccttattcaagaaaaaacacagttgaagggatctgaactggaaattacactcaccagaggatcttcccttcctggtcctgcttgtgcatatgtcaatcttaacatttgtgcaaatggcagtgaacaaggtggagtattgctcctggaaaatccaaaaggtgacaataggttggaccttttaaagctgaagagtgttgtcactagcatttttggtgtgaaaaatacagagctggctgtcttccatgatgaaacagaaatacaaaaccaaactgacttactgagtcttagtggaaaaacactttgtgtgactgcaggatcggctccctctctgatcaacagttctagtactcttctttgtcagtatatcaacctacagctcctgaatgcaaagccacaagagtgtttaatggggacagtgggcactctcctgcttgaaaacccacttgggcagaatggactcacccaccaaggtcttctgtatgaagcagccaaggtgtttggccttcggagcaggaagctaaagctgtttctgaatgagacccaaacgcaggaaattacagaagacatccccgtgaagactttgaatatgaagactgtgtatgtttctgtgttaccaacaacagcagacttctagcatgtacttatcaatgttgttcggtcagcccttccctaattacacctatcccctacacatacatgcacatagacacacacatgaacacactgaagatatttccttcaggtgtgtgtaaaatatgctgcttggattgaaattcaaatgggattgattagtcaagtaacttgagacctcacagtaatcttcacacttaaccttagacacctatgcagtcatgttgggagcaggttacaatgttacttcagcccacagtttatttctatacttgagttcttaagtacagaagatagaagtgatttaaatggcatagtatatatatcattttctggccttttaaaatttatttgagacctcttgatgaaatggacatattatatatttctgccacctggattttcctggataatttgatggaatattttaagtttcagtaaatcagaacaataaacaaactcagatat

SEQ ID NO: 13005 - DNA, 4510 bp, Homo sapiens
cggttgcagcgtggacgccggatgagttgcttttaggcttgctggcccgcggggctgtccaggcacgcgaggcccctcaggtacgccctctcttccctgcaggatccggccctcaaagacgagggtcacgcacgcgttacaaccccgaaacagtagcacaagatttaatttttaaaagagcgtgtttcttcggggcttgccgttcgttcgtttccagcctcaggaatttatggtcgcctttttgaatgagcaacaaaatgcttcaacaagttccagaaaacataaattttcctgctgaagaagagaaaatcttggagttttggactgaatttaattgttttcaggaatgcttaaagcaatcaaaacataaaccaaaatttaccttctatgatggtcctccttttgcaactggactgcctcactatggacatatacttgcgggtacaattaaagatatagttacaagatatgctcaccagagtgggtttcatgttgacagaagatttggatgggattgccatggcttacctgtggaatatgaaattgataagacactgggaatcagaggaccagaggatgtggccaaaatggggattacagagtataacaatcagtgccgagcaattgtgatgagatattctgctgagtggaagtctactgttagcagacttggccgatggattgactttgacaatgactataaaactctgtatccacaattcatggaatcagtctggtgggtcttcaaacaactctatgataaaggccttgtttatagaggtgtgaaagtcatgcccttctctacggcatgtaacactccactttccaacttcgagtcacaccagaattataaggatgttcaagatccttcagtatttgtaactttccctttggaagaagatgaaactgtatctttagttgcttggacaaccactccctggactctacctagtaaccttgctgtgtgtgttaatccagaaatgcaatatgtgaaaattaaagatgttgccagaggacgattactcattttaatggaagccagattgtcagccctctataaattggagagtgactatgagatccttgaaagatttcctggtgcctatcttaaaggcaagaagtacaggcccctgtttgactatttcctgaagtgtaaagagaatggcgctttcactgtgcttgttgacaactatgtgaaggaagaagaaggcacaggggttgtccaccaagctccttacttcggtgctgaggactatcgggtctgtatggactttaacattattcggaaagactcactccctgtttgccctgtggatgcttcaggctgcttcacaacggaggtgacagatttcgcaggacagtatgtgaaggatgctgacaaaagtatcatcaggactttgaaggaacaaggccgacttctggttgccaccaccttcactcacagctaccctttttgctggagatcagacactcctctaatttacaaagcagtgcccagctggtttgtgcgagtggagaacatggtggaccagctcctaaggaacaatgacctgtgctactgggtcccagagttggtacgagaaaaacgatttggaaattggctgaaagatgcacgtgactggacaatttccagaaacagatactggggcacccccatcccactgtgggtcagcgatgactttgaggaggtggtatgcattgggtcagtggcggaacttgaagaactgtcaggagcaaagatctcagatctccacagagagagtgttgaccacctgaccattccttcacgctgtgggaagggatccttgcaccgcatctctgaagtgtttgactgttggtttgagagtggcagcatgccctatgctcaggttcattacccgtttgaaaacaagagggagtttgaggatgcttttcctgcagatttcattgccgagggcatcgaccaaaccagaggatggttttataccctgctggtgctggccacggccctctttggacaaccgcctttcaagaacgtaattgtgaatgggcttgtcctggcaagtgatggccaaaaaatgagcaaacggaaaaagaattatccagatccagtttccatcatccagaagtatggtgctgatgccctcagattatatctgattaactcccctgtggtgagagcagaaaacctccgctttaaagaagagggtgtgcgggacgtccttaaggatgtactgctcccatggtacaatgcctatcgcttcttaatccagaacgttctgaggctccagaaggaggaagaaatagaatttctctacaatgagaacacggttagagaaagccccaacattacagaccggtggatcctgtccttcatgcagtctctcattggcttctttgagactgaaatggcagcttataggctttatactgtggtgcctcgcctggtcaagtttgtagatattctgaccaattggtatgttagaatgaaccgcagaagattaaagggtgaaaatgggatggaggattgtgtcatggccctagaaaccttgtttagtgttctgctttctctttgcagacttatggctccctacacaccttttctcactgaattgatgtaccagaatctaaaggtgctgattgaccctgtttctgttcaggacaaggacacactcagcattcactacctcatgctgccccgtgttcgagaagaattgattgacaagaaaacagagagtgcagtatctcagatgcagtctgtgattgaacttggaagagtgatcagagaccgaaaaactattcccataaagtatcctttgaaagaaattgtggttatccatcaagatccagaagctcttaaagatatcaagtctttggagaagtatatcattgaggaactcaatgttcgaaaagttacactgtctacagataaaaacaagtatggcattcggctaagggcagaaccagatcacatggtcctggggaagcgtctgaagggagcctttaaggcagtgatgacgtccatcaagcagttgagcagtgaggagctggagcagttccagaagactgggaccattgttgtggaaggccatgaattgcacgatgaagacatccgcctcatgtacacctttgatcaggccacaggtgggactgcgcaatttgaagcacactcagatgctcaggctttggtcctcttagatgtcactcctgaccagtcaatggtagatgaaggaatggctcgggaagtcatcaatcgcatacagaaacttcgcaaaaagtgcaatctggttccaactgatgaaatcacagtgtactataaagcaaagtctgaaggaacatatctgaatagtgttattgaaagccacacagagttcatatttaccaccataaaggctcccttgaaaccatatccagtttctccatcggataaagtccttattcaagaaaaaacacagttgaagggatctgaactggaaattacactcaccagaggatcttcccttcctggtcctgcttgtgcatatgtcaatcttaacatttgtgcaaatggcagtgaacaaggtggagtattgctcctggaaaatccaaaaggtgacaataggttggaccttttaaagctgaagagtgttgtcactagcatttttggtgtgaaaaatacagagctggctgtcttccatgatgaaacagaaatacaaaaccaaactgacttactgagtcttagtggaaaaacactttgtgtgactgcaggatcggctccctctctgatcaacagttctagtactcttctttgtcagtatatcaacctacagctcctgaatgcaaagccacaagagtgtttaatggggacagtgggcactctcctgcttgaaaacccacttgggcagaatggactcacccaccaaggtcttctgtatgaagcagccaaggtgtttggccttcggagcaggaagctaaagctgtttctgaatgagacccaaacgcaggaaattacagaagacatccccgtgaagactttgaatatgaagactgtgtatgtttctgtgttaccaacaacagcagacttctagcatgtacttatcaatgttgttcggtcagcccttccctaattacacctatcccctacacatacatgcacatagacacacacatgaacacactgaagatatttccttcaggtgtgtgtaaaatatgctgcttggattgaaattcaaatgggattgattagtcaagtaacttgagacctcacagtaatcttcacacttaaccttagacacctatgcagtcatgttgggagcaggttacaatgttacttcagcccacagtttatttctatacttgagttcttaagtacagaagatagaagtgatttaaatggcatagtatatatatcattttctggccttttaaaatttatttgagacctcttgatgaaatggacatattatatatttctgccacctggattttcctggataatttgatggaatattttaagtttcagtaaatcagaacaataaacaaactcagatat

SEQ ID NO: 13006 - DNA, 1021 bp, Homo sapiens
tgtgtcacttccggcctccctttagctgccatcttgcgtccccgcgtgtgtgcgcctaatctcaggtggtccacccgagaccccttgagcaccaaccctagtcccccgcgcggccccttattcgctccgacaagatgaaagaaacaatcatgaaccaggaaaaactcgccaaactgcaggcacaagtgcgcattggtgggaaaggaactgctcgcagaaagaagaaggtggttcatagaacagccacagcagatgacaaaaaacttcagttctccttaaagaagttaggggtaaacaatatctctggtattgaagaggtgaatatgtttacaaaccaaggaacagtgatccactttaacaaccctaaagttcaggcatctctggcagcgaacactttcaccattacaggccatgctgagacaaagcagctgacagaaatgctacccagcatcttaaaccagcttggtgcggatagtctgactagtttaaggagactggccgaagctctgcccaaacaatctgtggatggaaaagcaccacttgctactggagaggatgatgatgatgaagttccagatcttgtggagaattttgatgaggcttccaagaatgaggcaaactgaattgagtcaacttctgaagataaaacctgaagaagttactgggagctgctattttatattatgactgctttttaagaaatttttgtttatggatctgataaaatctagatctctaatatttttaagcccaagccccttggacactgcagctcttttcagtttttgcttatacacaattcattctttgcagctaattaagccgaagaagcctgggaatcaagtttgaaacaaagattaataaagttctttgcctagtatacagttttatttttttatttcattgacaccgatctgtacacagtaaaaaaaattgcttatagaaagctaatcatggcatgtaatatggctgataacctttggaatttgattaaagatttaaaatcacaaaaaaaaaaaaa

SEQ ID NO: 13007 - DNA, 6972 bp, Homo sapiens
ggcatggaacctaaagactagaggcggttgtgtgagtcaggaagaggggccagatatctgagtgttcctctttagtttcttcaattgcagataatatggtgtctaattttatgttgttcaggaaagacagtggttcctgactcaggaagacagtctcagaaacatgtggaatgatattgagctgctaacaaatgatgataccggaagtgggtacctgagtgtcggttcaagaaaagaacatggaactgctttatatcaagtagatttgctagtgaagatctcttctgaaaaggcctcattaaatccaaagatacaggcatgcagcttaagtgatgggtttattattgtagccgaccaatcagtgatattgcttgacagtatttgtagatcacttcaattgcatcttgtctttgatactgaagtggatgtagttggcctttgtcaagaaggaaagtttcttttggttggcgagagaagtggcaacctacatcttattcatgtaacatcaaaacaaacactactcactaatgcatttgttcagaaagctaacgatgaaaatcggcggacttaccagaatcttgtcattgagaaggatggttcaaatgaaggtacctattatatgctacttcttacatacagtggatttttttgtattacaaaccttcagcttttaaaaattcaacaagcaattgagaatgtagacttcagtacagcaaaaaagttacaaggacaaatcaagtccagttttatttctactgaaaattatcatactcttggttgtctcagtcttgtggctggagatttagcaagtgaagttcctgtgataattgggggaaccggtaattgtgcattctcaaaatgggaaccagattcttccaagaaaggaatgacagttaagaaccttattgatgcagagattattaaaggtgcaaagaagttccagctgatagacaatctactttttgttcttgatactgataacgtgctgagtttatgggatatttacactctaactcctgtatggaactggccctctcttcacgtagaagagtttcttcttactacagaagcagactctccttcatcagtcacgtggcaaggaattacaaatctcaaattaatagctctgacagcttcagctaataagaagatgaaaaacctcatggtttattcattacctacaatggaaatactatattctttggaagtatctagtgtttcttctctggtccaaacaggaattagcacagataccatataccttttagaaggagtttgcaaaaatgatccaaaattgtctgaagactcagtctctgtgttagtactcagatgtcttacggaagctttaccagaaaacagattgagtcggttacttcacaaacacagatttgctgaagctgagagttttgccattcagtttggactagatgttgagcttgtttacaaggtcaagtcaaatcatatattggagaaactggcattgagttctgtggatgccagtgaacagaccgaatggcaacaacttgtagacgacgctaaggaaaatctacataagatccaggatgatgaatttgtggtgaattactgcctgaaagctcagtggataacctatgaaaccactcaagagatgctgaattatgccaaaaccaggcttttgaagaaagaagataaaactgctctcatttattctgatggcttgaaagaggtgctaagagctcatgcaaaattgactactttttatggagcatttggaccagaaaaattcagtggcagttcttggattgaatttctaaataatgaagatgatcttaaagatatttttttacagctaaaagaaggaaaccttgtttgtgcacagtatctttggcttcgacatcgggcaaactttgaaagcagatttgatgtgaaaatgctggagagcttgctcaactcaatgtctgcatcagtctctttgcaaaagctgtgtccatggtttaaaaatgatgtgattccatttgtaagaaggactgtgcctgaaggacagataattcttgcaaaatggttggaacaagcagccaggaaccttgaattaactgataaggcaaattggccagaaaatggacttcaattggcagagatattttttacagcagaaaaaacagacgagttgggattggcatcttcctggcattggatttccttgaaagattatcagaacacagaggaagtatgtcagctaaggactttggtaaataacttgcgagagttgatcacgttgcataggaagtacaactgcaaattagccctctctgattttgagaaggaaaatacaaccaccatagtgttccgaatgtttgataaagtgctggccccagagcttattccctccatcttagagaagtttataagagtttacatgagagaacatgacttgcaagaggaggaacttctcttgctgtacatagaggatttactgaatagatgcagctcaaagtccacatcactctttgaaacagcatgggaagcaaaggccatggcagtaatagcgtgtttatctgacacggacctcatatttgatgccgtgctcaagatcatgtatgcggcagtggttccttggagtgcagctgtggagcaactggtgaaacagcacctggaaatggaccatcccaaagtcaagttattacaggaaagttacaaactaatggagatgaaaaaacttttacgaggctatggaataagagaggtaaatctcttaaacaaggaaataatgagagtggttagatacattctcaaacaagatgtcccatcttctttagaagatgctttaaaggtagcccaagcgtttatgttatctgatgatgagatctacagtctaagaattattgacctgattgatagagaacagggtgaagactgtctccttctgttgaagtctttgcctcctgctgaagctgagaaaactgcagaaagagtcatcatatgggcacgactggcattacaagaagagccagatcattctaaagagggcaaggcctggagaatgtctgtagcgaagacatccgtggacattcttaagatactatgtgacattcagaaagacaatctgcagaagaaggacgaatgtgaagaaatgttgaaactatttaaagaggttgctagcttacaggagaactttgaggtctttctttcatttgaagattatagcaatagttccctggtagcagatctccgtgagcagcacattaaagctcacgaagttgcacaggcgaaacacaaacctgggagcaccccagagcccatagctgctgaggtgaggagcccaagcatggaatcaaagctgcacagacaggcactggccctgcagatgtccaaacaagagctggaggcagagctgaccttgagagccttaaaagatgggaacatcaaaacagcactgaaaaaatgcagcgacttgtttaagtatcactgcaatgctgacactgggaaattgctatttctgacatgtcagaagctttgtcagatgttggctgataatgtcccagtgacagtgcctgtgggactgaatcttccttccatgatacatgatctagcaagccaagctgccaccatttgcagtccagattttttactagatgctttagaactatgtaaacatactttaatggctgtagagctttccagacaatgccaaatggatgactgtggaatcctcatgaaagcttcttttgggacacataaagatccatatgaagagtggtcttacagtgacttcttcagtgaagatggaattgttcttgagtcacagatggtgcttccagtgatttatgaactgatttcatctcttgtgcctctagctgaaagcaagagatatcccttggagtctaccagtttgccatactgctcccttaatgaaggagatggccttgttttacctgttataaattccatctctgccctgcttcagaatcttcaggaatctagccagtgggagctagccctaagatttgtggttggttcatttggtacctgtcttcagcactctgtgtcaaacttcatgaatgccactttgagtgaaaagttatttggagagactacattagttaaatcaaggcatgttgttatggaattgaaagaaaaagctgttatatttatcagggaaaatgctacaacactactgcacaaagtatttaattgtcgcttggtagatcttgacctggcgttgggttactgcactctcttacctcaaaaagatgtgtttgaaaatctctggaagctcatagataaagcatggcagaattacgacaaaatcttggcaatatctctggtgggctctgagctggcaagtctctatcaggaaatagaaatggggcttaagttccgtgaactcagtactgatgcccagtggggcattcgtcttggtaaacttggtatttcttttcaaccagttttcaggcaacattttctcaccaagaaagacctcattaaagctcttgtggagaatatagatatggacacaagcctcattttggaatattgcagcacatttcagttggactgcgatgcagttcttcagctcttcattgaaacgctgctccacaacacaaatgccggccaaggccagggagatgcaagcatggactctgcaaagcggcggcatcccaaactcctggccaaagcccttgagatggttcctttactgacgagcacaaaagatttggtcatcagtcttagtggaatactacataagttggatccttatgactatgaaatgattgaagttgtcttgaaagttatagaacgagctgatgaaaagataaccaatattaatattaatcaggcattgagtattctgaaacatttgaagtcatacagaagaatttctcctcccgtggatctagaatatcagtatatgttggaacatgtcataactttgccatcagctgcccaaactagactgccttttcacctgatattctttggcacagcacagaacttctggaaaattctctctacagaactcagtgaagaatctttcccaacattgctcttaatttcgaaattaatgaagttctctctggacactctgtacgtgtctacagcaaaacacgttttcgaaaaaaaactgaagccaaagctcctgaagttaacacaagctaaatcctcaacactgattaacaaggaaataactaagatcacgcagaccatcgaatcctgcttactctctatagtcaacccagagtgggctgtagctattgccatcagccttgcccaggatatccctgaaggttccttcaagatatctgctttgaaattctgcctttatttagctgagagatggctacagaatatcccatcgcaggacgaaaaacgtgaaaaagccgaggctttgttgaagaagcttcatatccagtaccggcgatcgggcacagaagctgtgctcatagcccacaagctgaacactgaggaatatttaagagtgatcggaaagccagcacatcttattgtcagtctctacgaacatcctagcatcaatcaaagaattcagaattcatctggcacagattatcctgatattcatgcagcagctaaagaaatagccgaagtcaatgaaattaatttggaaaaagtctgggacatgttgttggaaaaatggctatgcccttcaacaaaacctggtgaaaaaccatcagaattatttgaacttcaagaagatgaagccctacgaagagtgcagtatctcctcctgtctcgtccaattgattatagttcaagaatgctgtttgtatttgcaacatcaactacaaccacattaggtatgcatcagttaacttttgcccatagaactcgagctcttcagtgtctcttctatttggctgacaaggaaactatagaatctctctttaaaaaacccattgaagaagtgaaatcttatttgagatgtataacttttctggcatcatttgagactttgaatatccccatcacatatgaattattttgcagcagtcctaaagaaggaatgattaagggtctgtggaaaaaccacagccacgagtccatggcagtaagattggtgactgagctgtgtttagaatacaaaatctatgacctgcagctttggaatggactcttgcaaaagcttctgggcttcaatatgattccttatctaaggaaagttttaaaagccatctccagtatccattctttatggcaggttccctacttcagcaaagcgtggcagcgtgtgatacagataccactgctttcagcctcttgtcctttaagtcctgatcagctgtcagattgttctgagagtctcatcgctgtcctcgaatgtccagtctcaggtgatcttgacctgatcggagtcgccaggcagtatatccagttagaacttccggcttttgcattagcttgtctgatgctcatgccccactcagagaaaagacaccagcaaattaagaattttctgggttcctgtgaccctcaggttattttaaagcaattggaagagcatatgaacacgggccagctagcaggattttcacatcaaattagaagtctgattttgaataatatcatcaataagaaggagtttgggattttggcaaagaccaaatactttcaaatgttgaagatgcatgcgatgaataccaacaatatcactgagctagtgaactatttggcaaatgacttaagtttagatgaagcttcagtcttgataactgaatattcaaagcactgcgggaaacctgtgcctccagacactgctccctgtgaaattctgaagatgtttcttagtggattatcgtaaatcactgaacctttttttcaagaaggacaagaattttggagtctgctattaatggaccatatttattacagtttttaaattgtacaatctctgtattatagctatttgtctaacattaccccacatgtaataaataaaacaatatgagcataattgccccataaagaactcaaaaaaaa

SEQ ID NO: 13008 - DNA, 8497 bp, Homo sapiens
ggcgcgagttggaaagtttgcccgagggctggtgcaggcttggagctgggggccgtgcgctgccctgggagtgtgacccggccagcgaccaaaaccttgtgtgactgagctgaagagcagtgcatccagattctcctcagaagtgagactttccaaaggaccaatgactctgtttcctgtgccctttcattttttcctactctgtagctatgtctcgatcccgccatgcaaggccttccagattagtcaggaaggaagatgtaaacaaaaaaaagaaaaacagccaactacgaaagacaaccaagggagccaacaaaaatgtggcatcagtcaagactttaagccctggaaaattaaagcaattaattcaagaaagagatgttaagaaaaaaacagaacctaaaccacccgtgccagtcagaagccttctgacaagagctggagcagcacgcatgaatttggataggactgaggttctttttcagaacccagagtccttaacctgcaatgggtttacaatggcgctacgaagcacctctcttagcaggcgactctcccaacccccactggtcgtagccaaatccaaaaaggttccactttctaagggtttagaaaagcaacatgattgtgattataagatactccctgctttgggagtaaagcactcagaaaatgattcggttccaatgcaagacacccaagtccttcctgatatagagactctaattggtgtacaaaatccctctttacttaaaggtaagagccaagagacaactcagttttggtcccaaagagttgaggattccaagatcaatatccctacccacagtggccctgcagctgagatccttcctgggccactggaagggacacgctgtggtgaaggactattctctgaagagacattgaatgataccagtggttccccaaaaatgtttgctcaggacacagtgtgtgctccttttccccaaagagcaacccccaaagttacctctcaaggaaaccccagcattcagttagaagagttgggttcacgagtagaatctcttaagttatctgattcttacctggatcccattaaaagtgaacatgattgctaccccacctccagtcttaataaggttatacctgacttgaaccttagaaactgcttggctcttggtgggtctacgtctcctacctctgtaataaaattcctcttggcaggctcaaaacaagcgacccttggtgctaaaccagatcatcaagaggccttcgaagctactgcaaatcaacaggaagtttctgataccacctctttcctaggacaggcctttggtgctatcccacatcaatgggaacttcctggtgctgacccagttcatggtgaggccctgggtgagaccccagatctaccagagattcctggtgctattccagtccaaggagaggtctttggtactattttagaccaacaagaaactcttggtatgagtgggagtgttgtcccagacttgcctgtcttccttcctgttcctccaaatccaattgctacctttaatgctccttccaaatggcctgagccccaaagcactgtctcatatggacttgcagtccagggtgctatacagattttgcctttgggctcaggacacactcctcaatcatcatcaaactcagagaaaaattcattacctccagtaatggctataagcaatgtagaaaatgagaagcaggttcatataagcttcctgccagctaacactcaggggttcccattagcccctgagagaggactcttccatgcttcactgggtatagcccaactctctcaggctggtcctagcaaatcagacagagggagctcccaggtcagtgtaaccagcacagttcatgttgtcaacaccacagtggtgactatgccagtgccaatggtcagtacctcctcttcttcctataccactttgctaccgactttggaaaagaagaaaagaaagcgatgtggggtctgtgaaccctgccagcagaagaccaactgtggtgaatgcacttactgcaagaacagaaagaacagccatcagatctgtaagaaaagaaaatgtgaggagctgaaaaagaaaccatctgttgttgtgcctctggaggttataaaggaaaacaagaggccccagagggaaaagaagcccaaagttttaaaggcagattttgacaacaaaccagtaaatggccccaagtcagaatccatggactacagtagatgtggtcatggggaagaacaaaaattggaattgaacccacatactgttgaaaatgtaactaaaaatgaagacagcatgacaggcatcgaggtggagaagtggacacaaaacaagaaatcacagttaactgatcacgtgaaaggagattttagtgctaatgtcccagaagctgaaaaatcgaaaaactctgaagttgacaagaaacgaaccaaatctccaaaattgtttgtacaaaccgtaagaaatggcattaaacatgtacactgtttaccagctgaaacaaatgtttcatttaaaaaattcaatattgaagaattcggcaagacattggaaaacaattcttataaattcctaaaagacactgcaaaccataaaaacgctatgagctctgttgctactgatatgagttgtgatcatctcaaggggagaagtaacgttttagtattccagcagcctggctttaactgcagttccattccacattcttcacactccatcataaatcatcatgctagtatacacaatgaaggtgatcaaccaaaaactcctgagaatataccaagtaaagaaccaaaagatggatctcccgttcaaccaagtctcttatcgttaatgaaagataggagattaacattggagcaagtggtagccatagaggccctgactcaactctcagaagccccatcagagaattcctccccatcaaagtcagagaaggatgaggaatcagagcagagaacagccagtttgcttaatagctgcaaagctatcctctacactgtaagaaaagacctccaagacccaaacttacagggagagccaccaaaacttaatcactgtccatctttggaaaaacaaagttcatgcaacacggtggttttcaatgggcaaactactaccctttccaactcacatatcaactcagctactaaccaagcatccacaaagtcacatgaatattcaaaagtcacaaattcattatctctttttataccaaaatcaaattcatccaagattgacaccaataaaagtattgctcaagggataattactcttgacaattgttccaatgatttgcatcagttgccaccaagaaataatgaagtggagtattgcaaccagttactggacagcagcaaaaaattggactcagatgatctatcatgtcaggatgcaacccatacccaaattgaggaagatgttgcaacacagttgacacaacttgcttcgataattaagatcaattatataaaaccagaggacaaaaaagttgaaagtacaccaacaagccttgtcacatgtaatgtacagcaaaaatacaatcaggagaagggcacaatgcaacagaaaccaccttcaagtgtacacaataatcatggttcatcattaacaaaacaaaagaacccaacccagaaaaagacaaaatccaccccatcaagagatcggcggaaaaagaagcccacagttgtaagttatcaagaaaatgatcggcagaagtgggaaaagttgtcctatatgtatggcacaatatgcgacatttggatagcatcgaaatttcaaaattttgggcaattttgtccacatgattttcctactgtatttgggaaaatttcttcctcgaccaaaatatggaaaccactggctcaaacgaggtccattatgcaacccaaaacagtatttccaccactcactcagataaaattacagagatatcctgaatcagcagaggaaaaggtgaaggttgaaccattggattcactcagcttatttcatcttaaaacggaatccaacgggaaggcattcactgataaagcttataattctcaggtacagttaacggtgaatgccaatcagaaagcccatcctttgacccagccctcctctccacctaaccagtgtgctaacgtgatggcaggcgatgaccaaatacggtttcagcaggttgttaaggagcaactcatgcatcagagactgccaacattgcctggtatctctcatgaaacacccttaccggagtcagcactaactctcaggaatgtaaatgtagtgtgttcaggtggaattacagtggtttctaccaaaagtgaagaggaagtctgttcatccagttttggaacatcagaattttccacagtggacagtgcacagaaaaattttaatgattatgccatgaacttctttactaaccctacaaaaaacctagtgtctataactaaagattctgaactgcccacctgcagctgtcttgatcgagttatacaaaaagacaaaggcccatattatacacaccttggggcaggaccaagtgttgctgctgtcagggaaatcatggagaataggtatggtcaaaaaggaaacgcaataaggatagaaatagtagtgtacaccggtaaagaagggaaaagctctcatgggtgtccaattgctaagtgggttttaagaagaagcagtgatgaagaaaaagttctttgtttggtccggcagcgtacaggccaccactgtccaactgctgtgatggtggtgctcatcatggtgtgggatggcatccctcttccaatggccgaccggctatacacagagctcacagagaatctaaagtcatacaatgggcaccctaccgacagaagatgcaccctcaatgaaaatcgtacctgtacatgtcaaggaattgatccagagacttgtggagcttcattctcttttggctgttcatggagtatgtactttaatggctgtaagtttggtagaagcccaagccccagaagatttagaattgatccaagctctcccttacatgaaaaaaaccttgaagataacttacagagtttggctacacgattagctccaatttataagcagtatgctccagtagcttaccaaaatcaggtggaatatgaaaatgttgcccgagaatgtcggcttggcagcaaggaaggtcgtcccttctctggggtcactgcttgcctggacttctgtgctcatccccacagggacattcacaacatgaataatggaagcactgtggtttgtaccttaactcgagaagataaccgctctttgggtgttattcctcaagatgagcagctccatgtgctacctctttataagctttcagacacagatgagtttggctccaaggaaggaatggaagccaagatcaaatctggggccatcgaggtcctggcaccccgccgcaaaaaaagaacgtgtttcactcagcctgttccccgttctggaaagaagagggctgcgatgatgacagaggttcttgcacataagataagggcagtggaaaagaaacctattccccgaatcaagcggaagaataactcaacaacaacaaacaacagtaagccttcgtcactgccaaccttagggagtaacactgagaccgtgcaacctgaagtaaaaagtgaaaccgaaccccattttatcttaaaaagttcagacaacactaaaacttattcgctgatgccatccgctcctcacccagtgaaagaggcatctccaggcttctcctggtccccgaagactgcttcagccacaccagctccactgaagaatgacgcaacagcctcatgcgggttttcagaaagaagcagcactccccactgtacgatgccttcgggaagactcagtggtgccaatgcagctgctgctgatggccctggcatttcacagcttggcgaagtggctcctctccccaccctgtctgctcctgtgatggagcccctcattaattctgagccttccactggtgtgactgagccgctaacgcctcatcagccaaaccaccagccctccttcctcacctctcctcaagaccttgcctcttctccaatggaagaagatgagcagcattctgaagcagatgagcctccatcagacgaacccctatctgatgaccccctgtcacctgctgaggagaaattgccccacattgatgagtattggtcagacagtgagcacatctttttggatgcaaatattggtggggtggccatcgcacctgctcacggctcggttttgattgagtgtgcccggcgagagctgcacgctaccactcctgttgagcaccccaaccgtaatcatccaacccgcctctcccttgtcttttaccagcacaaaaacctaaataagccccaacatggttttgaactaaacaagattaagtttgaggctaaagaagctaagaataagaaaatgaaggcctcagagcaaaaagaccaggcagctaatgaaggtccagaacagtcctctgaagtaaatgaattgaaccaaattccttctcataaagcattaacattaacccatgacaatgttgtcaccgtgtccccttatgctctcacacacgttgcggggccctataaccattgggtctgaaggcttttctccccctcttaatgcctttgctagtgcagtgtattttttcaaggtgctgttaaaagaaagtcatgttgtcgtttactatcttcatctcacccatttcaagtctgaggtaaaaaaataataatgataacaaaacggggtgggtattcttaactgtgactatattttgacaattggtagaaggtgcacattttaagcaaaaataaaagttttatagttttaaatacataaagaaatgtttcagttaggcattaaccttgatagaatcactcagtttggtgctttaaattaagtctgtttactatgaaacaagagtcatttttagaggattttaacaggttcatgttctatgatgtaaaatcaagacacacagtgttaactctacacagcttctggtgcttaaccacatccacacagttaaaaataagctgaattattatttcatggtgccattgttccaacatcttccaatcattgctagaaaattggcatattcctttgaaataaacttatgaaatgttttctctcttaaaatatttctcctgtgtaaaataaatcattgttgttagtaatggttggaggctgttcataaattgtaaatatatattttaaaagcactttctatttttaaaagtaacttgaaataatatagtataagaatcctattgtctattgtttgtgcatatttgcatacaagagaaatcatttatccttgctgtgtagagttccatcttgttaactgcagtatgtattctaatcatgtatatggtttgtgttcttttactgtgtcctctcacattcaagtattagcaacttgcagtatataaaatagttagataatgagaagttgttaattatctctaaaattggaattaggaagcatatcaccaatattgattaacattctctttggaactaggtaagagtggtctcttcttattgaacaacctcaatttagtttcatcccacctttctcagtataatccatgagaggtgtttccaaaaggagatgagggaacaggataggtttcagaagagtcaaatgcttctaatgtctcaaggtgataaaatacaaaaactaagtagacagatatttgtactgaagtctgatacagaattaaaaaaaaaaaaatcttgttgaaatattttgaaaacaaattccctactatcatcacatgcctccccaaccccaagtcaaaaacaagaggaatggtactacaaacatggctttgtccattaagagctaattcatttgtttatcttagcatactagatttgggaaaatgataactcatcttttctgataattgcctatgttctaggtaacaggaaaacaggcattaagtttattttagtcttcccattttcttcctattactttattgactcattttattgcaaaacaaaaaggattacccaaacaacatgtttcgaacaaggagaattttcaatgaaatacttgattctgttaaaatgcagaggtgctataacattcaaagtgtcagattccttgggagtatggaaaacctaatggtgcttctcccttggaaatgccataggaagcccacaaccgctaacacttacaattttggtgcaaaagcaaacagttccagcaggctctctaaagaaaaactcattgtaacttattaaaataatatctggtgcaaagtatctgttttgagcttttgactaatccaagtaaaggaatatgaagggattgtaaaaaacaaaatgtccattgatagaccatcgtgtacaagtagatttctgcttgttgaatatgtaaaatagggtaattcattgacttgttttagtattttgtgtgccttagatttccgttttaagacatgtatatttttgtgagcctaagg

SEQ ID NO: 13009 - DNA, 5000 bp, Homo sapiens
ttctgcgtttctctagtgcagtgcctggagatgaccaccaaacggaaaatcatcggccgtctggtgccatgccgatgtttccgaggtgaagaagaaatcatctcagttttagattactcccactgcagtcttcagcaggtgccaaaggaggtctttaacttcgaacgaacattagaggagctttatctagatgccaatcaaattgaagaactacccaagcaattgttcaactgtcaagctctacgaaaactaagtattcctgataacgacctttcaaatctgccaaccactattgctagtttagttaatcttaaagaactcgacatcagtaaaaatggtgtacaagaatttccagaaaacataaagtgctgtaagtgtttaacaattattgaagccagtgtcaatcccatttctaaactacctgatggcttcacacagctcctaaacctgacccagctctacctgaatgacgcctttcttgaatttcttccagccaattttggaagacttgtcaaattgcggatcttggagttaagagaaaatcacttgaaaactctaccaaagtcaatgcacaaactggcccagttggaaagacttgacctaggcaataatgaattcggtgagctgcctgaagttctggatcaaatacaaaatttgagggagttatggatggataataatgcattacaagtgttacctgggtctatagggaagttaaagatgttggtatacctggatatgtcaaaaaacagaatagaaacagttgacatggacatttctggatgtgaagcccttgaggacctcttattgtcatccaatatgttgcaacaattgcctgattctataggacttttgaaaaaactaacaactctaaaagtagatgacaatcaacttacaatgctacccaatacaattggaaatttatctttattagaagaatttgactgtagctgtaatgaactggagtcactaccttctactattggctaccttcatagtcttcggacattagcagttgatgagaatttccttccagaattacccagagaaattggaagttgtaagaatgtaacagtcatgtctctacgctccaacaaattagaatttcttcctgaagagattggacagatgcagaaactaagagtcctaaatttgagtgacaacagattgaagaatttaccattctcatttaccaaacttaaagagcttgcagctttgtggctttctgacaatcagtccaaagcccttatccctttacaaacagaagcccatccagaaacaaagcaaagagtattgactaactacatgtttccccagcagcctcgtggtgatgaagatttccagtcagacagtgacagctttaaccctacactgtgggaagagcagagacaacaacgcatgactgttgcctttgaatttgaagacaaaaaagaagatgacgaaaatgctgggaaagttaaggatctctcctgccaagccccctgggaaaggggccagcgtgggattactctccaacctgccagactgtctggcgattgctgcacaccatgggccaggtgtgatcagcagatccaagatatgcccgtcccccagaatgacccacagctggcatggggttgtataagtggcctccagcaggaaaggagcatgtgtactccattgccagttgcagcacaatccaccactcttccctctctaagtggcagacaggttgaaataaacctaaaacgatatccaactccttacccagaggatttaaagaatatggtaaaatctgttcaaaatttggtgggtaagccaagccatggagtgcgtgttgagaattcaaatccaactgctaacacggagcaaactgtgaaagaaaaatatgaacacaagtggccggtagccccaaaggagattacagtggaggattcttttgttcatccagctaatgaaatgaggattggggaacttcacccttcattagctgagacccctctgtacccacccaaacttgttctgctagggaaggacaaaaaagaatcaactgatgagtctgaagttgacaaaactcactgtctgaataacagtgtttcctcaggcacttactcagactactcgccttcccaggcttcctcaggatcctctaatacccgggttaaagtggggtccttgcagacaacagctaaagatgcagtacataattctttgtggggtaacaggattgcaccatctttcccacagcctcttgattcaaagccattactcagccagcgggaggctgttcccccaggcaatataccacagcgtcctgaccggctgcccatgagtgatactttcactgacaactggactgatggctcgcattatgacaacacagggtttgttgctgaggaaaccacagccgagaatgccaacagtaatcctctcttaagttcgaaatctagaagcacatcttcgcatggacgcaggcctttgatcaggcaagacaggattgttggtgttcccctggaactcgagcagtctacacacagacacacaccagaaacagaagtgcctccttccaatccttggcagaattggaccagaacccctagtccgtttgaagacaggaccgcttttccttccaaattagagacaacccccactaccagcccattgcctgaaaggaaagaacatataaaggaatctactgaaatacctagtcctttttctccaggcgtaccatgggagtatcatgattccaatcccaacaggagtcttagtaatgtcttttctcaaatccattgccgcccggaatcttctaaaggtgttatttcaattagcaaaagcacagagaggctttcccccctaatgaaagatatcaagtctaataaattcaaaaagtcacagagtatcgatgagattgacattggtacatataaggtgtataacataccattagaaaactatgcttctgggagtgatcacttaggaagccacgaacgaccggataagatgctgggaccagagcatggtatgtccagtatgtctcgaagccagtcagtcccaatgctggatgatgagatgctcacctacggaagtagtaaggggccacaacaacaaaaagcttctatgacaaaaaaagtctatcagtttgaccaaagcttcaatcctcaaggatcagtggaagtgaaagccgaaaagaggataccacccccttttcaacacaatcccgagtacgtgcaacaggccagcaaaaacatcgccaaggatttgattagtcctagagcttacagaggatacccaccgatggagcaaatgttttcattttctcagccatctgtgaatgaggatgctgtggtgaatgcccagttcgcaagccaaggggccagggcgggcttcctgagaagggccgactccctggtgagcgccacagaaatggccatgtttagaagggtcaatgagcctcatgagctgcccccaactgataggtacggcagacccccatataggggagggctggatcgccaaagcagcgttacagtgactgagtcccagttcctgaaaaggaatggcaggtatgaagatgaacacccttcatatcaagaagtgaaagctcaggcgggaagttttccggttaaaaaccttacccaaaggaggccattgtctgcgagaagctacagtacagagagttacggtgcctcccaaaccaggccagtttcagctaggcctactatggcagctcttttggaaaaaataccatctgactataacttgggtaactatggtgacaagccatcagataacagtgatttaaagacgaggcctactcctgtgaagggagaggagagctgtggtaaaatgcctgcagactggagacaacagctgcttagacatatagaagctagacggttagacaggaatgctgcttacaaacacaatacagttaaccttggcatgctgccctatggaggtatttcagcaatgcatgcaggcagaagcatgactttaaacttgcagactaagtctaaatttgatcatcaagaactacctcttcagaaaaccccgtcccagcaaagcaacattttagacaatggacaagaagatgtatctcctagtggccaatggaatccttatccacttgggaggcgggatgtacctccggacaccattactaagaaggcaggcagccacatccagacgttgatggggtcccaaagccttcagcatcgcagccgggagcagcagccgtatgaaggaaatataaacaaagtgaccatccagcaatttcagtcaccattgcctattcagatcccctcttcacaggccacccggggacctcagcctggacggtgcttaattcaaactaaagggcaaaggagtatggatggatatccagagcagttttgtgtgagaatagaaaagaatcctggccttggatttagtatcagtggtggaattagtggacaaggaaatccattcaaaccttctgacaagggtatctttgttactagggttcagcctgatgggccagcatcaaacctactgcagcctggtgataagatccttcaggcaaatggacacagttttgtacatatggaacatgaaaaagctgtattactactgaagagtttccagaacacagtagacctagttattcaacgtgagcttactgtctaaatattttttataaatagtgaagatacgtctagccagacctaatgttcaaaaataaatttatacatagaaacaaattttgccaattgctggaccaatggcaaacattagtgccaaatgtataatactatatgttagcactgaccatccttaaaaaatgttaactctataaatatgatgttcatgtggttatgtattagttttaattgtcagcctctggctgtgcattggtgcagttttgtttctgtttttgtttttgtttttaatcaaataagtttcttctcaaaatggatttcatataatttcggagcacggaagcacacacaagctctttatgaattctgctctccatcagaaac

SEQ ID NO: 13010 - DNA, 2423 bp, Homo sapiens
acccgcgctcgtacgtgcgcctccgccggcagctcctgactcatcgggggctccgggtcacatgcgcccgcgcggccctataggcgcctcctccgcccgccgcccgggagccgcagccgccgccgccactgccactcccgctctctcagcgccgccgtcgccaccgccaccgccaccgccactaccaccgtctgagtctgcagtcccgagatcccagccatcatgtccatagagaagatctgggcccgggagatcctggactcccgcgggaaccccacagtggaggtggatctctatactgccaaaggtcttttccgggctgcagtgcccagtggagcctctacgggcatctatgaggccctggagctgagggatggagacaaacagcgttacttaggcaaaggtgtcctgaaggcagtggaccacatcaactccaccatcgcgccagccctcatcagctcaggtctctctgtggtggagcaagagaaactggacaacctgatgctggagttggatgggactgagaacaaatccaagtttggggccaatgccatcctgggtgtgtctctggccgtgtgtaaggcaggggcagctgagcgggaactgcccctgtatcgccacattgctcagctggccgggaactcagacctcatcctgcctgtgccggccttcaacgtgatcaatggtggctctcatgctggcaacaagctggccatgcaggagttcatgatcctcccagtgggagctgagagctttcgggatgccatgcgactaggtgcagaggtctaccatacactcaagggagtcatcaaggacaaatacggcaaggatgccaccaatgtgggggatgaaggtggctttgcccccaatatcctggagaacagtgaagccttggagctggtgaaggaagccatcgacaaggctggctacacggaaaagatcgttattggcatggatgttgctgcctcagagttttatcgtgatggcaaatatgacttggacttcaagtctcccactgatccttcccgatacatcactggggaccagctgggggcactctaccaggactttgtcagggactatcctgtggtctccattgaggacccatttgaccaggatgattgggctgcctggtccaagttcacagccaatgtagggatccagattgtgggtgatgacctgacagtgaccaacccaaaacgtattgagcgggcagtggaagaaaaggcctgcaactgtctgctgctcaaggtcaaccagatcggctcggtcactgaagccatccaagcgtgcaagctggcccaggagaatggctggggggtcatggtgagtcatcgctcaggagagactgaggacacattcattgctgacctggtggtggggctgtgcacaggccagatcaagactggtgccccgtgccgttctgaacgtctggctaaatacaaccagctcatgagaattgaggaagagctgggggatgaagctcgctttgccggacataacttccgtaatcccagtgtgctgtgattcctctgcttgcctggagacgtggaacctctgtctcatcctcctggaaccttgctgtcctgatctgtgatagttcaccccctgagatcccctgagccccagggtgcccagaacttccctgattgacctgctccgctgctccttggcttacctgacctcttgctgtctctgctcgccctcctttctgtgccctactcattggggttccgcactttccacttcttcctttctctttctctcttccctcagaaactagaaatgtgaatgaggattattataaaagggggtccgtggaagaatgatcagcatctgtgatgggagcgtcagggttggtgtgctgaggtgttagagagggaccatgtgtcacttgtgctttgctcttgtcccacgtgtcttccactttgcatatgagccgtgaactgtgcatagtgctgggatggaggggagtgttgggcatgtgatcacgcctggctaataaggctttagtgtatttatttatttatttattttatttgtttttcattcatcccattaatcatttccccataactcaatggcctaaaactggcctgacttgggggaacgatgtgtctgtatttcatgtggctgtagatcccaagatgactggggtgggaggtcttgctagaatgggaagggtcatagaaagggccttgacatcagttcctttgtgtgtactcactgaagcctgcgttggtccagagcggaggctgtgtgcctgggggagttttcctctatacatctctccccaaccctaggttccctgttcttcctccagctgcaccagagcaacctctcactccccatgccacgttccacagttgccaccacctctgtggcattgaaatgagcacctccattaaagtctgaatcagtgc

SEQ ID NO: 13011 - DNA, 7431 bp, Homo sapiens
gttttgatgaacacctggctttattcttgcaatgaagaaaggttctcaacaaaaaatattctccaaagcaaagataccatcatcatctcactctcctatcccatcatctatgtccaatatgagatctaggtcactttcacctttgattggatcagagactctaccttttcattctggaggacagtggtgtgagcaagttgagattgcagatgaaaacaatatgcttttggactatcaagaccataaaggagctgattcacatgcaggagttagatatattacagaggccctcattaaaaaacttactaaacaggataatttggctttgataaaatctctgaacctttcactttctaaagacggtggcaagaaatttaagtatattgagaatttggaaaaatgtgttaaacttgaagtactgaatctcagctataatctaatagggaagattgaaaagttggacaagctgttaaaattacgtgaactcaacttatcatataacaaaatcagcaaaattgaaggcatagaaaatatgtgtaatctgcaaaagcttaaccttgcaggaaatgaaattgagcatattccagtatggttagggaagaagttaaaatctttgcgagtcctcaatttgaaaggcaacaagatatcatcgctccaagatataagcaagttgaaaccgcttcaagatttgatttctctgatcctagttgaaaatccagttgtgacccttcctcattacctccagtttaccattttccacctccgttcattggaaagtttggaaggtcagccagtaaccactcaggatagacaggaggcttttgagagattcagtttagaagaggtagaaagactggaaagagacctagaaaaaaagatgatagaaactgaagagcttaagagcaaacaaacaaggttccttgaggaaattaaaaatcaagataaattgaataaatcattaaaagaggaggccatgttacagaaacagagctgtgaggaactcaagagtgacttaaacacaaaaaatgaattgctaaaacagaagaccatagaattaacacgagcatgtcagaagcaatatgagctggaacaggaattggccttttataaaattgatgctaaatttgagccactaaattattatccatcagagtatgctgaaattgataaagccccagatgaaagcccttacattggcaaatccagatacaagagaaatatgtttgccacagagagttatattattgacagtgctcaggcagtacagatcaagaagatggagccagatgaacaacttagaaatgatcacatgaacttgagaggccacacaccactggacacgcaactggaagacaaagaaaaaaaaataagtgcagcacaaactcgactatcagaactgcatgatgaaatagaaaaggcagaacaacaaattttgagagctactgaagaatttaaacaactggaagaagctatacaactaaaaaagatttcagaagcagggaaagaccttctttacaagcagttgagtggtagactacaacttgtaaataaattacgccaggaagctctggatctagaactgcagatggaaaagcaaaagcaggaaattgccggaaagcagaaggagattaaggacctgcaaatagccatagatagcctggattccaaagacccaaaacattcccatatgaaggctcaaaagagcggtaaagaacaacagcttgacattatgaacaagcagtaccaacaacttgaaagtcgtttggatgagatactttctagaattgctaaggaaacggaagagattaaggaccttgaagaacagcttactgaaggccagatagcagcaaatgaagccctgaagaaggatttagaaggtgttatcagtgggttgcaagaatacctggggaccattaaaggccaggcaactcaggcccagaatgagtgcaggaagctgcgggatgagaaagagacattgttgcagagattgacagaagtcgagcaggagagagaccagctggaaatagttgccatggatgcagaaaatatgaggaaggagcttgcagagctagaaagtgccctccaagagcagcatgaggtgaatgcatctttgcagcagacccagggagatctcagtgcctatgaagctgagctagaggctcggctaaacctaagggatgctgaagccaaccagctcaaggaagagttggaaaaagtaacaagacttacccagttagaacaatcagcccttcaagcagaacttgagaaggaaaggcaagccctcaagaatgcccttggaaaagcccagttctcagaagaaaaggagcaagagaacagtgagctccatgcaaaacttaaacacttgcaggatgacaataatctgttaaaacagcaacttaaagatttccagaatcaccttaaccatgtggttgatggtttggttcgtccagaagaagtggcagctcgtgtggatgagctaagaagaaaactgaaattaggaactggggaaatgaacatccatagtccttcagatgtcttagggaaaagtcttgctgatttacagaaacaattcagtgaaattcttgcacgctccaagtgggaaagagatgaagcacaagttagagagagaaaactccaagaagaaatggctctgcagcaagagaaactggcaactggacaagaagagttcaggcaggcctgtgagagagccctggaagcaagaatgaattttgataagaggcaacatgaagcaagaatccagcaaatggagaatgaaattcactatttgcaagaaaatctaaaaagtatggaggaaatccaaggccttacagatctccaacttcaggaagctgatgaagagaaggagagaattctggcccaactccgagagttagagaaaaagaagaaacttgaagatgccaaatctcaggagcaagtttttggtttagataaagaactgaagaaactaaagaaagccgtggccacctctgataagctagccacagctgagctcaccattgccaaagaccagctgaagtcccttcatggaactgttatgaaaattaaccaggagcgagcagaggagttgcaggaagcagagaggttcagcagaaaggcagcacaagcagccagagatctcacccgagcagaagctgagatcgaactcctgcagaatctcctcaggcagaagggggagcagtttcgacttgagatggagaaaacaggtgtaggtactggagcaaactcacaggtcctagaaattgagaaactgaatgagacaatggaacgacaaaggacagagattgcaaggctgcagaatgtactagacctcactggaagtgacaacaaaggaggctttgaaaatgttttagaagaaattgctgaacttcgacgtgaagtttcttatcagaatgattacataagcagcatggcagatcctttcaaaagacgaggctattggtactttatgccaccaccaccatcatcaaaagtttccagccatagttcccaggccaccaaggactctggtgttggccttaagtactcagcctcaactcctgttagaaaaccacgccctgggcagcaggatgggaaggaaggcagtcaacctccccctgcctcaggatactgggtttattctcccatcaggagtgggttacataaactgtttccaagtagagatgcagacagtggaggagatagtcaggaagagagtgagctggatgaccaagaagaacccccatttgtgcctcctcctggatacatgatgtatactgtgcttcctgatggttctcctgtaccccagggcatggccctgtatgcaccacctcctcccttgccaaacaatagccgacctctcacccctggcactgttgtttatggcccacctcctgctggggcccccatggtgtatgggcctccaccccccaacttctccatccccttcatccctatgggtgtgctgcattgcaacgtccctgaacaccataacttagagaatgaagtttctagattagaagacataatgcagcatttaaaatcaaagaagcgggaagaaaggtggatgagagcatccaagcggcagtcggagaaagaaatggaagaactgcatcataatattgatgatcttttgcaagagaagaaaagcttagagtgtgaagtagaagaattacatagaactgtccagaaacgtcaacagcaaaaggacttcattgatggaaatgttgagagtcttatgactgaactagaaatagaaaaatcactcaaacatcatgaagatattgtagatgaaattgagtgcattgagaagactcttctgaaacgtcgctcagagctcagggaagctgaccgactcctggcagaggctgagagtgaactttcatgcactaaagaaaagacaaaaaatgctgttgaaaagttcactgatgccaagagaagtttattgcaaactgagtcagatgctgaggaattagaaaggagagctcaggaaactgctgttaacctcgtcaaagctgatcagcagctaagatcgctccaggctgatgcaaaggatttggagcagcacaaaatcaagcaagaagaaatcttgaaagaaataaacaaaattgtagcagcaaaagactcagacttccaatgtttaagcaagaagaaggaaaaactgacagaagagcttcagaaactacagaaagacatagagatggcagaacgcaatgaggatcaccacctgcaggtccttaaagaatctgaggtgcttcttcaggccaaaagagccgagctggaaaagctgaaaagccaggtgacaagtcagcagcaggagatggctgtcttggacaggcagttagggcataaaaaggaggagctgcatctactccaaggaagcatggtccaggcaaaagctgacctccaggaagctctgagactgggagagactgaagtaactgagaagtgcaatcacattagggaagtaaaatctcttctggaagaactgagttttcagaaaggagaactaaatgttcagattagtgaaagaaaaactcaacttacacttataaagcaggaaattgaaaaagaggaagaaaatcttcaggttgttttaaggcagatgtctaaacataaaaccgaactaaagaatattctggacatgttgcaacttgaaaaccatgagctacaaggtttgaagctacaacatgaccaaagggtatctgaattagagaagactcaggtggcagtgctagaggagaaactggagttagagaatttgcagcagatatcccagcagcagaaaggggaaatagagtggcagaagcagctccttgagagggataaacgagaaatagaacgaatgactgctgagtcccgagctttacaatcgtgtgttgagtgtttgagcaaagaaaaggaagatctccaagagaaatgtgacatttgggaaaaaaagttggcacaaaccaaaagggttttagcagcagcagaagaaaatagcaaaatggagcaatcaaacttagaaaagttggaattgaatgtcagaaaactgcagcaggaactagaccaactaaacagagacaagttgtcactgcataacgacatttcagcaatgcaacagcagctccaagaaaaacgagaagcagtaaactcactgcaggaggaactagctaatgtccaagaccatttgaacctagcaaaacaggacctgcttcacaccaccaagcatcaggatgtgttgctcagtgagcagacccgactccagaaggacatcagtgaatgggcaaataggtttgaagactgtcagaaagaagaggagacaaaacaacaacaacttcaagtgcttcagaatgagattgaagaaaacaagctcaaactagtccaacaagaaatgatgtttcagagactccagaaagagagagaaagtgaagaaagcaaattagaaaccagtaaagtgacactgaaggagcaacagcaccagctggaaaaggaattaacagaccagaaaagcaaactggaccaagtgctctcaaaggtgctggcagctgaagagcgtgttaggactctgcaggaagaggagaggtggtgtgagagcctggagaagacactctcccaaactaaacggcagctttcagaaagggagcagcaattggtggagaaatcaggtgagctgttggccctccagaaagaggcagattctatgagggcagacttcagccttctgcggaaccagttcttgacagaaagaaagaaagctgagaagcaggtggccagcctgaaggaagcacttaagatccagcggagccagctggagaaaaaccttcttgagcaaaaacaggagaacagctgcatacaaaaggaaatggcaacaattgaactggtagcccaggacaaccatgagcgggccaggcgcctgatgaaggagctcaaccagatgcagtatgagtacacggagctcaagaaacagatggcaaaccaaaaagatttggagagaagacaaatggaaatcagtgatgcaatgaggacacttaaatctgaggtgaaggatgaaatcagaaccagcttgaagaatcttaatcagtttcttccagaactaccagcagatctagaagctattttggaaagaaacgaaaacctagaaggagaattggaaagcttgaaagagaaccttccatttaccatgaatgagggaccttttgaagaaaaactgaacttttcccaagttcacataatggatgaacactggcgtggagaagcactccgggagaaactgcgtcaccgggaagaccgactcaaggcccaactccgacactgtatgtccaagcaagcagaagtattaattaaaggaaagcggcagacagagggcactttacacagtttgaggagacaagtagatgctttaggggaattggtcaccagcacctctgcagattcagcgtcatcacccagtctgtctcagctggagtcttccctcacagaggactctcaacttggacaaaatcaggaaaagaatgcctcagccagatgaggaatactgtcttgtgtaaatatattcaaggaaaacacctccactacctcactgacttcataattggaatgtcacatggtttttttaatcaagatgcagtgaactgagattctgaaactccactgtagtttactttgcctgtaccattaatgccaatgtttttataaatcacttgtacatagtacatatgggaatagttgcatatgggaatttaaaccaacatgtggctgagcctttttttttttaatcttcgtaacatgtttaaaaaaaaacagtgattttaactgcatatttgaacctacaaactggtaaatcttattaacaaaaagaatgtacttaaggccctctttatttatagtgtcgagttatttttgaattttgcttaaaatctatttttcatatgaaaataaaagataacaatc

SEQ ID NO: 13012 - DNA, 3186 bp, Homo sapiens
tggcgcctgccccgtcagacaggggccccatcccactcgctaccctgtccgatggggaaactgaggcacggagctggacagtgactcagacaccaggagctgcctggagtggagctgagagctcaggtctgggctcagccagtccagagtacaaatctactgtcccttcctagctgtgtgatcttgacaggcactggacggggcctgcaggggtctccacagagaccatcaggatgtcgtattttggggagcatttttggggcgagaaaaatcatggctttgaggtcctgtaccacagcgtgaagcaggggcccatctccaccaaggagctggcggacttcatccgggagagggccaccatcgaggagacctactcgaaggcgatggcgaaactctccaagctggccagcaacgggacccccatggggaccttcgccccgctctgggaggtcttccgcgtctcctcggacaagctggcgctgtgccacctggaactgacacggaagttacaggatctcatcaaggacgttctccgctacggcgaggaacagctcaagacccacaagaagtgcaaggaggaagtggtgagcaccttggatgctgtgcaggtactctcgggcgtcagccagctcctgcccaagtcccgcgagaactacctgaaccgttgcatggaccaggagcggctgcggagggagagtaccagccagaaggagatggacaaggcggagactaaaaccaagaaggcggcagagagcctgcggcgctcagtggaaaaatacaactcagcccgagctgactttgagcagaagatgctggactcagccctgcgcttccaagccatggaggagacacacctgaggcacatgaaggcactgctgggctcatatgctcactcggtggaggacacgcacgtgcagattgggcaggtgcatgaggaatttaagcagaacatcgagaacgtcagcgtggagatgctactcaggaagtttgcagagagtaagggcacaggccgggagaagcctggacctctggacttcgaggcatacagtgcggctgccctgcaggaagcgatgaaacgtttgcggggagccaaggcctttcgccttccaggactaagccggcgggagcgggagccggagccacctgcagctgtagatttcctggagcccgattcagggacatgtccagaggtggatgaagaaggtttcactgtccggcctgatgtgacccagaacagcacggccgagccctcccgtttctcgtccagcgactccgacttcgacgatgaagagccccgcaagttctatgtgcacatcaagcctgccccggcccgggctccagcctgcagccccgaggcagcagcggcacagctcagggccaccgcaggcagcctcatccttcctcctggcccagggggcaccatgaaacgccattcttcacgggacgctgctgggaaaccccagagacctcggtctgcccccagaaccagcagctgtgcagagagattgcagtcagaggagcaggtgtccaagaacctctttgggccgcccctggagtcagcctttgaccacgaagattttacaggctctagcagcctgggcttcacctccagcccctcccctttctcctcctcgtcgcccgaaaacgtggaggattccggcctggactctccgtcccacgcggcacctggcccctccccagattcctgggtcccccgcccaggcaccccgcagagcccgcccagctgtagggcgccacccccagaggccaggggtatccgggcaccgcctctgccagactcgccgcagcccctcgcctcgtctccaggcccctgggggctggaggccttggccggaggagacctgatgcctgcacctgctgaccccacagccagggagggcctggcagccccacccaggagacttcgctctaggaaggtgtcctgccctctcacacgtagcaatggggacctgtctcgttccctgagcccctccccactgggctcttcagccgccagcactgccttggaacggcccagcttcttatcccagacaggacacggagtctcccggggtccgagccctgtggtcctgggctcccaggatgccctgcccatagccacagccttcacggagtatgtccacgcctacttccgtggccacagccccagctgcctggctcgagtaactggggagctgaccatgaccttccctgctggcatcgtgcgtgtgttcagcgggaccccaccaccacctgtcctcagcttccggcttgtacacacaaccgctattgagcacttccagcccaacgccgatctgctgttcagtgacccctcccagagtgaccctgagaccaaagacttctggctcaacatggcagctctgaccgaagccctgcagcgccaggcagagcagaaccccactgcctcctactacaacgtggtgctgctgcgataccagttctcccgcccgggtccccagtctgtgcctctgcagctcagtgcccactggcagtgtggagccaccctcacccaggtctcagtggagtacggctaccggcccggtgccacggctgtgcccacaccactcacgaacgtccagatcctgctgcctgtgggggagcctgtgaccaacgtccgcttgcagccggctgccacctggaacctggaggagaagcggctcacttggaggcttccagatgtgtccgaggcaggcggttctggccgcctctctgccagctgggagccgctctcagggcccagcacacccagccccgtggctgcacagttcaccagcgaggggaccactctgtcgggcgtggacttggaactggtgggcagcggttaccgcatgtcgctggtgaagaggaggtttgccacagggatgtacctggtgagctgctgaacccgcaaatgctgctgccccagctctacactgcgccctggtgctggctgaccaccccctgccctcctgccggaccctggggcctcccaccccagcctccctgaggcccatactccacggagaggagccccatgcccagcctggctgagcccgagattcgctcctccccctcatgccaaccccacacaggtcccggccttttaatgttctttgaataaacactttattttctaataaaataaaaaaggaaaaaaaaaaaaaaaaaaaaaaaaaaaaaaaaaaa

SEQ ID NO: 13013 - DNA, 2896 bp, Homo sapiens
gttccaagggctgatgctgggaaccttgctctggatgcgaggcctgcccctggagggagccgcggaggactggcagctgcagatgctggagcaggccagcctgtggctgggccgtagcttcctgctggcaggcttcctggtatcgagcagctgccccagcctggagcaggcggccaagggtgagggctgttcccccatcccttgtttcgcccactgcctcgactccctggtgagaaactttctgtgtcaccctcacagtgtccagatcatcctgggcactgccagggccacctgcagccatttctaaggctctgtggaggcccagggactcctcacccagctccagcgccagcgcagcctcctagcccaccagccctttgaggagctcttggaccactgggtctcggcctaccacctgctggagtggctggtggagcagcagcagccccttcaagagtacaagggcaggcaccagctggggaaggctggtgttgccttgtcggccacattctggagcccggcagacagcctcagcaagctcctgtagcccttccagatggtggtccgcgaggcgagtgcggcacaggcctctctgagccaggtgctgccccagctgcgctacctgcacatcttcctggagcaggttcacacacactttcaggagcagagtgtcggggagaggggcgcagccatccagctggctgaggggttggcccggcagctctgcaccgactgtcagctcaacaagctcttctaccgcgaggagtttgtgctggccaccttgctggacccttgcttcaaggggaagattgaggccatcctgccatgggggccgaccgacattgaccactggaagcaagtcctcgtgtacaaggtgaaggagattagagtgtctgaatactctttgaactccccaagtcccctgcaaagccccaggggtctgtgcgtggaccccaccagggtagccaagagctccggggtggaggggagaagccagggggagcctctgcagagcagcagccactctggggccttcctgctggcccagagggagaagggcttgctggagagcatggggctgctggcctctgagagaagcgggggctcgctgtccaccaagagccactgggccagcatcattgtcaagaagtatctgtgggagaatgagaccgttggagcccaggatgaccccctggcttactgggagaagaagcgagaagcctggccaccatctatctgtcttaccccccacaggagccttctctgaaagcatctttgcctccctgaacagccccacccttgtagagcaaaactcttctctcaaggtggaagccattgagcatctcctcttcttgaaggccaacctggagcagttccccaactacaccccgcctcccctcatctgctctagtggtgacctggccaaggggatacagaccctgcagtccgctcagggtgggatggcagacatggcaggtgccggtgctcaccctgcccgtgaactcctagagagcccctgcctgtaataggtcaaagcagagagctgggtgttgcatcctgggcgccacatgctcatggccagaatcttaaacctatttggtaggaaagggtcagtttctcacttgacagattgccatatttttttttctgggagatgtcattttccatctcccgattacttcctttacgtctagcagtatgtgccgagaagaggcttactctcttcgtaggtgactgtgaattttgtactacgtggctttgtacatgtgatgctctgttaaaacataagtgggtatgaaggtccttgcatacaccttgtctgtgtggataagtggacacatgcccttaagaggcttgctttctcaaaaagtggccaaggatgtggagtgggcatgtgctggcaggtgggatatgtcctcagcctttgggggcctggataagctattgcagcactttctgaggctttcactgtagggagaaggaaaccccaagggtagaatagccatttccagagggaagtacacacatacccccacacaccagtctttttgggggtttcagagtggccggagaaaccgactgaagggactgaccagctagctaggagagctgagacgccagtcctcaaatggcgttcttaccaatagtctatttccagactactggaaacgttggggtttcttcctccagtgacagcagcctcagtagctttcctgggctccaggcggctggctgcacaccctgcctgccatcacccttgcccctgcttgtcctggaccacttttaaaggggaagtcccttatttggaagagagaaaggatgtgtgtagcacacactcatcatggattgctcagagttcctttagggcagagctgagggcctgggatccaggaaccagtgggattggatgggagaagaaggaagggggtggcccgtcacccccgcaagacttgcatccaggtagcctaaggactcctggtcactgggtagggtggctgctgagatgcaggtcggaagaggcaggggaaggctccaggcctaacttggagcatgtcactggccatgggggtgaggggacagactctgctctcactggctggcagccccaggagcctgttcccttgcctctcctggatgggttgtcagccctgtgtttcactgtgaccaattcattataacatttggatattactgaaaatgtaaggaagcaggaaaaattaactactttcattcagagatagcctctatcaatagtttgacatttttccctcttttacattgagatcataccctaggtactgtttagtatgcaatattttcattttcgcagtataataattgcacctgttaaataaagttttgtaaacatttaaaaaaaaaaaaaaaaaaaaaaaaa

SEQ ID NO: 13014 - DNA, 2614 bp, Homo sapiens
attgcggagagcggctgatcgcagtccggaggtgaggcggaactctgagcaggtggtccattatggctgacatgcaaaatctggtagaaagattggagagggcagtgggccgcctggaggcagtatctcatacctctgacatgcaccgtgggtatgcagacagtccttcaaaagcaggagcagctccatatgtgcaggcatttgactcgctgcttgctggtcctgtggcagagtacttgaagatcagtaaagagattgggggagacgtgcagaaacatgcggagatggtccacacaggtttgaagttggagcgagctctgttggttacagcttctcagtgtcaacagccagcagaaaataagctttccgatttgttggcacccatctcagagcagatcaaagaagtgataacctttcgggagaagaaccgaggcagcaagttgtttaatcacctgtcagctgtcagcgaaagtatccaggccctgggctgggtggctatggctcccaagcctggcccttatgtgaaagaaatgaatgatgccgccatgttttatacaaaccgagtcctcaaagagtacaaagatgtggataagaagcatgtagactgggtcaaagcttatttaagtatatggacagagctgcaggcttacattaaggagttccataccaccggactggcctggagcaaaacggggcctgtggcaaaagaactgagcggactgccatctggaccctctgccggatcaggtcctcctccccctccaccaggcccccctcctcccccagtctctaccagttcaggctcagatgagtctgcttcccgctcagcactgttcgcgcagattaatcagggggagagcattacacatgccctgaaacatgtatctgatgacatgaagactcacaagaaccctgccctgaaggctcagagtggtccagtacgcagtggccccaaaccattctctgcacctaaaccccaaaccagcccatcccccaaacgagccacaaagaaggagccagctgtacttgaactggagggcaagaagtggagagtggaaaatcaggaaaatgtttccaacctggtgattgaggacacagagctgaaacaggtggcttacatatacaagtgtgtcaacacgacattgcaaatcaagggcaaaattaactccattacagtagataactgtaagaaacttggcctggtattcgatgacgtggtgggcattgtggagataatcaacagtaaggatgtcaaagttcaggtaatgggtaaagtgccaaccatatccatcaacaaaacagatggctgccatgcttacctgagcaagaattccctggattgtgaaatagtcagtgccaaatcttccgagatgaatgtcctcattcctacagaaggcggtgactttaatgaattcccagttcctgagcagttcaagaccctatggaacgggcagaagttggtcaccacagtgacagaaattgctggataagcgaagtgccactgggttctttgccctcccttcacaccatgggataaatctgtatcaagacggttcttttctagatttcctctacctttttgctcttaaaactgcttctctgctctgagaagcacagctacctgccttcactgaaatatacctcaggctgagatttggggtgggatagcaggtcagttgatcttctgcaggaaggtgcagcttttccatatcagctcaaccacgccgccagtccattcttaaggaactgccgactaggactgatgatgcattttagctttgagcttttgggggttattctaccaacaaacagtccattggaaagaaaacagtccctggaattaacagatcagaatgttcacactggttaatctttttttaacaatgagcatgaaggtagcagaagctggtgtgtttccagatggttcttctaaccaaactaatttttcactgttgacaagcgaggcaagggttgcactggaccaaaggctgaggcttggccatctagcattccatacaaaattgtttcctataagcattccttttattctctattctatcctgggtctgcctcaaccgtgagataggagagtctctggtactagctgctgtagcagtgcccttcatccagggcagttaatggagtcttggaccctttctttctctgggatccctgcccagcaccttcctatagagatgactttaaaaggaaaaaaaaaaaaaaacccacatgatttcaaggagtctggcattcctgaatccttcttccctgccaggtgcctgtcacctgtcttcactgcctccttttccctgtcatgctcatcagcttatggcttctgtctaagcacctgaacagaggactgaaacctccactgcaggctggttttaggtcttgaattatgtaagaatcttgcacagcactgctaatgtaaatttcagttgtttttccctctaggacaaacacttaccaaaatatgcaacttttttttggtgggaagagagattgtcctgtgatttctacccatttcctgaggcctgtggaaataaacctttatgtacttaaagttatacagaaaatagaataaagttaataccaaacttgaaaaagcggccgc

SEQ ID NO: 13015 - DNA, 5501 bp, Homo sapiens
attttaaaaaagatccggccatactatttttatcttgctttttcgttctgtcgcagtactgtttaatatgagtccagcgacggctctgtgactgttttcctctggtaaaatcgctcttgcgtcctcagcgtttatctcaggtgcggaaggtctcacaggtttggaaatagcgccggaaaaatcgatccgcggagtgagacggctcgtaccacactgcagggcccggaggtcaagatggtggctgtaaaactaggatccctgacgattgcttagcattaaggcccgacatggaaccggggtgtgacgagttcctgccgccaccggagtgcccggtttttgagcctagctgggctgaattccaagacccgcttggctacattgcgaaaataaggcccatagcagagaagtctggcatctgcaaaatccgcccacccgcggattggcagcctccttttgcagtagaagttgacaatttcagatttactcctcgcgtccaaaggctaaatgaactggaggcccaaactagagtgaaattgaactatttggatcagattgcaaaattctgggaaattcaaggctcctctttaaagattcccaatgtggagcggaagatcttggacctctacagccttagtaagattgtgattgaggaaggtggctatgaagccatctgcaaggatcgtcggtgggctcgagttgcccagcgtctccactacccaccaggcaaaaacattggctccctgctacgatcacattacgaacgcattatttacccctatgaaatgtttcagtctggagccaaccatgtgcaatgtaacacacacccgtttgacaatgaggtaaaagataaggaatacaagccccacagcatcccccttagacagtctgtgcagccttcaaagttcagcagctacagtcgacgggcaaaaaggctacagcctgatccagagcctacagaggaggacattgagaagcatccagagctaaagaagttacagatatatgggccaggtcccaaaatgatgggcttgggccttatggctaaggataaggataagactgtgcataagaaagtcacatgccccccaactgttacggtgaaggatgagcaaagtggaggtgggaacgtgtcatcaacattgctcaagcagcacttgagcctagagccctgcactaagacaaccatgcaacttcgaaagaatcacagcagtgcccagtttattgactcatatatttgccaagtatgctcccgtggggatgaagatgataagcttcttttctgtgatggctgtgatgacaattaccacatcttctgcttgttaccaccccttcctgaaatccccagaggcatctggaggtgcccaaaatgtatcttggcggagtgtaaacagcctcctgaagcttttggatttgaacaggctacccaggagtacagtttgcagagttttggtgaaatggctgattccttcaagtccgactacttcaacatgcctgtacatatggtgcctacagaacttgtagagaaggaattctggaggctggtgagcagcattgaggaagacgtgacagttgaatatggagctgatattcattccaaagaatttggcagtggctttcctgtcagcaatagcaaacaaaacttatctcctgaggagaaggagtatgcgaccagtggttggaacctgaatgtgatgccagtgctagatcagtctgttctctgtcacatcaatgcagacatctcaggcatgaaggtgccctggctgtacgtgggcatggttttctcagcattttgttggcatattgaggatcactggagttactctattaactatctgcattggggtgagccgaagacctggtatggtgtaccctccctggcagcagagcatttggaggaggtgatgaagatgctgacacctgagctgtttgatagccagcctgatctcctacaccagcttgtcactctcatgaatcccaacactttgatgtcccatggtgtgccagttgtccgcacaaaccagtgtgcaggggagtttgtcatcacttttcctcgtgcttaccacagtggttttaaccaaggctacaattttgctgaagctgtcaacttttgtactgctgactggctacctgctggacgccagtgcattgaacactaccgccggctccggcgctattgtgtcttctcccacgaggagctcatctgcaagatggctgccttcccagagacgttggatctcaatctagcagtagctgtgcacaaggagatgttcattatggttcaggaggagcgacgtctacgaaaggcccttttggagaagggcgtcacggaggctgagcgagaggcttttgagctgctcccagatgatgaacgccagtgcatcaagtgcaagaccacgtgcttcttgtcagccctggcctgctacgactgcccagatggccttgtatgcctttcccacatcaatgacctctgcaagtgctctagtagccgacagtacctccggtatcggtacaccttggatgagctccccaccatgctgcataaactgaagattcgggctgagtcttttgacacctgggccaacaaagtgcgagtggccttggaggtggaggatggccgtaaacgcagctttgaagagctaagggcactggagtctgaggctcgtgagaggaggtttcctaatagtgagctgcttcagcgactgaagaactgcctgagtgaggtggaggcttgtattgctcaagtcctggggctggtcagtggtcaggtggccaggatggacactccacagctgaccttgactgaactccgggtccttcttgagcagatgggcagcctgccctgtgccatgcatcagattggggatgtcaaggatgtcctggaacaggtggaggcctatcaagctgaggctcgtgaggctctggccacactgccctctagtccagggctattgcggtccctgttggagagggggcagcagctgggtgtagaggtgcctgaagcccatcagcttcagcagcaggtggagcaggcgcaatggctagatgaagtgaagcaggccctggccccttctgctcacaggggctctctggtcatcatgcaggggcttttggttatgggtgccaagatagcctccagcccttctgtggacaaggcccgggctgagctgcaagaactactgaccattgcagagcgctgggaagaaaaggctcatttctgcctggaggccaggcagaagcatccaccagccacattggaagccataattcgtgagacagaaaacatccctgttcacctgcctaacatccaggctctcaaagaagctctgactaaggcacaagcttggattgctgatgtggatgagatccaaaatggtgaccactacccctgtctagatgacttggagggcctggtggctgtgggccgggacctgcctgtggggctggaagagctgagacagctagagctgcaggtattgacagcacattcctggagagagaaggcctccaagacctttctcaagaagaattcttgctacacactgcttgaggtgctttgcccgtgtgcagacgctggctcagacagcaccaagcgtagccggtggatggagaaggcgctggggttgtaccagtgtgacacagagctgctggggctgtctgcacaggacctcagagacccaggctctgtgattgtggccttcaaggaaggggaacagaaggagaaggagggtatcctgcagctgcgtcgcaccaactcagccaagcccagtccactggcaccatccctcatggcctcttctccgacttctatctgtgtgtgtgggcaggtgccagctggggtgggagttctgcagtgtgacctgtgtcaggactggttccatgggcagtgtgtgtcagtgccccatctcctcacctctccaaagcccagtctcacttcatctccactgctagcctggtgggaatgggacacaaaattcctgtgtccactgtgtatgcgctcacgacggccacgcctagagacaatcctagccttgctggttgccctgcagaggctgcccgtgcggctgcctgagggtgaggcccttcagtgtctcacagagagggccattggctggcaagaccgtgccagaaaggctctggcctctgaagatgtgactgctctgttgcgacagctggctgagcttcgccaacagctacaggccaaacccagaccagaggaggcctcagtctacacttcagccactgcctgtgaccctatcagagaaggcagtggcaacaatatttctaaggtccaagggctgctggagaatggagacagtgtgaccagtcctgagaacatggctccaggaaagggctctgacctggagctactgtcctcactgttgccgcagttgactggccctgtgttggagctgcctgaggcaatccgggctcccctggaggagctcatgatggaaggggacctgcttgaggtgaccctggatgagaaccacagcatctggcagctgctgcaggctggacagcctccagacctggacagaattcgcacacttctggagctggaaaaatttgaacatcaagggagtcggacaaggagccgggctctggagaggcgacggcggcggcagaaggtggatcagggtagaaacgttgagaatcttgttcaacaggagcttcagtcaaaaagggctcggagctcagggattatgtctcaggtgggccgagaagaagaacattatcaggagaaagcagaccgtgaaaatatgttcctgacaccttccacagaccacagccctttcttgaaaggaaaccaaaatagcttacaacacaaggattcaggctcttcagctgcttgtccttctttaatgcctttgctacaactctcctactctgatgagcaacagttgtgacagtggcaccaaaggtcatttgtggttgtttttgtttgtttgtttcttaaatcctactatctcctggcctggacctcagaaggagctttttgcttatctataatttttcactgccaatttttgatatcctctctcctagagttactgttaaaaggttggttcgtaaagtccacaccccgatgctcagaagtgtcttgccagcaacattcctgctagcatacaggagtgatttcctaaaccagtttcattctagtctgaatagggacaaacaaatcttgaggaagcccaagtgcgtacctttatttttgcccccaccaccctctttctgtacttcaatttttgtttgttttttgtttttttgtccctgtcataaaatattttggtgcttcaaaacttgtaccttcattgtacatccttttcttttctccccttgggtcttattataaaagaagacaatgtacgttgtaattaccaaaaagaatagggaaaaacaagaatttcatgactctacctgtggtctatctttaatttcatttcttttgttaaaaataaaacaatgagtatgtttggatactatgaaaaaaaaaaaaaaaa

SEQ ID NO: 13016 - DNA, 4431 bp, Homo sapiens
ctgcgctcccgctccagctaggactctctctgccgcctcctcctcctcctccgacctcagtcctcaccaccctcctcccgctcctcaaaagcacccccgagtccccaccccctcacgccgcacccgcgggaacgaggccttgggaattcaggggagtggctgtgggggcgcgtcgcggctcccagctcggccagcccctctttcaagacatggtctgatccccattgtaaaagctgcgccccgaagaggaggagagagtcgtgctccctgcctggggctgcagggagctctccgtgctgaagctcttgcattattttagggtggggcgaagagggccctggattttggggagtgggggtgggtggggaggaggacccgaggggggcaaggactctgtgggggagtcggtgagagactatggggaaggaccaggagctgctggaagctgctcgcactggaaatgtggctctggtggagaaactcctgtctggcaggaaaggagggatcctgggcggtggatccggacccctgcccctgtctaatctgctaagcatctggcgaggccccaatgtgaactgcacagacagttcgggttacactgctttacaccacgcagccttaaatggacataaggacatagttctcaaactacttcagtatgaggcatcaacaaatgtagcagacaacaaagggtattttcctattcacctggctgcctggaaaggagatgtggaaattgtgaagattcttattcatcatggaccatcacattccagggtcaatgaacagaacaatgaaaatgaaactgccctacactgtgcagctcaatatggacactcagaagtagttgctgttctcctagaagagctcactgacccgacaattagaaatagcaagctggaaacacctttggacttggcggcactctacggacggcttagagtggtaaaaatgatcatcagtgcacatcctaacttaatgagctgcaacactcgcaagcacacgccacttcaccttgctgcgcgcaatggccacaaagcagtcgtgcaggtgctgctggaggcaggaatggatgtgagctgtcaaacagaaaaggggagtgcacttcatgaagcagctttgtttggaaaggtggatgttgtacgagttctgttagaaacaggaattgatgccaacataaaggatagcttaggtagaactgtcttggacattctgaaagaacatccatctcagaaatctctccagattgcaacactcttacaagagtatttagaaggcgtgggaagatctacagtcctcgaagagcctgtacaggaagatgcaacacaagaaacacacatttcatctcctgttgagtctccttcccaaaagaccaaaagtgaaaccgtcactggagaattatcaaaactcttggatgaaataaaactctgtcaagaaaaggattattcgtttgaagacttgtgccacacaatatcagaccactacttagataatttgagcaagatttcagaggaagaacttgggaaaaatggaagccagagtgtaagaacctcatctacaatcaatttgtcaccaggagaagtggaagaagaggatgatgatgaaaatacgtgtgggccatcaggactttgggaagcattaactccgtgtaatggatgtaggaaccttggcttccccatgcttgcccaggagtcctatccaaagaagagaaattacactatggaaattgtaccatctgcttctctggatacatttccttcagaaaatgagaactttctgtgtgatctcatggacacagctgttacaaagaaaccttgctccttagaaattgcaagggcaccttccccaagaactgataatgcctctgaggtagcagttactactccaggaactagtaaccatagaaacagctcaacaggcccaacacctgattgttcacctccatcccctgatactgccctcaaaaatattgtaaaagtcattcgaccccagcctaaacagcgaacatccattgtgtcttctctggattttcaccgaatgaatcacaaccaagaatattttgaaatcaacacatctacagggtgcacaagctttactgccagtcctcctgctagtccacccacctcttctgtgggaaccacagaagtcaagaatgagggaactaaccatacagatgacctctcccgacaggatgacaatgatcccccaaaagaatatgatcctgggcaatttgcaggcctgctccatggatcctctccagcctgtgagtcccctgaaaatccatttcatctctatgggaaaagagaacaatgtgaaaaaggacaagatgaagtcagtttggcaaacagtcctttgcctttcaagcagtctccaatagaaaataactcagaacctttggtaaagaaaattaaacccaaagtggtcagtagaacaatttttcacaaaaaaagcaaccaactcgaaaaccataccattgttggcacaagatcaaccaggagtggatctcggaatggggaccagtgggttatgaacgcagggggatttgtggagagagcctgtactctggggagaataaggtcattgcctaaagccttgatcgacatgcatttgtcaaaaagtgtctctaaatctgattctgatctcattgcctatccttccaatgagaaaacatcaagagttaactggagtgaatcttccactgctgaacacagttctaaagggaattctgaaagaacaccatccttcacatcggaatgggaagaaattgacaaaataatgagttccatagatgttggaatcaacaacgaacttaaagagatgaatggtgagaccacaagacccagatgccctgtccaaacagtgggacaatggttggaaagcattgggctacctcagtacgagaaccacctgatggctaatggatttgacaatgtgcagtttatgggaagcaatgttatggaagatcaggatttgttggaaattggaatccttaattctgggcacagacaaagaattctacaggcaatccagctccttccaaagatgagacccattgggcatgatggctaccatcccacctctgtagctgagtggctggattccattgaactgggcgactacaccaaagcctttctaattaatggctacacttcgatggacctgttgaaaaaaatctgggaggttgaacttattaatgttttaaaaatcaatttgattggccacaggaaacgtattttggcatctctgggagacaggctgcacgacgatcccccacagaagccccctcggtccatcaccctcagggaacccagtggtaatcacactcctcctcagttgtctccatcacttagccaaagcacttacaccactggtggctccctagacgttcctcacattatcatgcagggcgatgcaaggaggagaagaaatgaaaactactttgatgatattccccgatcaaaactggagaggcagatggctcagacaggagactggggagaaccttccattaccttgcgacctccgaatgaagccacagcctctaccccggtacagtactggcagcatcacccagaaaagcttatcttccagtcgtgtgattacaaagctttttatttaggttctatgctgataaaagagcttagggggacagaatcaacccaagatgcttgtgcaaaaatgcgggctaactgtcagaagtctacagagcaaatgaagaaggtccctactattattctttctgtctcatataaaggagtcaaatttattgatgcaacaaataagaacataattgctgagcatgaaattcgtaatatctcctgtgctgcccaggacccagaagacctctcaacatttgcctatatcacaaaagatttgaagtctaatcaccactactgtcatgtgtttactgcctttgatgtgaatttagcctatgaaatcatcctaaccctgggacaggcattcgaagtcgcttaccagctagcactacaagcaagaaaagggggacactcctccacacttccagaaagctttgaaaacaaaccctccaaacccatccccaagccccgcgttagcattcgcaagtccgtggatcttcttcatgccagccataccgggcaggaaccatcagagagacacactgaggaggcactcagaaaattttgatagaattgaatttacatatagctgataaagcctaaatagaaaggttgatgtatttagcttgaatccttcactttagtggtctaatcaacagataaatgacaagcaaagaatgaaacaatccaaaaatgtttttcaaaacaattttgtgaattttatttttacaaaaattttttaaattcatattttaaaatgtataccaaggcaaaaaaatcatataagctatatcataaatacaagagtttcaaaacatacaagagacatataatg

SEQ ID NO: 13017 - DNA, 3996 bp, Homo sapiens
gcctcgtgggagtggtggttcgacggtgtcctatgcctgctttccttgcgggcggaggaactacaattcccagcgtgacccggaggcagcccgggcagaagggcggttgctgcagctttggccgaggttcgggctcgaacttggaaaatgctcctggcgcctcagggaaggtccttctcaaagaaaaggatggggctgaatcgctggaaacggttcacaaggaagccgagtcccaagcctacttttggtcctgacagtgtggaacactggataaagagagtggagaaagcctcagagtttgcagtgtcaaatgcattttttactagaaattcagatttacctagaagtccctggggccaaatcacagatttgaaaacatctgagcaaatagaggatcatgatgaaatctatgcagaagctcaggagctggtcaatgactggttagacaccaaacttaagcaagaattagcaagtgaggaagaaggtgatgctaaaaacactgtgtcaagtgtcactattatgccggaagccaatggccatttgaaatatgacaagtttgatgatttatgtggctatttggaggaagaagaggaaagtaccaccgttcaaaaatttatagaccatctgctccataaaaatgtggtagattctgcaatgatggaagatcttggaaggaaggaaaaccaagacaagaagcagcagaaggatcctcgtcttaccatggagatgagacataagcaggtaaaagaaaatcgcttaagacgtgagaaagaactggagtaccagagaatagaaaagaccctgaaaaaatcggccttcttggaggctcagtgtctggtgcaagaagagaagaaaaggaaggctctggaggccaagaaagaggaagaggagattcaaagggagatggtgaagctgcggagggagataattgagaggagacgcactgtgaaagcagcatggaaaatagagaagaaaaggcaagaagagaattctcaaaatagttcagaaaaagtcatgtttcaaagtactcacattcttccagatgaggaaaaaatggtgaaggaaagaaaaaggaaattgaaagaagtattaatccaaactttcaaagaaaatcaacagtgtcaaaaacggtatttcgctgcctggcacaagctgattcttgatcataggattaagctggggaaagctgggaccctgtctgactggaagattcagctgaaggtcctgcgggcctggagagactacacaagattccagaagttggagcgggagactcaagccttggaaaatgatcttagggaagaaaacagaaaacaacaactggccactgagtataaccggaaacaagttctccgacactgctttacagaatggcagcattggcatggcgccgagctcctgaagagagagctggctctcacaaaagaggaaactaggaagaagatggatgcactgctgcaggcagcatcactggggaaactcagtgccaatgggttatcaggcatcagtctacctgaggaggcaacagccatggtgggtccaccagtaaaaaatggacaggagactgctgtgccccctttgtgggaaaagcctcccttgggaagcagtggttgtatgctcagtcctcccctgggaagaacaacaacaggcaacttgcagggttcccttcagaatgtctctctgagtgcacctggcaataagcagcacaagaccctgggtgctgaaccctctcaacagcctggcagcaacgagacactcagaactaccagccagaaagcagaaccgctttgcttgggtcatttccacaaccgccatgtcttccagcaacagctgattgagaagcaaaagaagaaacttcaggaacagcagaaaacaattctcgagctgaagaaaaacctgcagctggcagaggctcagtgggcagcagagcatgccttagcagtcacagaagcacagagccacctgctgtcaaagcccagagaagaggaaccaagaacctgccagatgcttgtgaattcacctgttgcttcccctgggactgaaggcagaagtgactcccgaaattctctttctggactcagaaggaaaccaaagcaattgatgacaccgcatcccatactaaaagctatggaagagagagcaattcaacgagctgaatgtaggcggatcttggcagagaagaagaaaaaacaagaagaagaaaaattggcccagttaaaggcccaagaggaggaacgtcagaaaagggaggcagaagaaaaggaggcacagcttgaaagaaaacgagaagagaagagactgaagaaaatgaaagaacttgagaagcagaagagaattaagaggaaccagcagctggaagcaatagccaaagaacattatgaaagggtcttgctaaggaaaaaaggtctagagccttggaagagattgagaatgcaaagcaaacaaaacatccaggtggcagaagaacattactctttgttcctgcagaggaaatacatgctgacgtggttccagcgtagtcaggaaagtctggctagaaagatggcccaggctgatcaattttattcccaaatactgcttaagagagtcatccagagctggctacagtacgtgattgatctgcaggaagaagtaagaaaattttgtgtacattttcttcaaaagaagattttcagggcctggtttaacatggtcagggaggtgaagatcgattctcagggcaagcatgagattgcagcggagcacagtgacaggaggatcctctggatcacccttcggacatggaagaagtttgtaaaatttatgaaagaggaaagagtaaaagaagaaaggcgacagcaacttcgtaggaaggtagttgaaattcttccagacttccaggtacctggaaggtaccacgagctatatcagcaatcagatacttggtccttgagtaagacaagtctggtgaacgaatgagccagattagtgtaatatttaggacaggaagctcgactagtctgtatgtgtgttatctccacccacccacacacatacatacatacacctggtttattctctacgagctacttcttagatcaaaggaattattttgagaatttttattcccttctttgacttttcctggattgctagtcattcactatagcatttatcacagtgggatcatccaaaggaacattctagagatcgtctgttcaaatatatcctatatatttttagcatagtaaactttaaaaaggacaagtgtttgcctgactgagcctgtgaagaaaatgtgtccgtatagcacgacaggagttgctgatgtgaccttaatgaaacagaaataaacaggggtgagtgctcggaaaggaagggcgggccaaggcactcagccttctagtgcagtagcatcagtgacacgcaccccaccagacctcgtccactttcaccacccctgaaggcagaccatgtatgaaaaggttctctacacagctgctgcagaggacagcagcttatcctgatttcagagaaactgaggcaccagagatgcttctcttccgtgcaccttgataagcatgaaggacattccaaaaggtaataactctatcatgacagtccagcaattcattaaattatctgttcatgctcccacctgcaactgctgaataatacactcagtttgtcttctagtactcagctcagtttgatctagatattgagatacctatcttgaattcaaagaatgttttcatctttaagatgctataaagactgataaaatgctctcttctatgaattgtgttagagaattacctgctagaaaaataatttttcattataaaatacacatttattatataacaaattcaagtagtccataaatgcatatggtaaaatgagaaagtcctgtgcagtcctgagatgattactcttatttggtgtgctgaaaatttgagttgacaaaataaaattctgtggttttttaagtgaaaaaaaaaaaaaaaaaaaaaa

SEQ ID NO: 13018 - DNA, 5817 bp, Homo sapiens
ggaggcggccacggccgtagtcgctgcctgagagttgttgtttcctcctcctcctcctccgcctccgccgccgttgcttgaatggtggagccgaagctcggctcgtgaacacacactgacagctatagggcaggcggcggcaccgtccccgcttcccctcggcggcggggtgtcccgtcggcggccctgaagtgacccataaacatgtcttgtgagaggaaaggcctctcggagctgcgatcggagctctacttcctcatcgcccggttcctggaagatggaccctgtcagcaggcggctcaggtgctgatccgcgaggtggccgagaaggagctgctgccccggcgcaccgactggaccgggaaggagcatcccaggacctaccagaatctggtgaagtattacagacacttagcacctgatcacttgctgcaaatatgtcatcgactaggacctcttcttgaacaagaaattcctcaaagtgttcctggagtacaaactttattaggagctggaagacagtctttactacgcacaaataaaagctgcaagcatgttgtgtggaaaggatctgctctggctgcgttgcactgtggaagaccacctgagtcaccagttaactatggtagcccacccagcattgcggatactctgttttcaaggaagctgaatgggaaatacagacttgagcgacttgttccaactgcagtgtatcagcacatgaaaatgcataaacgaattcttggacacttgtcatctgtgtactgtgtaacttttgatcgaactggcagacggatatttactggttctgatgactgtcttgtgaaaatatgggcaacagatgatgggaggttgttagctaccttaagaggacatgctgctgaaatatcagacatggctgtaaactatgagaataccatgatagcagctggaagttgtgataaaatgatccgagtctggtgtcttcgaacctgtgcacctttggctgttcttcagggccatagtgcatctattacatcactacagttctcaccattgtgcagtggctcaaagagatatctatcttctactggggcagatggcactatttgtttttggctctgggatgctggaacccttaaaataaacccaagacctgcaaaatttacagagcgccctcggcctggagttcaaatgatctgttcttcttttagtgctggtggaatgtttctggcgacgggaagcacagatcatattattcgggtttatttttttggatcaggtcagccagagaaaatatcagaattggagtttcatactgacaaagttgacagtatccagttttccaacactagtaacaggtttgtaagtggcagtcgtgatgggacagcacgtatttggcaatttaaacgaagagagtggaagagcattttgttggatatggctactcgtccagcaggccaaaaccttcaaggaatagaagataaaatcacaaaaatgaaggttactatggtagcttgggatcgacatgacaatacagttataactgcagttaataacatgactctgaaagtttggaattcttacactggtcaactaattcatgtcctgatgggtcatgaagatgaggtatttgttcttgaaccacacccgttcgatcctagagttctcttttctgctggtcatgatggaaacgtgatagtgtgggatctggcaagaggagtcaaaatacgatcttatttcaatatgattgaaggccaaggacatggcgcagtatttgactgcaaatgctctcctgatggtcagcattttgcatgcacagactctcatggacatcttttaatttttggctttgggtccagtagcaaatatgacaagatagcagatcagatgttctttcatagtgattatcggccacttattcgtgatgccaacaattttgtattagatgaacagactcagcaagcacctcatcttatgcctcccccttttttggttgatgttgatggtaaccctcatccatcaagatatcaaagattagttcctggccgtgaaaattgcagggaggagcaactcatccctcagatgggagtaacttcctcaggactgaatcaagttttaagtcagcaagcaaaccaggagatcagcccactggacagcatgattcaaagactacaacaggagcaagacctgagacgttctggtgaagcaggtatcagtaataccagccgtttaagtagaggctccataagttctacctcagaggttcattcaccaccaaacgtaggactaagacgtagtggacaaattgaaggtgtacggcaaatgcacagcaacgcaccaagaagtgaaatagccacagagcgggatctggtagcttggagtcgaagggtggtagtacccgagctatcagctggtgtagccagtaggcaagaagaatggagaactgcaaagggagaagaagaaataaagacttacaggtcagaagagaaaagaaaacacttaactgttccaaaagagaataaaatacccactgtctcaaagaatcatgctcatgagcatttcctggatcttggagaatccaaaaagcaacagacaaatcaacacaattatcgtacaagatctgcattggaagagactcctagaccctcagaagagatagaaaatggcagtagttcttcagatgaaggcgaagtagttgctgtcagtggtggaacatccgaagaagaagagagagcatggcacagtgatggcagttctagtgactactccagtgattactctgactggacagcagatgcaggaattaatctgcagccaccaaagaaagttcctaagaataaaaccaagaaagcagaaagcagttcagatgaagaagaagaatctgaaaaacagaagcaaaaacagattaaaaaggaaaagaaaaaagtaaatgaagaaaaagatggaccaatatcaccaaagaaaaagaagcccaaagaaagaaaacaaaagagattggctgtgggagaactaactgaaaatggtttgacattagaagaatggttgccatcaacatggattacagataccattccccgaagatgtccatttgtgccacagatgggtgatgaggtttattatttccgacaaggacatgaagcctatgtcgaaatggcccggaaaaataaaatatatagtatcaatcccaaaaaacaaccatggcataaaatggagctacgggaacaagaacttatgaaaatagttggcataaagtatgaagtgggattacctaccctttgctgccttaaacttgcttttctagatcctgatactggtaaactgactggcggatcatttaccatgaaataccatgatatgcctgacgttatagatttcctagtcttgagacaacaatttgatgatgcaaaatacaggcgatggaatataggtgaccgcttcaggtctgtcatagatgatgcctggtggtttggaacaatcgaaagccaggaacctcttcaacttgagtaccctgatagtctgtttcaatgctacaatgtttgctgggacaatggagatacagaaaagatgagtccttgggatatggagcttatacctaataatgctgtatttcctgaagaactaggtaccagtgttcctttaactgatggtgagtgcagatcactaatctataaacctcttgatggagaatggggtaccaatcccagggatgaagaatgtgaaagaattgtggcaggaataaaccagttgatgacactagatattgcctcagcatttgtggcccccgtggatctgcaagcctatcccatgtattgcacagtagtggcatatccaacggatctaagtacaattaaacaaagactggaaaacaggttttacaggcgggtttcttccctaatgtgggaagttcgatatatagagcataatacacgaacatttaatgagcctggaagccctattgtgaaatctgctaaattcgtgactgatcttcttctacattttataaaggatcagacttgttataacataattccactttataattcaatgaagaagaaagttttgtctgattctgaggatgaagagaaagatgctgatgtgccaggaacttctactcgaaaaaggaaggaccatcagcctagaagaagattacgtaatagagcccagtcttacgatattcaagcatggaagaaacagtgtgaagaattgttaaatctcatatttcaatgtgaagattcagagcctttccgtcagccggtagatctccttgaatatccagactacagagacatcattgacactccaatggattttgctaccgttagagaaactttagaggctgggaattatgagtcaccaatggagttatgtaaagatgtcagacttattttcagtaattccaaagcatatacaccaagcaaaagatcaaggatttacagcatgagtttgcgcctgtctgctttctttgaagaacacattagttcagttttatcagattataaatctgctcttcgttttcataaaagaaataccataaccaaaaggaggaagaaaagaaacagaagcagctctgtttccagtagtgctgcatcaagccctgaaaggaaaaaaaggatcttaaaaccccagctaaaatcagaaagctctacctctgcattctctacacctacacgatcaataccgccaagacacaatgctgctcagataaacggtaaaacagaatctagttctgtggttcgaaccagaagcaaccgagtggttgtagatccagttgtcactgagcaaccatctacttcttcagctgcaaagacttttattacaaaagctaatgcatctgcaataccagggaaaacaatactagagaattctgtgaaacattccaaagctttgaatactctttccagtcctggtcaatccagttttagtcatggcactaggaataattctgcaaaagaaaacatggaaaaggaaaagccagtcaaacgtaaaatgaagtcatctgtactcccaaaggcgtccactctttcaaagtcatcagctgtcattgagcaaggagattgtaagaacaacgctcttgtaccaggaaccattcaagtaaatggccatggaggacagccatcaaaacttgtgaagaggggacctggaaggaaacctaaagtagaagttaataccaatagtggtgaaattatacacaagaaaaggggtagaaagcccaaaaagctacagtatgcaaagccagaagatttagagcaaaataatgtgcatcccatcagagatgaagtacttccttcttcaacatgcaattttctttctgaaactaataatgtaaaggaagatttgttacagaaaaagaatcgtggaggtaggaagcccaaaaggaagatgaagacacaaaaattagatgcagatctcctagtccctgcaagtgtcaaagtgttaaggagaagtaaccgaaaaaagatagatgatcctatagatgaggaagaagagtttgaagaactcaaaggctctgaaccccacatgagaactagaaatcaaggtcgaaggacagctttctataatgaggatgactctgaagaggagcaaaggcagctgttgttcgaagacacctctttaacttttggaacttctagtagaggacgagtccgaaagttgactgaaaaagcaaaagctaatttaattggttggtaacttgtaccaaaatattttacttcaaaatctataaagcaggtacagttaaggaataagtagaactaaggcttctgcttccttgctgctgtggtggagtagggaatgttatgatttgatttgcaaaaaaaaaaaaaaaaaaaaaaaaaa

SEQ ID NO: 13019 - DNA, 5405 bp, Homo sapiens
gctggaagctgcagggaacagctgcggtgctctgccatattgtgtcttccccggccggtccctcgcctcccggccgagctgacgttggttgaagccatggataacagaacccacagatgcagagggctgactgtacaagtctgtcaaaaaaccaaactgctggttggctaataattggtcactgtatgacttatagtacaggtgatattacttctgattctagatgaactgtaagagtaaatgggtccagtaattggaatgactccagataagagagctgaaaccccaggagctgaaaagattgcaggattaagccagatttacaaaatgggaagcttgcctgaagctgttgatgctgccaggccgaaggccactctagtggacagtgagtcagcagatgatgaactcacaaacttgaactggcttcatgaaagcactaatcttctaacaaacttcagcctcggaagtgagggtcttccaattgttagtccattgtatgacatagagggagatgatgtgccatcctttggaccagcttgctaccagaacccagaaaaaaaatcagcgacttcaaagcccccatactcctttagtcttctcatttatatggccattgagcactctccaaataaatgtttgcctgtcaaagaaatttatagctggattctggaccattttccatattttgctactgcaccaacaggctggaagaattctgttcgacataatctgtccctgaataaatgttttcagaaagtggaaagaagccatggcaaggttaatggaaaaggttccttatggtgtgttgatccggaatataaacccaatcttatccaggcactgaagaagcaacctttttcttcagcatcttcacaaaatggttctttatcacctcactatttaagctctgtaatcaagcagaaccaggtgcgaaacctcaaagaatctgatattgatgctgctgctgcaatgatgcttttaaatacttctatagaacaaggaattttagaatgtgagaagcctcttcctcttaaaacagcattgcaaaaaaagaggagttacggcaatgcatttcatcatcccagtgctgtacgattacaagagagtgattctttagccaccagcattgatccaaaagaagatcacaattacagtgcaagtagcatggcagcacagcgttgtgcatccaggtctagcgtgtcttccctgtcttctgtggatgaggtatatgaatttatcccaaagaatagtcacgtgggaagtgatggcagtgaaggatttcacagtgaagaagatacagacgttgattatgaagatgatcctcttggagacagtggctatgcatcacagccttgtgcaaaaatctctgaaaaagggcagtcaggcaaaaagatgcgaaaacagacatgtcaagaaattgatgaggagctcaaagaggcagctggatctctgctccaccttgctggaattcgtacatgtttaggttccctaataagtactgcaaagacacaaaatcaaaagcaacggaaaaaatagaaatacttaaagtgtggcaatactctttcacttaattctttacaagggatatcaaagccataatggacttcattagttttagggtagggaagggatactaattacttatttctttcaaaacatttttggtttttggtttttaaaatttttattaaacaattgctgttaggatcatgcctgatcagaaatacatgatgtgaagtcctaaaagcataatttttgtgataaatgtgtccaagatttgaaaatttttatataagaaaatccccagcctctgtcttaaacttgtgggacaaaaatcctttcttctgttaatatgtcagaatgtaagatttggcaactcgataaatttttttcattttcttttccaatctgtaactatagttactgaaccagctaaaaattttgctgatgtatttttcatatacttctctcctgacacgcaatccggtaacataagattgaaatttttttactttgtcttaatttgtttctaattttttttttgttgtcgtgtgagcaaagacaaacataaattgaaaaacatcctgatgtttagaaagtttcttttggttacgtaggtagagaatacaacaaagagttctaagacttagaaaagacaattttgtggtgtcatttcatccaagaacactcccaattcctattagaatggtagctttgaagtgtttttacttcagagatcctgcatagcatttattggggccttttattctttcccaaagtgctttgcaaacattaagttttagccactagctgcctttgttgagtataagttatccagtgagaggatatagccaattaagtgtgttatggagtacacccattttgacacacttgtaataagagaatctttcatttgcctgccatgtgtactgtattatgagaatcttataatcggaatggagtgaaatgaaacattttgagtactgatggcatgttatcatacataaagtaggtcatttaggaaaaaacttctgtccaagctttgtatgaattaaattcataagtataccaaattaaatcttaatagatttaatgcaattttacagacacaataccttcatgaatttcaaaattcatataaaatttgatcttatgcaatacacctttttgaggaggcagtgtaacaacctatagtgccattgatccatgagaaaaagattttctggtactactccaaaagtgctttgactaagtatcttaactatttgaacagtctgcttatatgagacagtttttcatagtatcatttgtataatttgattagattattcagaaacaataggatgctaaactaattcattgtatcttttttttacaatggtggaagcaactttctgaaagttcagtcttatgctacatcctaagtcatagacaatgaccttgttttcattattctgatagattgtatacatatgtacacatacatatacacatatgcacagtcaaggtcatgatgttgatttgctttcagctgtttctgtgattataaagcattttttaagagacaaattttaacttttaatttttattttggcaaaactgtcaaatgagaaaaatgattttaaaaacttttttttcaattgacaagactttaagtcagggataacagtattaatgttctctgttctgtttccatgttaaatttaatttaacctggatagccacattaatgaattggtgctgtcaaaatatagtaatttttaaatttgttaataatgaaaacccttaagcatgcaggatgaggtatttgggttttttttttagatcgatcacatctacagaaaatggctaaaccaagttaacttttattatagacagtgaataaaacaccaaaaacccaaaaatgctttaaccacagtataaataatagattatacacatcatcttaataactatttttaagttatttaccatagcctctgtatagaccttaggaacagtgtttcagtgatctggcaccagtttattttgttctgctgaaattctgtatcacaaatgtgctacctggtttttgtccattagataattactctttataaggaaaggaaagagaagcagagttagttccagctctaatagggatcttcaaagttattttgtcttgatgtatgtaacagtaattctttacatcttttgatttttctcttcctttttattcactcttcccacgaatttaaatgtttaagttatattcatcactagcaaggatgataaacacttgtgcactgaaagctaacagggagaggttacacaatattttacagtttcttaaacataatttaatgcatcaccttccacttgctaacataccaagtcagttattttcaagggaagaaccttttaaattatggtcctccatttactacttccactgagagtatgctctcattcctcaggtgttttgagaaacatgactaataaccacacaattaagtagagtcattccaagtcctatggcctggaaattgtattccctataatatacaaattttcctgtaataaagtcaacttagaaactccaaggaggttacatgttttccaacatatcctaaaaactgtgatataagctaacatataatttgccttacgtcaaaagaatatgttttgttgcagctgattccagtttataatagatccctagtaaaaagctttgattcaacacaattgttcatcttcacatcccaaacagaatcactgtttcttgaatatatatttttgaagtttttttgtgcaatatattactaaatcagttattattttacttttccaaattcagagaaagaaaacagattacctgaattcatggaaaaggtggatcacctccctttttccaccttcaagcctttcctgtcctcatagccagcatgacttcttttaacttggattcctttgtatatagtaaagtttagtatatatatatttttttctttttgctactttctgaggcattatgtaaagggctcatactagatgttcagttaaatatactttagcacaaagtcaaactagagaatgtgttaaggagggaatgtatatgtcttggtagaccaggaggcctttgccagcaatttaagcaacagatgtgaatacttcacaaagctgtaaagaccattgtcttaaatactacaacaacttaacacccttttgtgaagatcacagcatttatctaagaaactgtgaggctttctggtttacatatatcttacaggtgtttttttgtatttttttttttttttagtttgaaatgtgtaagctttgatttaaaccaagtttacttcagtatgttaatgatgtagtaaaaatatttattgaaaggtgaattcgagtattttaatgttatacctgccattttttttcttaaagcatattctttgcatctaactgccagtgccattgtcaaaacttattttttaaatcgttgtacatttcttattaaactaagtgcttaattttaaagtattatgttgccatcatatagtgtataaaaatgtataattgccaattgattgtaactattatttatttttaaatgaaagtgtaagaatgctttctgattcaacaaatttgttatcaaactgtttccttatcctcttttctgatgtagcataaaaattgtcccggtttgagttataactgccagtagatgaccagtcacaagtgaaccacttctcagttgccaatctttgctcatattaaaaacaacttacaaatacttagtttttgtatctaatctctgattattaaaatgtttataaagtttatttttaccaaagagatgcaattcattatgagaaagtattgcataataaattttgttttataacttttaaaaaaaaaaaaaaaaa

SEQ ID NO: 13020 - DNA, 1997 bp, Homo sapiens
cctccctccctccccgtctttcttaccccctccctttctctctctctctctctctcgctcgttccctaacattaaagagaaaatgctgctatccgtgacttccaggcccgggatttcgacttttggctacaatagaaacaacaagaagccatatgtgtcattggctcagcagatggcaccacctagcccaagcaacagtacacctaacagcagtagtggaagcaatggaaatgaccagctgagcaaaaccaacctatacatccgaggattgcaaccaggcactactgaccaagatcttgtcaagctgtgtcagccatatggcaagattgtttccactaaggccatactggacaagaccacaaacaaatgtaaaggctatggctttgtagattttgacagcccttcagcagcacagaaagctgtaacagcactgaaggccagcggtgtacaggcacagatggcaaagcaacaggaacaggaccccacaaatttatacatctcaaacctcccactgtcaatggatgagcaggaactggaggggatgctgaagccctttggccaggttatctccacccgtatccttcgagataccagtgggaccagcagaggtgttggctttgcaaggatggagtccacagagaagtgtgaagccatcatcacccactttaatggaaaatatattaagacaccccctggagtaccagccccatccgatcccttgctttgcaaatttgctgatggcgggccaaagaaacgacagaaccaaggaaaatttgtgcaaaatggacgggcttggccaaggaatgcagacatgggcgtcatggccttgacctatgaccccaccacagctcttcagaatgggttttacccagccccctataacatcacccccaacaggatgcttgctcagtctgcactctccccatacctttcctctcctgtgtcttcgtatcagagagtgactcagacatctcctctacaagtacctaacccatcctggatgcaccaccattcatacctcatgcagccttcaggttcagttctgacaccagggatggaccatcccatttctctccagcctgcctccatgatgggaccccttacccagcaactgggccatctctccctcagcagcacaggcacgtatatgccgacggctgcagctatgcaaggagcttacatctcccagtacacccctgtgccttcttccagtgtttcagtcgaggagagcagcggccaacagaaccaagtggcagtggacgcaccctcagagcatggggtctattctttccagttcaacaagtaacagtgggattcccctccccatctttactgaatagaaatgaattcttggagatactcatgctcccagattccagagggttaaccaggaatggagaccatccgtcggccctgctaaggactaacacttagccatcgtttttcacaggcctgggcctggaaaaagaaatctctacgttcctgccctttactattgctgatggagcctgggggaaccatcactttttttgtgtgctacattcaaggagatcaaaaaaacttttcttcttttgcaaagaaagctttttgtttttaactgcaacgtacttttcccctaccttgaagagacatggtggtcgcagcttctcatctatatgaaaaagttttcgatgtattggaattatttgggaatgcttttaaaacaatttgtaattatttctttacaaaccaaaacagaacagaaaggtgtggtgctggaacatcgatgaaggagccctacttactgagcttagttatggacttttttgatgcatgtgtgtatgtgttttaaaaagtatgcaggctctaaaaatgttattttgtaaagctctcagctcatgcaccccatctcctcttcacccatattatgccttctttctcttgtccagattcttctttttctcttttctaaacagctgagcctgcctactttgcccttttacagcttttaattttat

SEQ ID NO: 13021 - DNA, 3668 bp, Homo sapiens
gctaacggcatcgagtctggacgccccgtgacccgcctgggccggagcgagggcggacggcgccttcttggccctttctgcctctagcagcggcgccggggtagccggagccagcgactgggaaacggctgcattccactgcgtctccttggcctggctgggcggtcggaggctggtctgccaagattactgtttggagaccgctgcagcccacgtccacctgatagactatttactacacatagtagattcagagccgctaaatgtccaagaccatggcgatgaaccttctggaggattggtgcaggggaatggaagtggacatccacaggtccttgttggtcacaggcatcccagaggactgtgggcaggcagaaattgaggagaccttgaatggggtcctctccccactgggcccgtaccgcgtgctcaacaagatttttgtgagggaagagaatgttaaagctgccctcattgaggttggtgaaggtgtgaatctgagcaccatcccccgtgaattcccaggaaggggtggtgtctggagagtggtctgtagagaccctacccaggatgccgagtttttaaaaaatctgaatgaattcctggatgccgaggggcgcacctgggaggatgtggtccgcctgctccagctcaaccaccccaccctgtcccagaaccagcatcagcccccagagaactgggcagaagctctgggggtgcttctgggagcagtggtgcagatcatcttctgcatggatgccgagatccgcagccgggaggaagccagggcccaggaggccgctgaattcgaggagatggcagcctgggctttagcagcagggaggaaggtgaagaaagaaccggggcttgcagcagaggtgggttctgccttaaaggcagagacccccaacaactggaatgccacggaagaccagcatgagcctaccaaacctttggttcgcagggctggagctaagtctcgctccaggagaaagaagcagaagaagaactccaggcaggaagcagtgccctggaaaaaacccaaaggcatcaattccaacagcacagctaacttggaggatcctgaggtgggtgatgctgaaagcatggcgatctcagagccgatcaagggcagcagaaagccctgtgtgaataaggaggagttggctttgaagaagcccatggcgaaatgtgcctggaagggtcccagagagccacctcaggatgcccgggcagaagccgagagcccaggaggcgcctctgagtcagaccaagatggtggccatgaaagcccaccaaagaagaaggccgtggcctgggtgtctgccaagaaccccgctcccatgaggaagaagaagaaggtgagcttgggccctgtctcctacgtcttggttgactcagaagatggcaggaagaagccggtgatgccaaagaaagggccaggctcaagaagggaggcatcagatcagaaggcccctcggggccagcagcctgccgaggcaacagcctcaacctctaggggtccgaaggccaagccagaaggctctcctcggcgtgccaccaatgaatccagaaaggtttgatctgggggaccacccatactgaggagttgaaagaacaaggaagaagtaccaagtcaaccaagttctctcttgtcactgaataagactttggactctcttagggcccctgttgatagagatctggccctgaggtaaacgataggtgaggtcttgggtgggagggagttggggaagggaggtggatctctatgcccttttctctaccaggcctgccgtttcaccgccttctctactcaccttctcttcggaggcaggagagttggtaagaggattgggaaaattctagaacattcattcccctttatgcatgagcagggtcactgttacactcatccatgttcagcttttctcccccacgccttgctccctcctcggaatggtcagcgacctctgcaggccctggcatttggaagagctgggtggccctgccatattcttcctcccgccttcctctcgtgtaaccagcggggtaagttaagccaggaccttcgctgcaaacctggttttattgctccttcagtctccagcttccatcctccagttatctagccaggaggtcccaagagttagttttagggaaaaagaatgtctgcctagacctcaaagtctttgagttttagagtctgttagtaaaaatggcactttgattcccatttgggatgagccctctcaggaatcctgtggggaaggggggtgattatagggaaggacgcaggcattcctaggtccccagctctaattccatccatctacccaactgtcaccatctttgcaccaaactgtcaccatctttgcagcagaaggtcactactcacattatagtaagaggggaaaaaaatcttttaaaacttggctgttggccgggcacggtggctcacgcctgtaatcccagcactttgggaggctgaggcaggtcgatcacgaggtcaggcgtttaagaccagcttgaccaacatggtgaaaccccatctctacaaaaattagctgggcgtggtggcgcgcgcctgtaatcccagctactcaggaggctgaggcagatgaattgcttgaatccaggaggcagaggttgcaatgagccaagattgtgccacggcactccagcctgggcagcagagtgagactctctctcaaaaaaacaaaacttggctgttaatgtctgccctctgaattcagacacactatattagaccagaccaccatgtgtcattgtgtgtgtgtgtgtgtgtgtttgcgtgcgcatgtgtagaggagagagcagggtccctgagataatggtttccaaactgtatcgtagccgtccacaaagatgtaatccaaatctatttttctcacgtgtttaaaaaactgaaaagtgactactcagatatgttggaagtcacatcgaagactatcagaatattaccttgtgttcataggttaacttgtttttgtacacgtcttagttatttcaggcatctctttgcttaaaattgagtttcttgtaaatgtgactgatgagcgaggttagaagtggaagaaattcctgtgcatgttctataatctgacaccctgaaagcaagtttcctttcgtcattcacatgctcttgttctgccgtgactgttcaggtgtatggtagtaagtaaatgtattaacatggtgaacagtagtaatattctatcatagagtattagcccttgcaagttttcagggcgtcttttccgacttcagtttttgtgataaagaatgtgaacagttgttagatgttctcagtgattcaactttaaaacaaatttctcgtgatgattcatttcaaaatcctgagtgagtctgactgaaaaatacgagagaaaagagagtggtttccgtttgcagctacacagctgtgtgcatcgacgttctcctggggtgtgtgccaagcgaaacccaggggtgaattggattcttgaagagaccaaagcctgtaactgtccagcttctaatttcaaaacgggtccattagggcttcgttgtgttaacaagttgacaccatgactagtaaatgtaaacgtgtatgtataaaataaagtttagcaaattaagtgtcctgttaaaaaaaaaaaaaaaaa

SEQ ID NO: 13022 - DNA, 6300 bp, Homo sapiens
cggccgcggtttccaggaggaagcaaggatgctttggacactgtgcgtggcgcctccgcggagcccccgcgctgccattcccggccgtcgctcggtcctccgctgacgggaagcaggaagtggcggcgggcgtcgcgagcggtgacatcacgggggcgacggcggcgaagggcgggggcggaggaggagcgagccgggccggggggcagctgcacagtctccgggatccccaggcctggaggggggtctgtgcgcggccggctggctctgccccgcgtccggtcccgagcgggcctccctcgggccagcccgatgtgaccgagcccagcggagcctgagcaaggagcgggtccgtcgcggagccggagggcgggaggaacatgacatcgcggagatggtttcacccaaatatcactggtgtggaggcagaaaacctactgttgacaagaggagttgatggcagttttttggcaaggcctagtaaaagtaaccctggagacttcacactttccgttagaagaaatggagctgtcacccacatcaagattcagaacactggtgattactatgacctgtatggaggggagaaatttgccactttggctgagttggtccagtattacatggaacatcacgggcaattaaaagagaagaatggagatgtcattgagcttaaatatcctctgaactgtgcagatcctacctctgaaaggtggtttcatggacatctctctgggaaagaagcagagaaattattaactgaaaaaggaaaacatggtagttttcttgtacgagagagccagagccaccctggagattttgttctttctgtgcgcactggtgatgacaaaggggagagcaatgacggcaagtctaaagtgacccatgttatgattcgctgtcaggaactgaaatacgacgttggtggaggagaacggtttgattctttgacagatcttgtggaacattataagaagaatcctatggtggaaacattgggtacagtactacaactcaagcagccccttaacacgactcgtataaatgctgctgaaatagaaagcagagttcgagaactaagcaaattagctgagaccacagataaagtcaaacaaggcttttgggaagaatttgagacactacaacaacaggagtgcaaacttctctacagccgaaaagagggtcaaaggcaagaaaacaaaaacaaaaatagatataaaaacatcctgccctttgatcataccagggttgtcctacacgatggtgatcccaatgagcctgtttcagattacatcaatgcaaatatcatcatgcctgaatttgaaaccaagtgcaacaattcaaagcccaaaaagagttacattgccacacaaggctgcctgcaaaacacggtgaatgacttttggcggatggtgttccaagaaaactcccgagtgattgtcatgacaacgaaagaagtggagagaggaaagagtaaatgtgtcaaatactggcctgatgagtatgctctaaaagaatatggcgtcatgcgtgttaggaacgtcaaagaaagcgccgctcatgactatacgctaagagaacttaaactttcaaaggttggacaagggaatacggagagaacggtctggcaataccactttcggacctggccggaccacggcgtgcccagcgaccctgggggcgtgctggacttcctggaggaggtgcaccataagcaggagagcatcatggatgcagggccggtcgtggtgcactgcagtgctggaattggccggacagggacgttcattgtgattgatattcttattgacatcatcagagagaaaggtgttgactgcgatattgacgttcccaaaaccatccagatggtgcggtctcagaggtcagggatggtccagacagaagcacagtaccgatttatctatatggcggtccagcattatattgaaacactacagcgcaggattgaagaagagcagaaaagcaagaggaaagggcacgaatatacaaatattaagtattctctagcggaccagacgagtggagatcagagccctctcccgccttgtactccaacgccaccctgtgcagaaatgagagaagacagtgctagagtctatgaaaacgtgggcctgatgcaacagcagaaaagtttcagatgagaaaacctgccaaaacttcagcacagaaatagatgtggactttcaccctctccctaaaaagatcaagaacagacgcaagaaagtttatgtgaagacagaatttggatttggaaggcttgcaatgtggttgactaccttttgataagcaaaatttgaaaccatttaaagaccactgtattttaactcaacaatacctgcttcccaattactcatttcctcagataagaagaaatcatctctacaatgtagacaacattatattttatagaatttgtttgaaattgaggaagcagttaaattgtgcgctgtattttgcagattatggggattcaaattctagtaataggcttttttatttttatttttatacccttaaccagtttaattttttttttcctcattgttggggatgatgagaagaaatgatttgggaaaattaagtaacaacgacctagaaaagtgagaacaatctcatttaccatcatgtatccagtagtggataattcattttgatggcttctatttttggccaaatgagaattaagccagtgcctgagactgtcagaagttgacctttgcactggcattaaagagtcatagaaaaagaatcatggatatttatgaattaaggtaagaggtgtggcttttttttttttcttttttccagccgttgaccaattatagttcggctgttgactgagaagtttgtggtgggaaaacgtttgccatattttctttgcatttgaataattgtcttgtacttagaaaaaaggcgtctatgaatgaccagtgtttttggtcgccaaatgttgctgacaaacttatcccaaaactttagtggcttaaaaaaacctgcccccaactgttagtcaatctgagctgggctcagctgggctgttcttctgccagcctgcaggtggccactcatgtggtcagcaggtcggcggagagactgggatggctgggcttctctctctgcctgcagtcctgagtctctccttcttcgtgtagtctctttcagtggcctggctggcagggtagctagacctctcacatgcagctcagagctcccaagagctcaaaagcagaaatggccaggccttctgaaaacttaagtccagaattgtcacagtgtcccttctacttccctctattgatgatgatgatgatgatgatgatgatgatgatgatgatgatgatggttttttctaatcagaagaaagctggggtatgccctctacttactaaacaagtcacaagcccagctcagattcaagaaaagggtgtgaagtagaggtgcagttaagtggggggccactagtctaacagacggtcacaaccagtgccatggaaaaccaaggatattagcaaaagcagaagttgctagtgaccttgggaagccgaagctgcttacagtagctgggacaagctgaaagtcagactaagaaataaagagagggccttcaagaagcttcctgaatgatttctgctagccctgagcctatttttggaaccagcacttggggaaactgatcttgtgaggatggatgtgtttagggacacagggcttttgagagcagcaccaccccactggggcatccccagacttgggaaacgtgactctttcttaatgccactgggttttagtcaggccacagtgagaaggaacagccctaacaggcctccagccaggttgaatgagctcatttttgttgtagccaaccagtaagatttgctaatgttctacattaagtgccttctccaaagacatccctctttgcctcatatgttgaatcatccagtgcggatatttcaatgaaaatatcattggttgacttttgtgatggtaataatgctatggcatctttgccatgaagttgtggcctccttggattcttctgactttggcttctgaaaggaaggcctagatccagccctggtggtagttcctttctgaggtctctcagtcccttgagactttggggtagtttggctgccattctcactgacaaaatgtatatcagcccccacctccaccccccaatattccttgaactttgaattgcttcagaacacaggtgtggcctgaaggtattcccttattagggaagtgtcactgctgtcttctagtcaaacttgtaaagaaaaagattccagttcagtatttgcagcaagaagcttgaatgctgttctttttatcgcattgttacatcgactcattctccattttgctttggttttgtcttgacttgacttgactttgggggtaaagtctttcaccagcacacaagagtttgattgtacaaatatatcttctgcattaacatctctgcctgttgcttaagatcagttgcttttatactcagaatggaaatacctgatcttggctagttttgttataagatattgatttcatttagatttccctccacgaggtcagcaaactatcatgttcttatgtaaacttaggccaaggccagagttatcatagtccctaggttgctacggcttatcatgtgcttggtaaaaggtgatcgcaggttctcagacgagtttactttacatgagatggaatcaggcagagaggctgggatgatggagaaagctcgaggtgaagttttaaaaaaaaagttgtggaaaggaaagttccaaagaggtggtttctgaggaagtcagagcgcccagggccagagcagtcagtaatgggtgaatgaggttgtttggaaagtcggtgtgacagacacatggatgccatctacttctaggttgctggtgggtattaaatatgcacaatattccatagctcactgaggattttaaaattataagcataggattttatattttggggtgaaagaattatctggcacattaggtattggagtttaaaaaaaaagccaaatttcacagtcttaataactttttttaaaaaaaactaaaaggcgcttcatgtccagtgtgtggcccttctgaaacttatggtcatctctcccactgaaaccaaggtcttttcaaatgtggctaaatggggatgaggagacacgggtaggactttcttggtgtgtgtgcattctttaaagagccaagttgcttcggggaaacagccaggaaaatggtcaagattatttttagaggttattttattggggattttaagaactaataacatcttgagttatttttaattcagggggatgtggaaaggtttgcaattgtcaagtgttttgttgtagcttagtatccataagggaaacttagactatagacataactacaaagccagtgcagcttttgttttctgtatgttgttgggggatcaactttcacacatagcaagcacatggcctccctgatgtcaggatgcctttgttaggatctgtatttgcccttaattttgttgaaatcttttttccttcttcctcttgaaaagttccaaaatatagtttattgtatctttcatcactaaaaatttgttcctttttcactatgggcagttcacacaaggcaaaaactattgaacagttggttttagtgtgttgtataactttgctgtatatcaaactaattttgacaagttttcatcctaagcctcaaatcatgtaattaataatttgcctgtttatttatgacctaattgtgattcttttattaataaaagctaatgggaaaaggatccctgattaagctgatgactagacctacaattaattttcctgcagtatatgaagtattgtaccagagtattaaaagatatgtaatattttattgataaatctatcctttaaaaggaatacgttttaggatgtcatcattttgatgtgaatcatgtaaatgttgataatatgctgtttattatacatttagtgtttcaagagattcacttaattgcctttttgcccacgtatattatgtagtctatttgcaactgttcttaaaaaaatgacattaaaagaatagtttatgtagagaaacattagtggatgttaattgtctccccacctatatttatgggtgttagcgcaactgctttgctagttgcaaagctgtattatcagagtaaaagtgtatttgtaaactgtatgggaactaaaaattaggaataaaaccattttcttatatgaaaaaaaaaaaaaaaaaa

SEQ ID NO: 13023 - DNA, 3331 bp, Homo sapiens
caggctggaagcaagacctgacctgagggagttcttcagccttaacctaaggtctcatactcggagcactatgacatcgccccagctagagtggactctgcagacccttctggagcagctgaacgaggatgaattaaagagtttcaaatcccttttatgggcttttcccctcgaagacgtgctacagaagaccccatggtctgaggtggaagaggctgatggcaagaaactggcagaaattctggtcaacacctcctcagaaaattggataaggaatgcgactgtgaacatcttggaagagatgaatctcacggaattgtgtaagatggcaaaggctgagatgatggaggacggacaggtgcaagaaatagataatcctgagctgggagatgcagaagaagactcggagttagcaaagccaggtgaaaaggaaggatggagaaattcaatggagaaacagtctttggtctggaagaacaccttttggcaaggagacattgacaatttccatgacgacgtcactctgagaaaccaacggttcattccattcttgaatcccagaacacccaggaagctaacaccttacacggtggtgctgcacggccccgcaggcgtggggaaaaccacgctggccaaaaagtgtatgctggactggacagactgcaacctcagcccgacgctcagatacgcgttctacctcagctgcaaggagctcagccgcatgggcccctgcagttttgcagagctgatctccaaagactggcctgaattgcaggatgacattccaagcatcctagcccaagcacagagaatcctgttcgtggtcgatggccttgatgagctgaaagtcccacctggggcgctgatccaggacatctgcggggactgggagaagaagaagccggtgcccgtcctcctggggagtttgctgaagaggaagatgttacccagggcagccttgctggtcaccacgcggcccagggcactgagggacctccagctcctggcgcagcagccgatctacgtaagggtggagggcttcctggaggaggacaggagggcctatttcctgagacactttggagacgaggaccaagccatgcgtgcctttgagctaatgaggagcaacgcggccctgttccagctgggctcggcccccgcggtgtgctggattgtgtgcacgactctgaagctgcagatggagaagggggaggacccggtccccacctgcctcacccgcacggggctgttcctgcgtttcctctgcagccggttcccgcagggcgcacagctgcggggcgcgctgcggacgctgagcctcctggccgcgcagggcctgtgggcgcagatgtccgtgttccaccgagaggacctggaaaggctcggggtgcaggagtccgacctccgtctgttcctggacggagacatcctccgccaggacagagtctccaaaggctgctactccttcatccacctcagcttccagcagtttctcactgccctgttctacgccctggagaaggaggagggggaggacagggacggccacgcctgggacatcggggacgtacagaagctgctttccggagaagaaagactcaagaaccccgacctgattcaagtaggacacttcttattcggcctcgctaacgagaagagagccaaggagttggaggccacttttggctgccggatgtcaccggacatcaaacaggaattgctgcaatgcaaagcacatcttcatgcaaataagcccttatccgtgaccgacctgaaggaggtcttgggctgcctgtatgagtctcaggaggaggagctggcgaaggtggtggtggccccgttcaaggaaatttctattcacctgacaaatacttctgaagtgatgcattgttccttcagcctgaagcattgtcaagacttgcagaaactctcactgcaggtagcaaagggggtgttcctggagaattacatggattttgaactggacattgaatttgaaagctcaaacagcaacctcaagtttctggaagtgaaacaaagcttcctgagtgactcttctgtgcggattctttgtgaccacgtaacccgtagcacctgtcatctgcagaaagtggagattaaaaacgtcacccctgacaccgcgtaccgggacttctgtcttgctttcattgggaagaagaccctcacgcacctgaccctggcagggcacatcgagtgggaacgcacgatgatgctgatgctgtgtgacctgctcagaaatcataaatgcaacctgcagtacctgaggttgggaggtcactgtgccaccccggagcagtgggctgaattcttctatgtcctcaaagccaaccagtccctgaagcacctgcgtctctcagccaatgtgctcctggatgagggtgccatgttgctgtacaagaccatgacacgcccaaaacacttcctgcagatgttgtcgttggaaaactgtcgtcttacagaagccagttgcaaggaccttgctgctgtcttggttgtcagcaagaagctgacacacctgtgcttggccaagaaccccattggggatacaggggtgaagtttctgtgtgagggcttgagttaccctgattgtaaactgcagaccttggtgttacagcaatgcagcataaccaagcttggctgtagatatctctcagaggcgctccaagaagcctgcagcctcacaaacctggacttgagtatcaaccagatagctcgtggattgtggattctctgtcaggcattagagaatccaaactgtaacctaaaacacctacgcctctggagctgctccctcatgcctttctattgtcagcatcttggatctgctctcctcagcaatcagaagcttgaaactctggacctgggccagaatcatttgtggaagagtggcataattaagctctttggggttctaagacaaagaactggatccttgaagatactcaggttgaagacctatgaaactaatttggaaatcaagaagctgttggaggaagtgaaagaaaagaatcccaagctgactattgattgcaatgcttccggggcaacggcacctccgtgctgtgactttttttgctgagcagcctgggatcgctctacgaattacacaggaagcgggattcgggtctctaagatgtcttatgaatgcaggtcagagggtcacatgttaacactagagtctgtcgagaggtaggatttgacactggttttctcactatttttgggagattctgcacgagtcacgcacccccttcacatgacgctatgtactttctcacagggataataaagttagagcactctcgttgca

SEQ ID NO: 13024 - DNA, 2222 bp, Homo sapiens
attcggcacgagggaggaagcgagaggtgctgccctccccccggagttggaagcgcgttacccgggtccaaaatgcccaagaagaagccgacgcccatccagctgaacccggcccccgacggctctgcagttaacgggaccagctctgcggagaccaacttggaggccttgcagaagaagctggaggagctagagcttgatgagcagcagcgaaagcgccttgaggcctttcttacccagaagcagaaggtgggagaactgaaggatgacgactttgagaagatcagtgagctgggggctggcaatggcggtgtggtgttcaaggtctcccacaagccttctggcctggtcatggccagaaagctaattcatctggagatcaaacccgcaatccggaaccagatcataagggagctgcaggttctgcatgagtgcaactctccgtacatcgtgggcttctatggtgcgttctacagcgatggcgagatcagtatctgcatggagcacatggatggaggttctctggatcaagtcctgaagaaagctggaagaattcctgaacaaattttaggaaaagttagcattgctgtaataaaaggcctgacatatctgagggagaagcacaagatcatgcacagagatgtcaagccctccaacatcctagtcaactcccgtggggagatcaagctctgtgactttggggtcagcgggcagctcatcgactccatggccaactccttcgtgggcacaaggtcctacatgtcgccagaaagactccaggggactcattactctgtgcagtcagacatctggagcatgggactgtctctggtagagatggcggttgggaggtatcccatccctcctccagatgccaaggagctggagctgatgtttgggtgccaggtggaaggagatgcggctgagaccccacccaggccaaggacccccgggaggccccttagctcatacggaatggacagccgacctcccatggcaatttttgagttgttggattacatagtcaacgagcctcctccaaaactgcccagtggagtgttcagtctggaatttcaagattttgtgaataaatgcttaataaaaaaccccgcagagagagcagatttgaagcaactcatggttcatgcttttatcaagagatctgatgctgaggaagtggattttgcaggttggctctgctccaccatcggccttaaccagcccagcacaccaacccatgctgctggcgtctaagtgtttgggaagcaacaaagagcgagtcccctgcccggtggtttgccatgtcgcttttgggcctccttcccatgcctgtctctgttcagatgtgcatttcacctgtgacaaaggatgaagaacacagcatgtgccaagattctactcttgtcatttttaatattactgtctttattcttattactattattgttcccctaagtggattggctttgtgcttggggctatttgtgtgtatgctgatgatcaaaacctgtgccaggctgaattacagtgaaatttttggtgaatgtgggtagtcattcttacaattgcactgctgttcctgctccatgactggctgtctgcctgtattttcggactttgacatttgacatttggtggactttatcttgctgggcatactttctctctaggagggagccttgtgagatccttcacaggcagtgcatgtgaagcatgctttgctgctatgaaaatgagcatcagagagtgtacatcatgttattttattattattatttgcttttcatgtagaactcagcagttgacatccaaatctagccagagcccttcactgccatgatagctggggcttcaccagtctgtctactgtggtgatctgtagacttctggttgtatttctatatttattttcagtatactgtgtgggatacttagtggtatgtctctttaagttttgattaatgtttcttaaatggaattatttgaatgtcacaaattgatcaagatattaaaatgtcggatttatctttccccatatccaagtaccaatgctgttgtaaacaacgtgtatagtgcctaaaattgtatgaaaatccttttaaccattttaacctagatgtttaacaaatctaatctcttattctaataaatatactatgaaataaaaaaaaaaggagaaagctaaaaaaaaaaaaaaaaaaaaaaaaaaaaaaaaaaaaaaa

SEQ ID NO: 13025 - DNA, 1000 bp, Homo sapiens
cccaccttcaccatgtctgacgaggaagttgaacaggtggaggagcagtacgaagaagaagaggaagcccaggaggaagaggaagttcaagaagacaccgcagaggaggacgcggaagaggagaaaccgagacccaaactcactgctcctaagatcccagaaggggagaaagtggacttcgatgacatccagaagaagcgtcagaacaaagacctaatggagctccaggccctcatcgacagccactttgaagcccggaagaaggaggaggaggagctggtcgctctcaaagagagaatcgagaagcgccgtgcagagagagcggagcagcagaggattcgtgcagagaaggagagggagcgccagaacagactggcggaggaaaaggccagaagggaggaggaggatgccaagaggagggcagaggacgacctgaagaagaagaaagcgctgtcctccatgggcgccaactacagcagctacctggccaaggctgaccagaagagaggcaagaagcagacagcccgagagatgaagaagaagattctggctgagagacgcaagccgctcaacatcgatcaccttggtgaagacaaactgagggacaaggccaaggagctctgggagaccctgcaccagctggagattgacaagttcgagtttggggagaagctgaaacgccagaaatatgacatcaccacgctcaggagccgcattgaccaggcccagaagcacagcaagaaggctgggaccccagccaagggcaaagtcggcgggcgctggaagtagagaggccagaaaggccctcgaggcagagaccctccgccctcttgcacaccagggccgctcgtgggactccacatcctccagcccccacaatcctgtcaggggtctccctgacgtcctgggggtggagaggccatcccggggcgtcccccgcgtctgtgtccttgctgccttcatcccctggggcctgtgaataaagctgcagaaccccctt

SEQ ID NO: 13026 - DNA, 7261 bp, Homo sapiens
ctgctccttgcaccccgctccctgcctggacacaggctcactcgctgccttcttctgggggaaaccagcttcttgccagccacagctgctgcctccgccactggccaccgcccctgtcctgggagtcccttggcccagacacccacctgacttagtggctcctctgcaggaaaggtggctgccccctgcgttcctccatccaaccatgagctggtgcccatcaccactgagaatgcaccaaagaatgtagtggacaagggagaaggagcctcccggggtggaaacacacggaaaagcctcgaggacaacggctccaccagggtcaccccgagtgtccagccccacctccagcccatcagaaacatgagtgtgagccggaccatggaggacagctgtgagctggacctggtgtacgtcacagagaggatcatcgctgtctccttccccagcacagccaatgaggagaacttccggagcaacctccgtgaggtggcgcagatgctcaagtccaaacatggaggcaactacctgctgttcaacctctctgagcggagacctgacatcacgaagctccatgccaaggtactggaatttggctggcccgacctccacaccccagccctggagaagatctgcagcatctgtaaggccatggacacatggctcaatgcagaccctcacaatgtcgttgttctacacaacaagggaaaccgaggcaggataggagttgtcatcgcggcttacatgcactacagcaacatttctgccagtgcggaccaggctctggaccggtttgcaatgaagcggttctatgaggataagattgtgcccattggccagccatcccaaagaaggtacgtgcattacttcagtggcctgctctccggctccatcaaaatgaacaacaagcccttgtttctgcaccacgtgatcatgcacggcatccccaactttgagtctaaaggaggatgtcggccatttctccgcatctaccaggccatgcaacctgtgtacacatctggcatctacaacatcccaggagacagccagactagcgtctgcatcaccatcgagccaggactgctcttgaagggagacatcttgctgaagtgctaccacaagaagttccgaagcccagcccgagacgtcatcttccgtgtgcagttccacacctgtgccatccatgacctgggggttgtctttgggaaggaggaccttgatgatgctttcaaagatgatcgatttccagagtatggcaaagtggagtttgtattttcttatgggccagagaaaattcaaggcatggagcacctggagaacgggccgagcgtgtctgtggactataacacctccgaccccctcatccgctgggactcctacgacaacttcagtgggcatcgagatgacggcatggaggaggtggtgggacacacgcaggggccactagatgggagcctgtatgctaaggtgaagaagaaagactccctgcacggcagcaccggggctgttaatgccacacgtcctacactgtcggccacccccaaccacgtggaacacacgctttctgtgagcagcgactcgggcaactccacagcctccaccaagaccgacaagaccgacgagcctgtccccggggcctccagtgccactgctgccttgagtccccaggagaagcgggagctggaccgcctgctgagtggctttggcttagagcgagagaagcaaggcgccatgtaccacacccagcacctcaggtcccgcccagcagggggctcggctgtgccctcctctggacgccacgttgtcccagcccaggttcatgtcaatggtggggcgttagcatctgagcgggagacagacatcctggacgatgaattgccaaaccaggatggtcacagtgcgggcagcatgggcacactctcttctctggacggggtcaccaacaccagtgaggggggctacccagaggccctgtccccactgaccaacggtctggacaagtcctaccccatggagcctatggtcaatggaggaggctacccctacgagtctgccagccgggcggggcctgcccatgctggccacacggcccccatgcggccctcctactctgcacaggagggtttagctggctaccagagggaggggccccacccagcctggccacagccagtgaccacctcccactatgcccatgaccccagcggtatgttccgctctcaatccttttcggaagctgaaccccagctgcccccagctccggtccgagggggaagcagccgggaggctgtgcaaaggggactgaattcgtggcagcagcagcagcagcagcagcagcagcctcgcccacctccacgccagcaggaaagagcccacttggagagtcttgtagccagcaggcccagccctcagccattggcagagacccccatccccagtctccctgagttcccgcgagcagcctcccagcaggagattgaacagtccatcgaaacactcaatatgctgatgctggacctggagccagcctccgctgctgccccactacacaagtcccagagtgtccccggggcctggccaggggcttctccactctcctcccagcccctctctggatcctcccgtcagtcccatccactgacccagtccagatctggctatatccccagtgggcattcgttgggaacccctgagccagccccacgggcctctctggagtctgtccctcctggcaggtcttactcaccttatgactatcagccatgtttggctgggcctaaccaggatttccattcaaagagcccagcctcttcctccttgcctgccttccttccgaccacccacagccctccagggcctcagcaacccccagcctctctccctggcctcactgctcagcctctgctctcaccaaaggaagcgacttcagacccctcccggactccagaggaggagccattgaatttagaagggctggtggcccacagggtagcaggggtacaggctcgggagaagcagcctgcagagcccccagcccctctgcggaggcgggcggccagtgatggacagtatgagaaccagtctccagaagccacatcccctcgtagccctggggttcgctcccctgtccagtgtgtctccccggagctggctcttaccatcgctctcaatcctggagggcggcccaaagagccccatttgcacagctacaaggaggccttcgaggagatggagggaacctccccgagcagcccaccacccagtggggtgcggtcccccccgggtctggccaagacacccctgtctgctctgggcctgaaacctcacaacccagcggacatcctgttgcaccccacaggagttaccagaagacggatccagccagaggaagatgaggggaaggtggtggtcaggctgtcagaagagccccggagctatgtggagtctgtggcacggacagcggtggctggaccccgagctcaggactctgagcccaagagctttagtgctccagccacccaggcctatggccatgagatacccctgaggaacgggaccctgggtggctcctttgtctcccccagccccctctccaccagcagccccatcctcagtgctgacagcacttcagtggggagtttcccgtcgggagagagcagtgaccagggtccccggacgcccacccagcctctgttggagtctggcttccgctcaggcagcctgggacagcccagcccgtctgcccagagaaactaccagagctcttctcctctcccgactgtgggcagtagctacagcagccccgactactcacttcagcatttcagctcctctccggaaagccaggctcgagctcagttcagtgtggctggcgtccacacggtgcctgggagccctcaggcgcgccacagaacagtgggcaccaacactccccctagtcctggcttcggctggcgggccatcaatcccagcatggctgcccccagcagtcccagtttgagccatcaccagatgatgggtccaccaggcactggcttccatggtagcactgtctccagcccccagagcagtgcagcgaccaccccggggagccccagcctgtgtcggcacccagcaggggtctaccaggtttctggcctccacaacaaagtggccaccaccccggggagtcccagcctgggccggcaccctggggctcaccaaggcaacctggcctccggtcttcatagcaatgcaatagccagccctggaagccccagcctgggccgtcacctcggagggtctggatctgtggttcccggcagcccctgcttggaccggcatgtggcctatggtggctattctaccccggaggatcggagacccacactgtcccggcagagcagtgcctctggctaccaggctccttccacgccctccttccctgtctcccctgcctactaccctggcctgagcagccctgccacctccccgtcaccagactccgcagccttccggcaagggagcccaacaccagccttgccagagaagcgaaggatgtcagtgggagaccgggcaggcagcctccccaactatgccaccatcaatgggaaggtgtcttcgcctgtcgccagcggcatgtccagtcccagtgggggcagcaccgtctccttctcccacactctgcccgacttctccaagtactccatgccagacaacagcccggagacgcgggctaaagtgaagtttgtccaggacacttctaagtattggtacaagcctgagatctccagggagcaggccatcgcgctcctcaaggaccaggagccgggggccttcatcatccgcgacagtcactccttccgaggcgcgtacgggctggccatgaaggtgtcttcgccacctccaaccatcatgcagcagaataaaaaaggagacatgacccatgagctggtcaggcattttctgatagagactggccccagaggagtcaagctcaagggctgccccaatgagccaaacttcggatcgctgtctgccctggtctaccagcactccatcatcccattggccctgccttgcaagctggtcattccaaaccgagaccccacagatgaatcgaaagatagctccggccctgccaactcaactgcagacctgctgaaacaaggggcagcctgcaatgtgctcttcgtcaactctgtggacatggagtcactcactgggccacaggccatctctaaagccacatctgagacgttggctgcagaccccacgccagctgccaccatcgttcacttcaaagtctctgcccagggaatcactctgactgacaaccagagaaagctctttttcagacgccactaccctctcaacactgtcaccttctgtgacctggatccacaggaaagaaagtggatgaaaacagagggtggtgcccctgctaagctcttcggcttcgtggcccggaagcagggcagcaccacggacaacgcctgccacctctttgctgagcttgaccccaaccagccggcctctgccatcgtcaacttcgtctccaaggtcatgctgaatgccggccaaaagagatgaaccctgccccttgcccagggccagtgccatggggaaggggcttgtggggaggggacccatgaatcctgaccactcttgaacccagaaggaggactttgggccaatttcggaggagagaagaaagtgcaacgtggggagagggaagtgaattgcagaggggagggggaaaagagagagagagagagagagagagagagagagaaagatggaggagaagaacttggattcccctgggtagatggaaactgcaaaaacccaaagcctccaaaactaaccaggtccacctaacaccccctccctcccctaagaagatggatgtcctcaaaagagaaggaacaaacctccttgggaatccacattttttgggggaatggaaaagctctgtctccctaactcaactgctttgcaaggggaaatcaagctgggagaatctttttctggccacctgtggggtaggttgtcaaaccaaacagagccaccgtgggacatcaagtggaagaacttgtttgcttgaaagtatctcagacccaaggcacctcaggtctctttgctgtgcctccactatattgtcgtgtgggtgtgtgtctgcacccacatcctcacacattgatctagatctgcctttatccactcgaattataaacagctcggcttgtccttgtcccatgtgtttgtagacacacatgcatactgtccaaagattagggttggtggtggcagtgcagcaggggagggacaaacaaccaagctatgggtgacagaggctctctcctggtgcctgcacctgcactctagtgaccctgggtgccgccagacccttctcttctacaaagaccccagcaggagtgggagggtctgcaatggcatcgccctgtcctgccttggccagaagcctggagctttggtttgaggaggtagagatatgtgtatccataggaagagatctgtcagaacaggcagctgttgagctcggggtgtcttccccaaggcatgtggctcagcagcaagaaaggcaagttgctcctgctggggccctggactctgccttagctcccacctctcagccttgttattgggtttcatgcccctggaccagccttatctcagacctgcttacctgcatgatgcctttttgggggctggggattgagtcttgctgctctgcccagccctgttctattctgcagggtccctgtgttggaattctccctggggaacctactttctgctcagtgaggctccggccagaaacctggagtccttatcctcccctctgtaagtgttttagggtctggcttttgcaggcaccctctgacctcagcagagctcctgggcctgctgcctgcacaccacatcgcctacctacaatgccaaagcctcactgtcaccctttctgccttggtttccctagctgagccacgctgcccatgcagcagagggcagaaggcttgcacttgggccaaagggcctaaggtccactggacagttgggaaaacacctgaccaccatttaaggactctaagccagaatggaaaattcaccaggactccattcttaagcctatgcgagtcccctagagagaggcattgtactgatatataaatattatataatatatacatgagacatactgacagaatctgtaagctaataaaatgtaagaaaaggttaaaaaaagaaaaaaaaaaaa

SEQ ID NO: 13027 - DNA, 3784 bp, Homo sapiens
agatgctgtttggcgactcgtcgccattcccggagcaggtcggcctcggcccaggggcgagtatccgttgctgtgtcggagacactagtccccgacaccgagacagccagccctctcccctgcctcgcggcgggagagcgtgtccggccggccggccggcggggctcgcgcaacctccctcgcctccccttcccccgcagcctccgccccgccaggcccggcccggactcccgagccccggcctcctcgtcctcggtcgccgctgccgccgggcttaacagccccgtccgccgcttctcttcctagtttgagaagccaaggaaggaaacagggaaaaatgtcgccatgaaggccgagaaccgctgccgccgccgacccccgccggccctgaacgccatgagcctgggtccccgccgcgcccgctccgctccgactgccgtcgccgccgaggcccccgttgatgccgctgagctcccccaacgccgccgccaccgcctccgacatggacaagaacagcggctccaacagctcctccgcctcttcgggcagcagcaaagggcaacagccgccccgctccgcctcggcggggccagccggcgagtctaaacccaagagcgatggaaagaactccagtggatccaagcgttataatcgcaaacgtgaactttcctaccccaaaaatgaaagttttaacaaccagtcccgtcgctccagttcacagaaaagcaagacttttaacaagatgcctcctcaaaggggcggcggcagcagcaaactctttagctcttcttttaatggtggaagacgagatgaggtagcagaggctcaacgggcagagtttagccctgcccagttctctggtcctaagaagatcaacctgaaccacttgttgaatttcacttttgaaccccgtggccagacgggtcactttgaaggcagtggacatggtagctggggaaagaggaacaagtggggacataagccttttaacaaggaactctttttacaggccaactgccaatttgtggtgtctgaagaccaagactacacagctcattttgctgatcctgatacattagttaactgggactttgtggaacaagtgcgcatttgtagccatgaagtgccatcttgcccaatatgcctctatccacctactgcagccaagataacccgttgtggacacatcttctgctgggcatgcatcctgcactatctttcactgagtgagaagacgtggagtaaatgtcccatctgttacagttctgtgcataagaaggatctcaagagtgttgttgccacagagtcacatcagtatgttgttggtgataccattacgatgcagctgatgaagagggagaaaggggtgttggtggctttgcccaaatccaaatggatgaatgtagaccatcccattcatctaggagatgaacagcacagccagtactccaagttgctgctggcctctaaggagcaggtgctgcaccgggtagttctggaggagaaagtagcactagagcagcagctggcagaggagaagcacactcccgagtcctgctttattgaggcagctatccaggagctcaagactcgggaagaggctctgtcgggattggccggaagcagaagggaggtcactggtgttgtggctgctctggaacaactggtgctgatggctcccttggcgaaggagtctgtttttcaacccaggaagggtgtgctggagtatctgtctgccttcgatgaagaaaccacggaagtttgttctctggacactccttctagacctcttgctctccctctggtagaagaggaggaagcagtgtctgaaccagagcctgaggggttgccagaggcctgtgatgacttggagttagcagatgacaatcttaaagaggggaccatttgcactgagtccagccagcaggaacccatcaccaagtcaggcttcacacgcctcagcagctctccttgttactacttttaccaagcggaagatggacagcatatgttcctgcaccctgtgaatgtgcgctgcctcgtgcgggagtacggcagcctggagaggagccccgagaagatctcagcaactgtggtggagattgctggctactccatgtctgaggatgttcgacagcgtcacagatatctctctcacttgccactcacctgtgagttcagcatctgtgaactggctttgcaacctcctgtggtctctaaggaaaccctagagatgttctcagatgacattgagaagaggaaacgtcagcgccaaaagaaggctcgggaggaacgccgccgagagcgcaggattgagatagaggagaacaagaaacagggcaagtacccagaagtccacattcccctcgagaatctacagcagtttcctgccttcaattcttatacctgctcctctgattctgctttgggtcccaccagcaccgagggccatggggccctctccatttctcctctcagcagaagtccaggttcccatgcagactttctgctgacccctctgtcacccactgccagtcagggcagtccctcattctgcgttgggagtctggaagaagactctcccttcccttcctttgcccagatgctgagggttggaaaagcaaaagcagatgtgtggcccaaaactgctccaaagaaagatgagaacagcttagttcctcctgcccctgtggacagcgacggggagagtgataattcagaccgtgttcctgtgcccagttttcaaaattccttcagccaagctattgaagcagccttcatgaaactggacacaccagctacttcagatcccctctctgaagagaaaggaggaaagaaaagaaaaaaacagaaacagaagctcctgttcagcacctcagtcgtccacaccaagtgacactactggcccaggctaccttctccatctggtttttgtttttgtttttttttcccccatgcttttgtttggctgctgtaatttttaagtatttgagtttgaacagattagctctggggggagggggtttccacaatgtgagggggaaccaagaaaattttaaatacagtgtattttccagcttcctgtctttacaccaaaataaagtattgacacaagagatctcttcctgccaaggtttttagttcattgccagtttagtctttttgacccatgtgtaattaatttttctcaacccaaagtaagattgagtcccctttgagatgcattagagcagtccaacccagaatggcacacactgctctgctgtagcatcatgtcagggcttcctggactcagtacacctctcagtttgtcttttaaaaaacagctgaatctttactacctatttagttctccttgttaaagaaacaggggtgggaataaaatggatttaggacacccagtttgaattgcagtttttttttttctgacacatggccaggctgtggtgccagcttaatggagtaggctgtccttggcacttgcatgtgtgaaaggagggttttgcctcttcttgagcatggcttgagttggtaaggaaagctgtaactcacgaagccctgagacctgctacccctaagatcgagcttgttttcagtgactggcttgagtcataggaggaggagtctggtacagctgcaggagagcagggccatctgaagcggtagcattgccaccatctccctctcatctagagcagttttcttatgccttggtttgagctgaatttgatgtgaattcttttgctgcttaataaagtgacctctaggtgcattagaatgcgaa

SEQ ID NO: 13028 - DNA, 5317 bp, Homo sapiens
ttgttgcagaaggagacggcgtcgacgtctgactggactcgcggcgacttacctttcagtcgtgcgctcctgatccggcgctcggaatttgtccccggcttcagggctgcggggcctggaaggaggcgtatcgaggcggctcgaaaacgatccaggggagccgaggcgctcctcttgtcatcccactcagcgccatgtcctggatgttcaagagggatccagtttggaagtacttgcagactgtccagtatggagttcatggaaattttccacgcctctcatatccaactttctttccacgttttgaattccaagatgttatccctccagatgactttctaactagtgatgaagaagtagattccgttttatttggaagtttgagaggtcatgtggttggactacgctattacacgggagtagttaataataatgaaatggttgcattacaacgagatcctaataacccttatgataagaatgcaattaaagtaaacaatgtgaatggaaatcaagttggccatttaaagaaagagcttgcaggtgctttggcctatatcatggacaacaaattggcacaaattgaaggggtagttccttttggtgcaaacaatgcttttaccatgcctctgcatatgactttttggggaaaagaagaaaatagaaaagcggtttcagatcagttgaagaaacatggatttaaattgggtcctgcaccaaaaactttaggattcaatttggaaagtggttggggctctggaagagctggaccaagctatagtatgccagtgcatgctgcagtacagatgacaactgaacagcttaaaacagaatttgacaaattgtttgaagatttaaaagaagatgataaaacccatgaaatggaaccagctgaggctattgaaacaccactgcttccacatcaaaaacaagctctagcttggatggtgtcacgggaaaatagcaaagaacttccaccattctgggaacagcgaaatgacttatactataacacaataacaaatttttctgagaaggaccgaccagaaaatgtccatggaggaattttagctgatgatatgggtttgggtaaaactcttacggccattgcagtaatccttaccaacttccatgatggcagacctcttcctattgaaagagttaaaaagaatctactgaagaaggaatataatgttaacgatgactctatgaaacttggaggaaacaataccagtgaaaaggcagatggactaagcaaagacgcatctagatgtagtgaacaacccagtatttcagatatcaaggagaagagtaagtttcgcatgtcagaattgtctagctcccgccccaaaagaagaaaaactgctgtccagtacatagaaagcagtgattcagaggaaattgaaacaagtgaattgccgcagaaaatgaaaggcaaactgaaaaatgtacagtctgaaactaaaggcagggcgaaagcaggatcttctaaggttatagaagatgtggcatttgcatgtgcattaacttcatctgttcctacaacaaaaaagaaaatgttgaaaaagggagcttgtgcagtggaggggtcaaagaaaactgatgttgaggagagaccaagaacaacactgatcatctgtccgctttctgtgttaagcaactggattgaccagtttggacaacatataaaatcagatgtacacttgaatttttatgtttattatggtcctgatcgtattagagaaccggccttactttcaaaacaggatattgttttgactacgtataatattttaactcatgactatggaactaaaggagatagtccattacatagcataaggtggctaagagtgatcctggatgaaggacatgccatacgaaatccaaatgctcagcagacaaaagctgtacttgacttagaatcagaaagaagatgggttttgacaggtactccaatccagaattctttaaaggacttgtggtctcttctttcctttttaaaacttaaaccatttattgatagagaatggtggcatagaacaatacagcgtcctgtcacaatgggagatgaaggaggacttaggcgtttacagtccctaattaaaaatattacacttagaagaacaaagacaagcaaaattaaaggaaaacctgttttggagttaccagaacgtaaagtatttattcagcacattacactttcagatgaagagagaaagatttatcagtctgtgaaaaatgaaggcagagccactattggaaggtattttaatgaagggactgtcctggcacattatgcagatgtcctgggtcttttgcttagactgcggcaaatttgttgccatacttaccttcttacaaatgcagtgtcttccaatggcccctcaggaaatgatacacctgaagaactgagaaagaagttaataaggaagatgaagttaattctgagctcaggttcagatgaggaatgtgcaatttgcctggattctttaacagttcctgtgataacacattgtgcacatgtattttgtaaaccctgtatttgccaagtcattcagaatgagcagccacatgctaaatgccctttatgcagaaatgatatacatgaagataatttattagaatgtcctccagaagaattagcacgtgacagtgagaaaaagtctgatatggaatggacatccagttcaaagattaatgcgctaatgcacgcattgactgacttaagaaagaagaatcccaacataaaaagtttggttgtttctcagtttacaacattcctgtctttaatagaaataccacttaaagcctctggatttgtgtttactcgtttggatggttccatggcccaaaagaaaagagttgaatcaattcagtgttttcaaaacactgaagcaggatctccaactataatgcttctgtccttaaaagcaggtggagttggtttgaatctgtctgcagcttctcgagtgtttttaatggatccagcctggaatcctgctgctgaagatcagtgctttgacagatgccatagacttggtcagaagcaagaagttatcatcacaaaattcattgtaaaggactctgttgaagaaaatatgctgaaaatacaaaacaaaaagagagaacttgcagcaggagcctttggaactaaaaaaccaaatgctgacgaaatgaaacaagccaaaattaatgaaatcagaacattaattgacttataatttgtgggattttagtaaggtcagtttgattggatacttaagttttagaaatgagaaaaatacagagttttagaaatgagatctagagaacacgtcttctaaaaggggcatattttatattagtgaagaggtattactgacacaatttcttctatatatgaacctatttttaatgaaacttcaaatagcaataagttccgttatatactgtggcctgaaataatttgagaaaaaaggttactttgttattcagcttttcataatatctatgctgagtattttcacgtatcttccaagtactcagctttttcgtatttcaaataaggtcagaccttttatacttttgaccaaatagttattttctatgttggacacttagttatttaccaaagcctccgatttgtgatgcagtgtttgtagtccttgtaaacaatatatacagactatacaagaattaattttattgggctttcaaaaaccatatttgcattccagaaccaaatcttaaatgagaccaaagtccaggttagcacaggtttttatttttcctacagctacattgagatatagttcacataaatgacttggagttttatgttcatgaaaaaattagggattatgttaagagtactattttttccattttagttaagtagtactacactcattgtttaaatgtaacttgctgtgtctgaggtataaatatagtctgtgggagtgagaggcaaaccagtcctacccaatttgatttgaatattttaaattatggaactgctaaatagatatttctataaatagataatttttatttatgtagctttttttggaagtaactttataaatttttataattcagaagactactatatgtgagaggcgtgatatctggatggaagttgggctggatgatctccaaagtcgtttcaactcttaaagacatcttaatcctgaatgtaaacaattgttatgtgtttagaatcagaatttgattttgaacttgagtaattcatccttacagctatctgtagaattagtcatcttttttcttttcttttttttttacttttttgttaataagcaaacttatttgctgcagaatttgggttgactcctgagcatatttaaaacaaagaagctagaaatttagcagtcagattaggtaggtggttttatttcaaagggaaactttaatccaaagaaagattaattactctaacaaacaagagaagcttcatgtttgatgatacagatttaagaatacctgagacttaagagtgttggaagtcatttgatagaaagatgagatcggagacaatgttgtgttatagggcacacattgaaggtatatgccaaatctctcaccagataagtccttttctccctgtgccgttttcttgctcaaagggaacagtgaattagccagctagaatcttcctggtccctttttgaggcagtagcaggtaaggaaagggctgattttcatcaaaaccaagacctttctgcagggatgatagtggaataataatgtgggattagcccgctagcattaggagcagttgggaagttacctggtagatcaagcattacacacaaaaaatcaagttgatcagagtatgggttctccatatagcaatacttcagtgagattaagtataaacagtttttggcaaaaaacaacacagtctactctttctgcttacaaagacaaagccttacaaactcactatgaaggtaaagggaggacagcttgcttctttgcccagacatttacaaagttgtttttaaaacacactcataagtaagtttggcaagttgtttaaaaaatgtctctttgttttgtacagttctgttagatgttgttatattttaaaagtttaatttaaaaaatttaatttgtccttcctaagaaggataaatatataaaaaagccactggaatgaaaacttcctatatgctatgctgttgtcttattattatatagaaaaataactttagaaaaatattgaagacattgtattaccacttgtgattcaaacaattttgtggttaaaactggattttaaatttaaaaatcaataaaaatttcaaatgtt

SEQ ID NO: 13029 - DNA, 4480 bp, Homo sapiens
ttgttgcagaaggagacggcgtcgacgtctgactggactcgcggcgacttacctttcagtcgtgcgctcctgatccggcgctcggaatttgtccccggcttcagggctgcggggcctggaaggaggcgtatcgaggcggctcgaaaacgatccaggggagccgaggcgctcctcttgtcatcccactcagcgccatgtcctggatgttcaagagggatccagtttggaagtacttgcagactgtccagtatggagttcatggaaattttccacgcctctcatatccaactttctttccacgttttgaattccaagatgttatccctccagatgactttctaactagtgatgaagaagtagattccgttttatttggaagtttgagaggtcatgtggttggactacgctattacacgggagtagttaataataatgaaatggttgcattacaacgagatcctaataacccttatgataagaatgcaattaaagtaaacaatgtgaatggaaatcaagttggccatttaaagaaagagcttgcaggtgctttggcctatatcatggacaacaaattggcacaaattgaaggggtagttccttttggtgcaaacaatgcttttaccatgcctctgcatatgactttttggggaaaagaagaaaatagaaaagcggtttcagatcagttgaagaaacatggatttaaattgggtcctgcaccaaaaactttaggattcaatttggaaagtggttggggctctggaagagctggaccaagctatagtatgccagtgcatgctgcagtacagatgacaactgaacagcttaaaacagaatttgacaaattgtttgaagatttaaaagaagatgataaaacccatgaaatggaaccagctgaggctattgaaacaccactgcttccacatcaaaaacaagctctagcttggatggtgtcacgggaaaatagcaaagaacttccaccattctgggaacagcgaaatgacttatactataacacaataacaaatttttctgagaaggaccgaccagaaaatgtccatggaggaattttagctgatgatatgggtttgggtaaaactcttacggccattgcagtaatccttaccaacttccatgatggcagacctcttcctattgaaagagttaaaaagaatctactgaagaaggaatataatgttaacgatgactctatgaaacttggaggaaacaataccagtgaaaaggcagatggactaagcaaagacgcatctagatgtagtgaacaacccagtatttcagatatcaaggagaagagtaagtttcgcatgtcagaattgtctagctcccgccccaaaagaagaaaaactgctgtccagtacatagaaagcagtgattcagaggaaattgaaacaagtgaattgccgcagaaaatgaaaggcaaactgaaaaatgtacagtctgaaactaaaggcagggcgaaagcaggatcttctaaggttatagaagatgtggcatttgcatgtgcattaacttcatctgttcctacaacaaaaaagaaaatgttgaaaaagggagcttgtgcagtggaggggtcaaagaaaactgatgttgaggagagaccaagaacaacactgatcatctgtccgctttctgtgttaagcaactggattgaccagtttggacaacatataaaatcagatgtacacttgaatttttatgtttattatggtcctgatcgtattagagaaccggccttactttcaaaacaggatattgttttgactacgtataatattttaactcatgactatggaactaaaggagatagtccattacatagcataaggtggctaagagtgatcctggatgaaggacatgccatacgaaatccaaatgctcagcagacaaaagctgtacttgacttagaatcagaaagaagatgggttttgacaggtactccaatccagaattctttaaaggacttgtggtctcttctttcctttttaaaacttaaaccatttattgatagagaatggtggcatagaacaatacagcgtcctgtcacaatgggagatgaaggaggacttaggcgtttacagtccctaattaaaaatattacacttagaagaacaaagacaagcaaaattaaaggaaaacctgttttggagttaccagaacgtaaagtatttattcagcacattacactttcagatgaagagagaaagatttatcagtctgtgaaaaatgaaggcagagccactattggaaggtattttaatgaagggactgtcctggcacattatgcagatgtcctgggtcttttgcttagactgcggcaaatttgttgccatacttaccttcttacaaatgcagtgtcttccaatggcccctcaggaaatgatacacctgaagaactgagaaagaagttaataaggaagatgaagttaattctgagctcaggttcagatgaggaatgtgcaatttgcctggattctttaacagttcctgtgataacacattgtgcacatgtattttgtaaaccctgtatttgccaagtcattcagaatgagcagccacatgctaaatgccctttatgcagaaatgatatacatgaagataatttattagaatgtcctccagaagaattagcacgtgacagtgagaaaaagtctgatatggaatggacatccagttcaaagattaatgcgctaatgcacgcattgactgacttaagaaagaagaatcccaacataaaaagtttggttgtttctcagtttacaacattcctgtctttaatagaaataccacttaaagcctctggatttgtgtttactcgtttggatggttccatggcccaaaagaaaagagttgaatcaattcagtgttttcaaaacactgaagcaggatctccaactataatgcttctgtccttaaaagcaggtggagttggtttgaatctgtctgcagcttctcgagtgtttttaatggatccagcctggaatcctgctgctgaagatcagtgctttgacagatgccatagacttggtcagaagcaagaagttatcatcacaaaattcattgtaaaggactctgttgaagaaaatatgctgaaaatacaaaacaaaaagagagaacttgcagcaggagcctttggaactaaaaaaccaaatgctgacgaaatgaaacaagccaaaattaatgaaatcagaacattaattgacttataatttgtgggattttagtaagaagactactatatgtgagaggcgtgatatctggatggaagttgggctggatgatctccaaagtcgtttcaactcttaaagacatcttaatcctgaatgtaaacaattgttatgtgtttagaatcagaatttgattttgaacttgagtaattcatccttacagctatctgtagaattagtcatcttttttcttttcttttttttttacttttttgttaataagcaaacttatttgctgcagaatttgggttgactcctgagcatatttaaaacaaagaagctagaaatttagcagtcagattaggtaggtggttttatttcaaagggaaactttaatccaaagaaagattaattactctaacaaacaagagaagcttcatgtttgatgatacagatttaagaatacctgagacttaagagtgttggaagtcatttgatagaaagatgagatcggagacaatgttgtgttatagggcacacattgaaggtatatgccaaatctctcaccagataagtccttttctccctgtgccgttttcttgctcaaagggaacagtgaattagccagctagaatcttcctggtccctttttgaggcagtagcaggtaaggaaagggctgattttcatcaaaaccaagacctttctgcagggatgatagtggaataataatgtgggattagcccgctagcattaggagcagttgggaagttacctggtagatcaagcattacacacaaaaaatcaagttgatcagagtatgggttctccatatagcaatacttcagtgagattaagtataaacagtttttggcaaaaaacaacacagtctactctttctgcttacaaagacaaagccttacaaactcactatgaaggtaaagggaggacagcttgcttctttgcccagacatttacaaagttgtttttaaaacacactcataagtaagtttggcaagttgtttaaaaaatgtctctttgttttgtacagttctgttagatgttgttatattttaaaagtttaatttaaaaaatttaatttgtccttcctaagaaggataaatatataaaaaagccactggaatgaaaacttcctatatgctatgctgttgtcttattattatatagaaaaataactttagaaaaatattgaagacattgtattaccacttgtgattcaaacaattttgtggttaaaactggattttaaatttaaaaatcaataaaaatttcaaatgtt

SEQ ID NO: 13030 - DNA, 2701 bp, Homo sapiens
gagcctgcgcaggaggccaataggctgccaatactccttggactccccgccagggccctgctgtcagtgcgcctgcgcgcgggtccggcgccgaggttcttgactgctgtgccggacgccaggtgtagccatgcagcgagccgattccgagcagccctccaagcgtccccgttgcgatgacagcccgagaaccccctcaaacaccccttccgcagaggcagactggtccccgggcctggaactccatcccgactacaagacatggggtccggagcaggtgtgctccttcctcaggcgcggtggctttgaagagccggtgctgctgaagaacatccgagaaaatgaaatcacaggcgcattactgccttgtcttgatgagtctcgttttgaaaatcttggagtaagttccttgggggagaggaagaagctgcttagttatatccagcgattggttcaaatccacgttgatacaatgaaggtaattaatgatcctatccatggccacattgagctccaccctctcctcgtccgaatcattgatacacctcaatttcaacgtcttcgatacatcaaacagctgggaggtggttactatgtttttccaggagcttcacacaatcgatttgagcatagtctaggggtggggtatctagcaggatgtctagttcacgcactgggtgaaaaacaaccagagctgcagataagtgaacgagatgttctctgtgttcagattgctggactttgtcatgatctcggtcatgggccattttctcacatgtttgatggacgatttattccacttgctcgcccggaggtgaaatggacgcatgaacaaggctcagttatgatgtttgagcaccttattaattctaatggaattaagcctgtcatggaacaatatggtctcatccctgaagaagatatttgctttataaaggaacaaattgtaggaccacttgaatcacctgtcgaagattcattgtggccatataaagggcgtcctgaaaacaaaagcttcctttatgagatagtatctaataaaagaaatggcattgatgtggacaaatgggattattttgccagggactgccatcatcttggaatccaaaataattttgattacaagcgctttattaagtttgcccgtgtctgtgaagtagacaatgagttgcgtatttgtgctagagataaggaagttggaaatctgtatgacatgttccacactcgcaactctttacaccgtagagcttatcaacacaaagttggcaacattattgatacaatgattacagatgctttcctcaaagcagatgactacatagagattacaggtgctggaggaaaaaagtatcgcatttctacagcaattgacgacatggaagcctatactaagctgacagataacatttttctggagattttatactctactgatcccaaattgaaagacgcacgagagattttaaaacaaattgaataccgtaatctattcaagtatgtgggtgagacgcagccaacaggacaaataaagattaaaagggaggactatgaatctcttccaaaagaggttgccagtgctaaacccaaagtattgctagacgtgaaactgaaggctgaagattttatagtggatgttatcaacatggattatggaatgcaagaaaagaatccaattgatcatgttagcttctattgtaagactgcccccaacagagcaatcaggattactaaaaaccaggtttcacaacttctgccagagaaatttgcagagcagctgattcgagtatattgtaagaaggtggacagaaagagtttgtatgccgcaagacaatattttgttcagtggtgtgcagacagaaatttcaccaagccgcaggatggcgatgttatagccccactcataacacctcaaaaaaaggaatggaacgacagtacttcagtccaaaatccaactcgcctccgagaagcatccaaaagcagagtccagctttttaaagatgacccaatgtgaatgtctgtagtcagttgtttacaaactccctctcctgcacaattcatttagaggcttcaatcatagaattctgcaaattaatgacaactcatgctttaattttgtattttgaatgtacacgcatgctgaagctaagtaacttttaatcaaagaaataagatggtattaggcaaatcttactatactatgaaaagcattaccttgcctatttttaatattattaaagcctttctccttcagtagtctattttcttagaataacaactcttttatctattctgaactctattttttttcttttttaagagacaaggttttgctctgttgcccagcttggactcgaactttcctgggctcaagcgaccctcctgcctcagccccccaagtagctgggactaaagtcatgtgccaccacacccagcttactctgaacttttatgacagatgattgttttttgtttttaatgtagaaatgagacaagggtacaaattggaactagaaattgacattgtcattgacaaacatggctaaaaacaaaacatcaaatcctgcccccgtgaagagttccctgtcacctcaagtttgaggatagtcctctaagagtgacctaagcataagtgaaagacacctcccctcacccttctagccccctacaaggtgccaggttggggtaaagagttggagatgat

SEQ ID NO: 13031 - DNA, 3256 bp, Homo sapiens
gctgacgtcgccggggcccggcgtcgcgtcagggctggccggcggcggaggcggcggcggcggcggcgatggcagcggaccctgagcgagcttgagggctcggacccagctccctcccgcgaaaccttgggcggatccggcgctgcggccccagctcgctccgctcctgctccctccccggccgctgcctgggcggaggcagaggcagaggcccgggctggccgccctgctcgtgccccagctcggccccggacggcccggctgctgtgcagagaggaggccgagtcgtgaaaagagaatactgaagaataggatctcaagatgagtaaaaagcccccaaatcgccctggaatcacttttgagattggtgctcgtttggaggcactggactacttacaaaaatggtatccatcacgaattgaaaaaattgactatgaggagggcaagatgttggtccattttgagcgctggagtcatcgttatgatgagtggatttactgggatagcaatagattgcgaccccttgagagaccagcactaagaaaagaagggctaaaagatgaggaagatttctttgattttaaagctggagaagaagttctggctcgttggacagactgtcgctattaccctgccaagattgaagcaattaacaaagaaggaacatttacagttcagttttatgatggagtaattcgttgtttaaaaagaatgcacattaaagccatgcccgaggatgctaaggggcaggattggatagctttagtcaaagcagctgctgcagctgcagccaagaacaaaacagggagtaaacctcgaaccagcgctaacagcaataaagataaggataaagatgagagaaagtggtttaaagtaccttcaaagaaggaggaaacttcaacttgtatagccacaccagacgtagagaagaaggaagatctgcctacatctagtgaaacatttggacttcatgtagagaacgttccaaagatggtctttccacagccagagagcacattatcaaacaagaggaaaaataatcaaggcaactcgtttcaggcaaagagagctcgacttaacaagattactggtttgttggcatccaaagctgttggggttgatggtgctgaaaaaaaggaagactacaatgaaacagctccaatgctggagcaggtatgaaatggtagcatttgatttttttcaaggttcccactggaatgatcacggagctctagtatctacgtaattgaaattccccttttgatcagatatgggaataggaagctaattaattgatgatatatttttaactctgccttctccaaggtatacagataactacagacttcattagtgtttgatttcatagactggcattaaagcctttgtctccaaaatttgaaggcctggagacaggcatcccagggtataagcttccagctggatcacctttaactagcttacaaaaagacccttacacaaatactttccatttgtgagttaaaacagggttttttgacatcgaataaagcttcttttgtaagaagtttcttttatattgtaacaattggtgttgttagactgactatgtgttttatgaattgatcaatgagccatacatttttgctaggatgtatattttaataactacaaaaaaagagagtttaaaaaactattaagggtctgtctttaaaccacctaatagaggaatttaaaagtgaaggttgcagttgctagattttgccttggctaccttcagattcccacaatacttgtacataatgaactgtgcatgcttttacattctctaagggcttaacttcttaggcactgtaagactataagaacgcagtaatagccataactggatttccttggttctcctgttttaaaatctgagccttaatgtagttttaatatatcctttttgtattacttttctttattagtagcctaataaagaagactttgagtatcttttgctctcctctagatgcgttttaaaaactattccaaatttaattgatattgtattgagtttttcagggttattttaggcctgatttgataacaatgcgttgttttggtgcctccattaatgttgtattaaatcaatgggtcttttaaattgattaatatgtcattgaatcataccttctgattttctgtgatcatccaacggttaagtctttgccgttattgtcaatatatcaaccaaattttaaataactttttttactgtgtattactatattcaacgtcccagatataacaatattttgtattttcaccactgtttatggtattctcagaatgcgataaatcagggacttgggtaataaaatgtttctggaaaattcattacaatgtcaatctttgattatgcacaatcctgctgaggtgaatgtgattgtgaaaagtacttattaaatgtggaagttagtgtagagggcagtacccgtcttagagagaagtacagaaaaccacgttttgaaattgaatttaaaaaagaaaggaaaattgtgtaactcggctgtttctattttcataattaaaaacttttgagagtccttgccagttttgtaacaaagagaccaacaatcattaatgaaaaccttgtaaattattttagattttcaggaacaccatgccattccctcattttctacttgtcattcaggttgatttcaatgtgaaaatgttttgtgaacaaacacttatttttatcctatgtgttagcctcgcttcatagttaaaaagccgagttataaagctcttaattacatctcaattggtatcagcaatagacctaaaggagaggtattgattgttactaacctctgtttcctaatgagttaaagtaatgtcactcatgacatagattgataacaggcctgtagtcaaaacttactgtgctaatggacttatttatattttttaaaaattcaaactgtggtcttgaaccccaattctcagcttattaattatagattatttaattgtattagggatatgtcatgttatatttacttttggataaaacttgcattagatgcataataactcagtaagttttaaaaacaatgttaatttttccttgtttagaagttaagcaccttatcaagatattaagttttaaaatcttgttttataactttgtaacttgagagtaatggatgctgtagtgatgtctttcacatatgtgaagatgaacaataaaattgtttatttacaagtaaaaaaaaaaaaaaaaaaa

SEQ ID NO: 13032 - DNA, 3044 bp, Homo sapiens
caggtatctaacctatctttgtatttttggaatttaatatagttcctgacataatcattgttcaatgggtctaatttttttttcctttaaaggcatttggatacctttgtgatagaaaaggcccttttcttcatccattgatggtttgatagtgggctgggaaggaaagctgtgttcctccacattaggcagcaaatacttgattgatttgatatttagcttagtcaaattgaagatctcaaacagacaaatcatggcttggaagaatgtgttaggaaactcttggatagtaaggaggtggtaagcagtcaagtagatgatttaaccagccacaatgagcatctttgtaaagaattgattaaaattgaccaactagcagagcaactcgaaaaagagaaaaattttgtggtggattccgccaacaaggaacttgaagaagccaagattgatctcatttgccagcaaaataatattatagtattggaagatacaataaaaaggcttaaatctataattttagatactgaaaaagcacaaaataaatctccttctagacttgattcctttgtcaagactttggaagcagacaaagatcactataagagtgaagctcaacatttgagaaagatgatgcgaagtaggtctaaaagtccaagacgcccatcaccaactgcccggggtgcaaactgtgatgtagaacttttgaagacaacaacaagagatcgtgaagaacttaaatgcatgctggaaaaatatgagcgccatttggcagaaattcagggtaatgtcaaggttcttaaatctgagagagacaagatcttccttctttatgaacaggcacaggaagaaattacccgacttcgacgagaaatgatgaaaagctgtaagagtcctaaatcaacaacggcacatgctattctccggcgagtggagactgaaagagatgtagcctttactgatttacgaagaatgaccacagaacgagatagtctaagggagaggctaaagattgctcaagagacagcatttaatgagaaggctcacctggaacaaaggatagaggagctggagtgtacagttcataatcttgatgatgaacgtatggagcaaatgtcaaatatgactttgatgaaggaaaccataagcactgtggaaaaagaaatgaaatcactagcaagaaaggcaatggataccgaaagtgaacttggcagacaaaaagcagagaataattctttgagacttttgtatgaaaacacagaaaaagatctttctgatactcagcgacaccttgctaagaaaaaatatgagctacagcttactcaggagaaaattatgtgcttggatgaaaaaattgataactttacaaggcaaaatattgcacagcgagaagaaatcagcattcttggtggaaccctcaatgatctggctaaagaaaaggaatgcctgcaagcatgtttggataaaaaatctgagaatattgcatcccttggagagagtttggcaatgaaagaaaagaccatttcaggcatgaagaatatcattgctgagatggaacaggcatcaagacagtgtactgaggccctaattgtgtgtgaacaagacgtttccagaatgcgtcggcaattggatgagacaaatgatgagctggcccagatcgccagggaaagagatatcttggctcatgacaatgacaatctccaggaacagtttgctaaagctaaacaagaaaaccaggcactgtccaaaaaattgaatgacactcataatgaacttaatgacataaaacagaaggttcaagatactaatttggaggttaacaagctgaagaatatattaaagtctgaagaatctgagaaccggcaaatgatggaacaacttcgaaaagccaatgaagatgctgaaaactgggaaaataaagcccgtcaatcagaggcagataacaataccctcaaactggaacttatcactgctgaggcagagggtaacagattaaaagaaaaagtagattccctcaacagagaggttgagcaacacttaaatgcagaaaggtcttacaagtcccagatttctaccttacataaatctgttgtaaaaatggaagaggagcttcagaaggttcagtttgaaaaagtgtccgctcttgcagatttgtcttctactagggaactctgtattaaacttgactcaagcaaagaacttcttaatcgacagctggttgctaaagatcaagaaatagaaatgagggagaatgagttagattctgctcattctgaaattgaactcctgaggagtcagatggcaaatgagagaatctccatgcagaatctagaagctttgctggtggccaatcgagacaaagaatatcagtctcagatagcacttcaagaaaaagaatctgaaattcagcttcttaaagaacacctttgtttggcagaaaataaaatggccatccagagtagagatgtggcccagttcagaaatgttgtcacacaattggaagctgatttagacattaccaaaagacaactaggaacagagcgctttgaaagggagagggccgtacaagaacttcgccgccaaaattattcaagtaatgcttatcatatgagttctacaatgaagccaaatacaaaatgtcattcaccagaacgtgctcaccatcgatctcctgaccgaggcctagatcgatcattagaagagaatctttgctacagagatttctgacacctgaaatgattcttcacatccctgagaaaggtcaaagttacaaactgattttttttttttttgctacatgagtgcatttatcttttaaatgcttggcaatgttaaatgtatttattaactttgtgtctctgaatctctgttctaatgtgccatgttgcagtgatctgagatgacttataaaaacaaaaatgtatatggctctttctatccatgcagtgatagtgagtgtaaaatctgcttacttcactattgaacactattctgttcactatctggagtaaataaagaagcttattaaaacagggaaaaaaaaaaaa

SEQ ID NO: 13033 - DNA, 17400 bp, Homo sapiens
cgcctttcctgcgggcgtagttgctggctgctcgggcactgggacctcggcggcttggggacgctggccgcgaagtagggagcgcaggtggccgctcggggtgagggccctgggtcatggagcacttcttgctggaggtggcagccgcgccgctgcggttaatcgcagccaagaacgagaagagccgcagtgagttgggcaggttcttggccaagcaggtgtggacacctcaagatcgccagtgtgtcctgagtaccttagcacagttgcttttggataaggactgtactgtgctggttggtcgccagcttcgccctctccttttggatttgctggaaaggaatgccgaagccattaaagctggaggccaaatcaaccatgatctgcatgaacggctatgtgtgtcgatgagcaaactcattggtaaccatcctgatgtcctcccgtttgccctgagatatttcaaggacacatccccagtctttcaaagacttttcctagagagttcagatgctaatccagtacgctatggacgtaggaggatgaagctccgggacctaatggaagcagccttcaagtttctgcagcaggagcagtctgtgttccgggagctctgggactggagtgtgtgtgtccctctcctcagaagccatgacaccttggttcgctggtatacagccaattgtcttgctttggttacctgtatgaatgaagagcacaagttatcatttcttaagaagatatttaatagtgatgaattgatccatttcaggttgaggttattagaagaggcccagttgcaggacttggagaaggccttggttttggccaatccagaagtctccctttggcgtaagcagaaggagctgcagtacttacagggacatcttgtttcgtctgacctctcccctagggtgacagctgtttgtggtgtggtgctgcctgggcagctgccagcccctggagagctgggtggtaataggagttcttcacgtgaacaggagctggcccttaggtcttatgtgctggttgagtctgtctgcaaaagtcttcagaccctggctatggcggttgcttctcagaatgctgtgttgttggaaggaccaataggatgtggcaaaacttccttagttgaatatttagctgcagtgacaggtagaacaaagcctcctcagcttctcaaagtccagcttggagatcagactgacagtaagatgcttttggggatgtatcgctgcacagatgttcctggagagtttgtgtggcagcctggcaccctgacacaggcagccacaatgggccactggatccttctggaggatattgactatgcccccttagacgtggtttctgtgctgatccctctcttggagaatggagagctcttgattcctggccgaggtgactgtctgaaagtggcacctggatttcagttttttgcaaccaggagactcttgagctgtggaggaaattggtatcgaccgctaaacagtcatgctactttgctagacaaatattggaccaaaattcacctggataacctggataagagagaactgaatgaggttcttcagagcagatatcctagcctattggcagtggttgatcacctgcttgacatttatatccaacttactggagagaaacatcactcttggagtgatagttctgttggatgtgaacaggcacctgaagaagtttcagaagccagaagagaaaacaaaagaccaacccttgagggaagagaattatctctaagggatctgctgaattggtgtaataggattgcccatagctttgacagttcatctttatcagcatcattaaatatttttcaagaggctctagactgtttcacagcaatgctttctgagcatacaagcaaactgaaaatggcagaagttattggaagcaaattgaacatttctagaaaaaaggctgaattcttttgtcaactttataaaccagaaattgtgatcaatgagctagatttgcaagtgggtcgagtgcggcttctacggaaacaaagtgaggctgttcacctacagagggagaagttcactttcgctgctacacggccgtcctctgttctcatcgagcagcttgcagtgtgtgtcagcaaaggggagcctgtgttgctggtgggagagaccgggactggcaaaacctctaccatccaatacttggctcacattacaggccaccgtttgagggttgtcaatatgaatcaacaaagtgatactgcagacttgcttggaggttataaaccggtggaccataagcttatttggctacccttacgggaggcatttgaggaactctttgctcagacattttccaagaaacaaaactttacgttcttggggcacattcagacctgttacagacagaaacggtggcatgatctcctgagactaatgcagcatgtacacaagtctgctgttaacaaggatggaaaagacagtgaaactgggttactcataaaagagaaatgggaagcatttggtcttagactcaaccatgcccaacaacagatgaaaatgactgaaaataccttattgttcgcatttgtagagggtacattagctcaggctgtaaagaaaggagagtggatcttgttggatgagattaacttggctgctccagaaatactagaatgtctgagtggtttgcttgaaggatcttctggatccctggtgttgctggatcgaggagacacagagccactggttcggcatcctgacttccgtttatttgcctgtatgaatccagcaactgatgtaggcaaaagaaatctcccaccaggaataagaaacaggttcacagaactttatgtagaagaattagaaagcaaagaagacttacaggttcttattgtagattatctgaaaggattgagtgtgaacaagaatacagtgcaaggaatcataaacttctacacagctttgcggaaagagtctgggaccaaactggtggatggcactggccatagacctcactacagccttcggactctgtgccgggccctgcgatttgcagcctccaatccatgtggcaacattcagcgctcactctatgagggtttttgtttgggtttcttaacacagcttgacagggcatcacacccaatagttcagaagctcatctgtcaacacattgtccctggcaatgtcaagagtctgctgaagcagcctattccagagccaaaaggaggtcggcttatccaggttgaaggctactggattgcggtgggagacaaggagcctacaatagatgagacgtacattctgacatcttctgtgaagctgaacctgagagatatagtccgagttgtctctgcaggaacctatccagtgctgattcagggagagacatcagttggtaaaacaagcctgatccagtggctggctgcagctactggcaaccactgtgtgcgtattaataatcacgaacacacggatattcaggagtacattggttgttacacgtctgactcctcagggaagcttgtctttaaggaaggtgttcttattgatgccatgagaaaaggctattggattattttagatgaattaaatttggcccctactgatgtgttagaggcgctgaataggctgttggatgataaccgtgaattgctagtaacagaaacacaggaagttgttaaagcacaccctcggtttatgctttttgccacccaaaatcccccaggactttatggaggcagaaaggtcctttctagagccttcaggaatcggtttgtggaattgcactttgatgagttacctagctccgagttggaaacaatcttgcacaagcggtgtagtttgccaccctcctattgcagcaagttggttaaagtcatgctggatcttcagtcctatcgcagaagttcttcagtgtttgctggaaagcagggcttcatcacccttcgtgatctgttccgatgggctgaaagatacagattggctgagccgaccgagaaggagtatgactggctacagcatttagccaatgatggttatatgcttctggcaggtcgagtcaggaagcaggaggaaattgatgtgattcaagaagtccttgagaaacatttcaagaaaaaattgtgtcctcaatctcttttctccaaagaaaatgttctaaaattgctgggtaaattgtctactcagatatccacattggagtgtaactttggccatatcgtgtggactgagggcatgcggagactcgcgatgctagtgggaagggcattggaatttggtgaacctgtgctgctggttggagacactgggtgtgggaaaactactatctgtcaggtatttgcagccttggcaaatcagaaattatactctgtcagctgccacttacacatggagacatcagacttcctgggtggcctgcggccagtgagacaaaagccaaacgacaaggaagaaattgacacatcaagactctttgagtggcatgatgggcctctggttcaggccatgaaggaggacggctttttcctcttggatgagatctcattggccgatgactctgtcttggaaagactcaacagtgtccttgaagtagaaaagtctctggtattagctgaaaaaggcagtccagaggacaaggatagtgaaatagagctgttgactgctgggaaaaaatttcgtattctagcaaccatgaaccctgggggtgactttggaaaaaaggagctgtctcctgccttaagaaaccggtttacagaaatatggtgccctcaaagcacaagccgtgaagatttaattcagatcatcagtcataatcttcgtccaggattgtgtctgggcagaatagatcctaaagggtctgacatacctgaagtgatgctggatttcattgactggctgacccaccaagagtttggcagaaagtgtgtggtcagtatcagagatatcctgtcctgggttaacttcatgaacaaaatgggggaggaagctgctttgaaaaggccagagatcatctccactgtgacatcttttgtccatgctgcatgcctggtgtacatagatggaataggttcaggggtaacttcctctgggtttggtacagcccttttggcacgaaaagaatgtctgaaatttctaatcaagaggcttgccaagatagtacgacttacagaatatcagaaaaatgagttgaagatttatgacagaatgaaggccaaagaattcactggaatagataacctttggggaattcatccattttttataccaaggggacctgtcctacacaggaataatattgcagactatgcactcagtgcagggaccactgctatgaatgcacagaggctcttaagagctaccaaactgaagaagcccattctcctggagggttcccctggtgttggcaagacaagtttggtgggagcattagcaaaggcttcaggaaatacccttgttagaatcaacttatcagagcaaacggacatcacagacctgtttggagcagatctacctgttgaaggtggcaagggaggagagtttgcctggcgtgatggccccttactggcagctttgaaggcaggccattgggtggtgttggatgagcttaacctggcttctcagtctgtattggaaggactcaatgcttgttttgaccaccgaggagaaatctatgtgcctgagttaggaatgagctttcaagtgcagcatgaaaagacgaagatttttgggtgtcagaatccctttagacaaggaggtgggaggaaaggcttgcccaggtctttccttaacagattcactcaggtcttcgttgatccccttacagtaattgacatggagttcattgccagtactttgtttccagccattgagaaaaatattgttaagaaaatggttgctttcaataaccaaattgatcatgaagtgactgttgagaagaaatgggggcaaaaaggaggaccctgggaattcaacctccgggaccttttccgctggtgtcagttgatgctggttgaccagtcccctgggtgttatgatcctggtcagcatgtgtttttggtctatggtgaaagaatgagaaccgaagaggacaaaaaaaaggtcattgctgtattcaaggatgtgtttggttcaaattccaacccatacatgggaaccagactatttcgtatcactccctatgatgttcagttgggctactcagtcctttcccgtgggagctgtgttcctcacccgtcccgccatcccctgttgctcctgcaccagtcattccaacccctggagtcaatcatgaagtgtgtgcagatgagctggatggtcatcctggtcgggccagcctctgtgggcaagaccagcctggtccagcttctggcacaccttactggccacacattaaagatcatggctatgaacagtgcaatggatactactgagctgctgggtggatttgagcaggttgatcttatacgaccttggaggaggctgctagagaaggtggagggaactgtaagggcactgttaagggatagcctccttatcagtgctgatgatgcagaagtagtgctgcgagcctggagtcattttcttctgacatataagcctaagtgtcttggagaaggtggtaaagctatcacgatggagattgtcaacaaactagaagcagtgttattgcttatgcagcgactcaacaataaaatcaactcatactgcaaggcagagtttgccaaacttgttgaagagttccgaagctttggtgtgaagcttacgcagttggccagtggccatagccatggcacatttgaatgggttgacagcatgttggttcaggccctgaagtctggagactggcttctgatggacaatgttaacttctgcaacccatcagtgttggatcgtttgaatgctttgcttgaacccggaggtgtcctcactattagtgagagaggaatgatagatggatccactcccacgataacaccaaatcccaatttcagacttttcctctcgatggatcctgttcatggagatatatcccgagctatgaggaatcgtggacttgaaatctacatttcaggggaaggggatgcaagcaccccagacaacctggatttgaaagttctgctgcacagccttggattggtggggaacagtgtatgtgacatcctcttggctttacacacagagacccggagcactgttgtaggttctccaacatcttctgtatcaactctaatccagacagccatactaattgtccagtacctgcagcgagggctgagtttagacagagccttttctgaagcatgctgggaagtatatgtctgttcccagcattcaccagcaaaccggaagcttgtacaggctttactggagaaacatgtttcttctttgcgagcacatgaaacctggggagactccattcttggcatgggactgtggccagattctgtgccctcagctctctttgctactgaagattcacacctgtctacagtccgaagagatggacagatcttagtatattgtctcaacaggatgagcatgaaaaccagcagctggacaaggagtcagccttttaccttgcaagacttagagaaaattatgcagtcccccagccctgagaacctgaaattcaatgcagtcgaagtgaatacttactggatcgatgaaccagatgttttggtcatggctgttaaattgctcatagaaagagcaaccaatcaggattggatgctcagagttaaatggctttatcatttagccaagaatataccgcaggggcttgagtccatacaaattcatttggaagccagtgctgcatctctcaggaatttttactcacattccctctcaggtgcagtcagtaatgttttcaaaatattacaaccaaatacaacagatgaatttgtgatccctctggatccccgatggaatatgcaggctctggacatgattagaaatttgatggactttgacccacaaacagaccagcctgaccagctctttgcccttttagaatcagctgcaaacaagacaatcatatatcttgaccgggaaaaacgggtttttactgaagcaaatttggtttctgttggtagcaaaaagctaagagagagtgttttgagaatgtcctttgaattccatcaagatccagaaagctatcacactctgccccatgaaattgtggtcaatcttgctgctttttttgaactttgtgatgcactagtcctgctctgggtacagtcctcccagggaatggtgtctgatgccagtgccaatgagatcttaggttctctgcggtggcgggaccggttctggactgtggccgacacagtaaaagtagatgccccaggtctggcccttcttgccctccattggcactgggttttaaaacatctggtccaccagatcccccgacttctgatgaattatgaagacaaatattacaaagaagttcagactgtctcagaacatattcagaattgtctggggagccagactggtggcttcgctggtataaagaagttgcagaagttcctgggacgaccgtttccttttaaggacaagctggtggtggagtgtttttcacaactgaaggtccttaacaaagtccttgccatcagggagcagatgtctgcccttggggagagtggatggcaggaagacattaaccgtctccaagtggttgcttctcagtggacattaaagaaaagtctcctgcaagcctggggactgatcctcagagcaaatattttggaagatgtcagcctagatgaattgaagaattttgtgcatgctcagtgtttagaactgaaagccaaaggactctcacttggttttctggagaaaaagcatgatgaagcttcctccctgtcccatccagacttgacctccgtaatccacctcaccaggagtgttcagttgtggcctgcaatggagtacctggctatgctttggcggtacaaagtgacagctgattttatggcacaagcttgtctcagaagatgcagcaaaaatcaacaaccccagataaatgaggagataagtcacctcatctcattttgtctttatcacacacctgttacacctcaagagcttcgagatctgtggtccttgctgcatcatcagaaggtgtctcctgaagaaattacatctttgtggtccgagttatttaattccatgtttatgtctttctggagcagtactgtgaccacaaatccagagtactggctaatgtggaaccctttgcctggtatgcagcagagggaggcacccaagtctgttttggactccacattgaagggccccggcaatctcaatagacccatattctctaagtgctgctttgaagtcttaaccagcagctggagagcaagtccctgggatgtgagtggcctccccattctttcctcctctcacgtgaccctaggagagtgggttgagagaactcagcagctccaggacatcagttcgatgctttggactaacatggctatctcttcagtagcagaattcagacgcacggattcccaactccaggggcaggtgctgttccggcacctggcaggcctagcagagctgctcccagagtcccggcggcaggagtacatgcagaactgtgagcagctgctgcttgggagcagccaggccttccagcatgtgggccagacacttggggacatggctggtcaggaggtgctgcccaaggaactgctctgccagttgctcacctccctgcaccactttgttggtgaaggggagagtaagaggagcctgcctgagccagcccagcgtgggagcctctgggtgagcctcggcttgctccagattcagacatggcttccccaggcacgctttgaccctgcggtgaagagggagtacaagctcaattacgtcaaggaagagttacaccaactgcagtgtgaatggaagacccggaacctgtcatcccagctgcagactggaagagacctggaagatgaagtcgttgtcagctactctcatcctcacgttaggctgcttcgccaaaggatggatcggctggataatttaacctgtcacctgttgaagaaacaggcctttagaccccagctgcctgcctacgagtccctggttcaggagatccaccactacgtcaccagcatcgccaaggcccctgctgttcaggatctgctcacacggcttctgcaggccctccacatagatgggccacggtctgcccaagtagcccagagccttctaaaggaggaggcctcttggcagcagtcacaccaccagttccggaagcggctgtcagaggagtacaccttctatccagatgccgtgagcccactgcaggcatccatattgcagttacaacatggcatgaggctggtggcctctgagctccacacctcactccacagcagtatggttggtgcagacaggctggggaccctggccacagccttgctggctttcccatcggtgggccccaccttcccgacttactatgctcatgcagacactttgtgctcggtgaagtctgaggaggttctacgaggccttgggaagctaatcctcaagcgctcaggaggaaaggagctggaaggcaagggccagaaagcctgtcccactcgggagcagctgctgatgaatgctctcctttacctgcgctcccacgtgttatgcaagggagagttggaccagagggccctgcagctcttcagacatgtgtgtcaggaaatcatcagtgagtgggatgagcaggaacgcatagcccaagagaaggctgagcaggaaagcggcctgtatagatacaggagcaggaactctaggacagccctgagtgaagaggaggaggaagaacgggagttcagaaaacagttccccctgcatgaaaaggactttgcagatattttggtgcagccaacgttggaggagaacaaaggaacttcagatgggcaagaagaggaagcaggcacaaacccagctctcctctcccagaattcaatgcaggcagtaatgctgatacaccagcaattgtgtctcaactttgctcgatccctctggtatcaacagactctgccgccacatgaagcaaagcattacctcagcctgtttctgtcttgctatcagactggggcatcgcttgtgacacacttctaccccctgatgggagttgaactgaatgaccgactcttgggcagccaacttttggcctgtaccctctcccataacactctttttggggaggcaccctcagacctgatggtgaaacctgatgggccctatgacttctaccagcatcccaatgttccagaagcacggcagtgtcaacctgtgcttcaaggtttctcagaggctgtcagtcacttgctacaggactggccagaacacccagcgcttgaacagctcctggttgtaatggacagaattcgtagtttcccactttccagtcccatctcaaagttcctgaatggcttagagatccttctggcaaaggcacaggattgggaggaaaatgcaagtcgagctttgtctttgcggaaacatcttgatttgatcagtcagatgatcattcggtggcgtaaactggagctgaactgctggtccatgagtttggataatactatgaagcgccacaccgagaaatccaccaagcactggttctccatctatcagatgcttgagaagcacatgcaggaacaaacagaagaacaggaagatgacaaacagatgaccttgatgttgctggtcagcacattacaagcatttattgaaggatcctcgctgggagagttccatgtgcgacttcagatgttactggttttccattgtcatgtcttgctgatgccacaggttgaaggaaaggattcactttgcagtgttctatggaatttgtaccattattacaagcaattctttgaccgggtccaggccaaaattgtggaacttcgttcccccctagaaaaagaacttaaagaatttgttaagatttccaagtggaatgatgtcagcttctggtccattaagcaatctgtagaaaagacacacaggacactctttaaattcatgaagaaatttgaagcagtcctgagtgaaccctgccggtcatccctggtggagagtgacaaggaagaacagcctgactttttgcccaggccaacagatggagctgcaagtgaactgtcttccattcagaatctgaacagggcactgagggagaccctgttagcccaaccagcagctgggcaggccacaattccagagtggtgtcagggcgctgctccttccggcttggaaggggagcttctgcgtcgcttgccaaagctcaggaaacgcatgaggaagatgtgcctgacgttcatgaaggagagccccctgcctcgccttgtggagggccttgatcagttcacaggtgaagtgatttcctctgtgagtgagctgcagagcttaaaggtggaaccctctgcagagaaggagaagcagcggtcagaagccaagcacattctcatgcaaaaacagcgagctttgtcagacctctttaaacaccttgcaaaaattggtttgtcgtatcgcaaaggtcttgcttgggcccgttcaaaaaaccctcaagagatgcttcatcttcacccattagatctccagagcgcattgtccatcgtcagcagcactcaggaggctgattctaggctgcttacagaaatctcgtcttcatgggatggatgccagaagtatttttatcgctctcttgcacggcatgccaggcttaacgcagcactagcaactcctgccaaggaaatgggcatgggcaacgtggagaggtgcagagggttctcagcacatttgatgaagatgctcgtccgacagcggcgctccctgaccacgctcagtgagcagtggatcatcctcaggaacctcctcagctgtgtgcaagagattcacagcaggctgatggggccccaggcctaccccgtggccttcccccctcaggatggcgtgcagcagtggacagagcgcctgcagcacctggccatgcagtgccagatcctgcttgagcagctctcctggctcctccagtgctgccccagtgtagggccagctccaggccatggcaatgtccaggtactggggcagcctcctggcccctgcctggaaggaccagaacttagcaagggacaactttgtggagtagtgctggacctaattccttccaatctgagctacccatctccaatacctggaagtcagctgccctctggttgccggatgcggaaacaggatcacctttggcaacagtcaactacgagattaacagagatgctaaaaaccattaaaacagtgaaagctgacgtcgacaaaattagacagcagtcttgtgagactctctttcattcttggaaagattttgaagtttgctcttctgcgctgagttgcttgtcccaggtgtcagttcatttgcagggcctagagtccttgttcattcttccagggatggaggttgagcaaagagactcacaaatggcactagttgaaagtctggaatatgtaagaggagaaattagtaaagccatggctgactttactacctggaagacccatctgcttacttcagatagccaaggaggaaatcaaatgttggacgaaggatttgtggaagatttttcagagcaaatggaaattgccatccgagccatcctctgtgccatccagaacttagaagaaagaaagaatgaaaaagcagaggagaacactgaccaagcaagcccacaagaagattatgcaggctttgagagactgcaatcaggacatctaacaaaactcttagaggatgacttctgggccgatgtgagcactttgcacgtgcagaaaataatttctgccatctccgagctgttggagaggctgaaatcgtacggtgaggatggcacagcagcaaagcacctgttcttcagccaatcctgttccttgctggtgcgcctggtgccggtcctctccagctactcagacctcgtcctcttcttcctgaccatgtctttagcaactcaccgtagtactgcaaagctgctctctgtgcttgcccaggtctttacagagcttgcccagaagggattttgcttgcccaaagaatttatggaagattcagctggagagggagcaactgagttccatgactatgagggaggtggaattggagaaggcgagggcatgaaggatgtgagtgaccagatcggaaatgaagaacaggtggaagatacatttcagaagggtcaagaaaaagacaaagaggatcctgattcaaaatctgatattaagggcgaggataatgccattgagatgtcggaagattttgatgggaaaatgcatgatggggagcttgaagaacaagaagaggatgatgagaaatcagatagtgagggcggagacctggataaacacatgggcgatctcaatggtgaggaagctgacaaactagatgagaggctttggggtgatgatgatgaggaggaagatgaggaggaagaagacaataaaactgaagaaacaggaccaggaatggatgaggaagattctgaacttgttgctaaagatgacaacttggatagtggcaattcaaacaaagataaaagccagcaagataagaaggaagaaaaggaagaagcagaagctgatgatggtggacaaggtgaagacaaaattaatgaacaaatagatgagagggactatgatgaaaatgaggtggacccttaccatggcaatcaggaaaaggtgccagaacccgaggctttggaccttccagatgacttgaacctcgacagtgaagacaagaatggtggtgaggacaccgacaatgaagaaggagaagaagagaatcctttggagataaaagaaaaaccagaagaagcaggtcatgaagctgaggaaagaggagagaccgagaccgaccagaacgaaagtcagagtccacaggagcctgaggaaggccccagtgaagatgacaaggcagaaggggaagaggaaatggacacaggagctgatgaccaagatggagatgctgctcagcatcctgaagaacactctgaggagcagcagcagtctgtggaggaaaaagacaaggaagccgatgaagaaggtggagagaatggccctgctgaccaaggtttccagccccaggaggaagaagaacgggaggactctgatacagaggagcaggtgccagaggctttggagaggaaggagcatgcctcctgtgggcagactggtgtggagaacatgcagaacacacaggccatggagctggctggggccgcacctgagaaggagcaggggaaagaggaacacggaagtggagctgcagatgcaaaccaggcagaaggccatgaatcgaatttcattgcccagttggcctcccagaagcacaccaggaaaaacacacagagttttaagaggaaacctgggcaggctgacaatgaacgttccatgggtgatcacaatgagcgtgtgcacaagaggctgaggactgtggatacggacagccatgccgagcaggggccagctcagcagccccaggcccaggtggaggatgcagatgcattcgagcacattaaacaaggcagtgacgcatacgatgcacagacctatgatgtggccagcaaagaacagcaacagtctgcaaaagactctggcaaagatcaggaagaggaggagatagaggacacccttatggacacagaggagcaggaggagttcaaagcagcagacgtggagcagctgaagccagaggaaatcaagtcgggcaccacagcacccttgggctttgatgagatggaagtggagatccaaactgttaaaacagaggaagaccaagaccccagaacagacaaagcccataaggagacagaaaatgagaaaccagaaagaagccgagagtctaccattcatacagctcatcaattcctcatggacacgatcttccagccctttttaaaagatgtcaatgagctaagacaggagctggagagacagctggaaatgtggcagccacgtgaatctggaaacccagaggaggagaaggttgcagctgagatgtggcagagttacctgatcttaacagcgcctctttcacaacggttatgtgaagagcttcgtctcatattagagcctacccaggcagccaagctgaaaggagactatcgaactgggaaacgactaaacatacggaaagtcattccatacattgctagtcaatttcggaaagacaagatttggcttcgaaggaccaagcccagtaaacgccagtatcagatttgtttggctatcgatgactcttctagtatggtagacaatcataccaagcagcttgcatttgaatctttggctgtgattggaaatgctctaaccctcctggaagtgggtcagattgcagtgtgtagttttggagaatctgtaaagctgttacacccatttcatgagcagttcagtgattactctgggtcccagattctacgtctctgcaaattccaacaaaagaaaaccaagattgctcagtttctagagtctgttgccaacatgtttgcagctgctcagcagctctcgcagaacatcagttcagaaactgcacaactcctcctggtagtctctgatgggcgaggccttttccttgagggcaaagaaagagtcctggcagcagttcaggctgcccggaatgcaaatatctttgtcatctttgttgtattggacaatcccagttcacgggattctatcttggacattaaagtaccgatatttaaaggacctggagagatgcctgaaatccgatcctacatggaagagttcccattcccatactatatcattcttcgagatgtaaacgcacttcctgagacactcagcgatgccctcagacagtggtttgagttggtgacagcctctgaccacccatagaacagaaagaagagtccaaagtgagacttaactgtggtcagaaggtcacattgcttacccaggtgctcccttttggacaactacaaaaaattttattgtaatatttttattttacaacgtgatcttacagcctacagaatgctctctggctcccggctttgcctgggctgaggtttttataccaaacctggaagcagcagcaggtgcctgaactcgtaactagagaagagttatccttcttccctgccttggaagccctggcctgggaggaggtcataccccaccgttggagcccagctgcctgttttcttttgcaggggatctgggcacctgtgccttgaggagatgctgccaggagcatgggactctgacagtcctttgtataaaggactaaagggagctgcccttttgaccctgttctaagctctgccttgccaagcccatagtgtgtgcccaaaagctgtcaagtggccaagacagctcgtttctggag

SEQ ID NO: 13034 - DNA, 2587 bp, Homo sapiens
gaattacaaaggaggccgtctgcctcctttgtcctggatttgggagttgagcaccttcgtcgccattggctttcctcccccagctccagcctctctcatcttgggaatctgcgtcagaagtcactcgcagtcccgtcagcccagaagacgtaaagcaggctaccagcaattttgagaacttgcaaaaacagcttgcaaggaaaatgaagcttcctattttcatagcagatgcattcacagcaagagcatttcgtgggaatcctgctgctgtttgcctcctagaaaatgaattggatgaagacatgcatcagaaaattgcaagggagatgaacctctctgaaactgcttttatccgaaaactgcacccgacagacaactttgcacaaagttcctgctttggactgagatggtttacaccagcgagtgaggtcccactctgtggccatgccaccctggcttctgcagctgtgctgtttcacaaaataaaaaacatgaatagcacgctcacgtttgtcactctgagtggagaactaagggccagacgagcagaggatggcatcgtcctggacttgcctctttatccagcccacccccaggacttccatgaagtagaggacttgataaagactgccataggcaacacactggtccaggacatctgttattctccagatacccaaaagctcctcgtccgcctcagtgacgtttacaacaggtcgtttctggagaacctgaaagtgaacacggagaatctgctgcaagttgaaaacacagggaaggtgaaagggcttattcttacccttaaaggagagcctggtgggcagacccaagcatttgacttttactcaagatattttgcaccgtgggttggtgtggctgaagacccagtgacagggtctgcacacgctgttctcagcagctactggtcccagcatctggggaagaaagaaatgcatgcttttcagtgttcccaccgaggaggagagctgggaatttcccttcgtccagacggaagggttgacattagaggaggtgcagctgttgttttagagggcacactgacagcctagaggtggttatgctgtgacgctgctgtctctaaccaccaagtattttctgcttaaaaagaaatgtaaggggctgcctttagcaaatgtgcgtagtagtctacttaatcctcatgttaaaaatcgaaaaatgggccaggcgcagtggctcatgcctgtaatcgtagcactttgagaggccaaggtgggtggatcacctgaggtcaggggttcgacaccagcctggccaacatggtgaaacctcgtctctactacaaatacaaaaattagctgggtgtggtgccacatgcctgtaattccagctacttgggaggctgaggcatggagaatcgcttgaacccaggaggcagaagttgcagtgagcagagatcacaccactgcactccagcctgggcaacagagtaagactccatccacacacacacacacacacacaaaattgaaaagtgaagacattttaatggagatttaatagtgcttccagactaatgaactaatggagttttggctccactcatgagtgtatttgaaatgtaagtaaccagctacaaagaataatgtcacttcatttgattatgactaccaatcaagagaaggaggaatacatttctgaggagtgatactaaaccatttgagcttaaatgagtacctgattttgcagccattaaaatgagtcaataactatgtggaaatatagaaaaatattttataatataatactaagaaagaggacagtaggccataaagtgttagcagtgttatgctatgtctatataaataagcatgggccattaaaaatagcaaactgaaaacagttcatgtgtggggggcaagtttagaagtaattttaatgtatctaagaagtgatttcctttattgttgtactcaggtacgaagactaaaaatcaggatgaatccagaaaattaacacaaaaaagtatgtattaggctacttcctgtcatagtgaaattaaacactcaaagtaatgtaatctcagctgggcgtggcggctcatgcctgtaatcccagcactttggcaggacaaggcaggaggatcacttgaacctaggagttcgagaccagcctgggcaacacagcgagaacttgtctctattaaaaaaaaaaaaaggaatgtaatttcaatctttttcttgatatatggcttgagaatgataatgtaaaaggaattcttctcttacttcaataaaatgggttttaacataactttaaattcagttaaatatacaatattgaatacctatagttgactttgggatggggactttttcaagtcattaagagtgtttgtttaaggtgatctcattgatggtagttctcagccgtctcaaaaactgcaagctaatcagtcagacattctttaatgaccccaattttttcactttaattgttaccatgttttctatttttactgatttttgctaaagcatgtaagagtgaatttattatagcagtaatcttgtgtttctcctgatgtgcaataaatcaataattcaccagc

SEQ ID NO: 13035 - DNA, 2378 bp, Homo sapiens
aattccctccgccgcggtcgctgagcgagtgcggcgggaatgcggaaccggcgcgcgggctgaggccgcccgggatggcgcaggggcggcggcggcgggcggcctgcgcggggccctagcgagccgggctgacgctcccggccccggccccggcatcggcatcgcgggcgcatcgcggccatggccaaggagcggcgcagggcggtcctggagctgctgcagcggccggggaacgcgcgctgcgcggactgcggcgccccggatcccgactgggcctcctacactctgggcgtcttcatctgcctgagctgctcgggaatccaccggaatatcccccaggtcagcaaggtgaagtccgtccgcctggacgcctgggaggaggcccaagtggagttcatggcctcccacgggaacgacgccgcgagagccaggtttgagtccaaagtaccctccttctactaccggcccacgccctccgactgccagctccttcgagagcagtggatccgggccaagtacgagcgacaggagttcatctacccggagaagcaggagccctactcggcagggtaccgtgagggttttctctggaagcgtggccgggacaacgggcagtttttgagccggaagtttgtgctgacagaacgagagggtgctctgaagtatttcaacagaaatgatgccaaggagcccaaggccgtgatgaagatcgagcacctgaatgccaccttccagccggccaagatcggccacccccacggcctgcaggtcacctacctgaaggacaacagcacccgtaacatcttcatctaccatgaggacgggaaggagattgtggactggttcaatgcactccgagctgctcgcttccactacctgcaggtggcattcccaggggccagcgacgcagatctggtgccaaagctctccaggaactacctgaaggaaggctacatggagaagacggggcccaagcaaacggaaggcttccggaagcgctggttcaccatggatgaccgcaggctcatgtacttcaaagaccccctggacgccttcgcccgaggggaagtcttcattggcagcaaggagagtggctacacggtgctgcatgggttcccgccgtccacccagggccaccactggccacatggcatcaccatcgtcacgcccgaccgcaagtttctgtttgcctgcgagacggagtccgaccagagggagtgggtggcggccttccagaaggcggtggacaggcccatgctgccccaggagtacgcagtggaggcgcacttcaagcataaaccttagcgagtgcggctggaggaccacggacattggactcactgtggctggacggaggggacccgtggatgggggggctctggcgtcctgaggccacctggccccacctgctcctcagggcagcccggcgcggccaggtagggcccgagcttcagcttccaggatgcttctctggaacctcaaggcaggcagcccaggccctgggcctgatctctaaccccgtcatgctgctgctgaccacacccagccaacctgcccctccctgacccggggccccctttcctccagggcccagtctggctcccgagctcagacacagcccccaggagccgcccaccacggctgtgggaacttccaggcctcagcgcagagccctgcttggggccagcacggtgggcagctgccggccgctggggactgggccctgctcgcatgccgccccgccctccccccacctccacgactatttattgagcgcctgttgtgtgtcacggggctatgagggccgtggggtgtttgggtggattatccacacaggtcccggcccctgcccgggctggagttgccacagcctgtgctcctggtcctcacctggaggggccagcaggctgccgtcccaccacacgtggcctctgcgcccagcacggtgctcgccgacagtggtgtctgaacccttggggacgagggcctgggccgcggtgaggccaccagaggcaggagtggccctgggggtcccgggcactgtcgcgcttgctgcaggcggcccagccgtgtatttatttttcacctatctccttcctgtcaaggcaggccgggctccagggctccccttgcgtggggcatgtaggtgggggaggcgtctgcaggtcacctggggggcccagccctctcccagccttgcctggctgagctgtgttccaggggagccctggacaagccctcataggcagggagggggtttccgaggccaggcatccgccgccccgtgtcgcatcctggaataaaatgtggctctggcatggttaaaaaaaaaaaaaaaaaaaaaaaaaaaaaaaaaaaaaaaaaaaaaaaaaaaaaaa

SEQ ID NO: 13036 - DNA, 688 bp, Homo sapiens
atggtcaaccccaccgtgttctttgacacggagcccttgggccgcatctcctttgagctgtttgcagacaagtttccaaagacagcaggaaactttcatgctctgagcactggagagaaaggatttggctataagggttcctgctttcacagaattgttccagggtttatgtgtcagggtggagacttcacatgccatgatggcactggtggcaagtccatctacagggagaaatttgatgacaagaacttcatccggaagcatacagtttctggcatcttgtccatggcaaatgctggacccaacgcaaacagttcccagtttttcatctgtgctgccaagactgagtggttggatggcaagcatgtggtcttcagcaaggtgaaagaaggcatgaatattgtggagaccatggagtgctttgggtccaggaatggcaagaccagtaagaagatcaccattgctgactgtgggcaactctaataagtttgacttgtgttttatcttaaccaccagaccattccttctgtagctcaggagagcaccctccaccccatttgctcgcagtatcctagaatctttgtgctctcactgcagttccctttgggttctatgttttccttgttcctttccatgcctagctagattgcagagttaagtttatgattatgaaataaaaactaattaa

SEQ ID NO: 13037 - DNA, 3272 bp, Homo sapiens
cacgcgcgggctgcccgcggcacggcgggcgcggctggcgcggctggggcggcaggggcggcggagagcgcgccgagccgcggccgagctggcccgcccgcccgtcgcacatgttccggaacggcgcccggccgtagccgcctgcggcgcctcctgtcggcccgagaagggagtgcggagaggcgccggtcgccacccgcggtgcccatggagcgggtgaagatgatcaacgtgcagcgtctgctggaggctgccgagtttttggagcgccgggagcgagagtgtgaacatggctacgcctcttcattcccgtccatgccgagcccccgactgcagcattcaaagcccccacggaggttgagccgggcacagaaacacagcagcgggagcagcaacaccagcactgccaacagatctacacacaatgagctggaaaagaatcgacgagctcatctgcgcctttgtttagaacgcttaaaagttctgattccactaggaccagactgcacccggcacacaacacttggtttgctcaacaaagccaaagcacacatcaagaaacttgaagaagctgaaagaaaaagccagcaccagctcgagaatttggaacgagaacagagatttttaaagtggcgactggaacagctgcagggtcctcaggagatggaacgaatacgaatggacagcattggatcaactatttcttcagatcgttctgattcagagcgagaggagattgaagtggatgttgaaagcacagagttctcccatggagaagtggacaatataagtaccaccagcatcagtgacattgatgaccacagcagcctgccgagtattgggagtgacgagggttactccagtgccagtgtcaaactttcattcacttcatagaacccagcatgacataacagtgcagggcaaaatattcactgggccaattcaatacaaacaatctcttaaattgggttcatgatgcagtctcctctttaaaacaaaacaaaacaaaacaaaactatacttgaacaaaagggtcagaggacctgtatttaagcaaatacttagcaaaaagtggggcagagcctcccaaggagaacaaatattcagaatattcatattggaaaaatcacaatttttaatggcagcagaaaacttgtgtgaaattttcttgatttgagttgattgagaagaggacattggagatgccatcctctttctcttttctagtttgctcatactacattgagtagacacatttaaggatggggttatgaacccttcctgagctttatggtcctaaaagcaaaataaaaactattcgaatgaaaagacaagaaaatcaggtattaatcttggatagctaataatgagctattaaaactcagcctgggacagtttatcatgaagcctgtggatgatcaatcctttattattattttttttttttgaaaaaagctcatttcatgctctgcaaaaggagagactcccatgaagccttttgaaagggatcatcatgcagctcaactttctgttggattccatgctaagcaagctaaccttatcctgcattgttagcactaggcacccagctgccacctctccatcctgctgcccttaggccacatgggagcagtccatgcatgacagcctctatcctacaaggcctatgagtatggattgggggggccaaaaggaaaaagctccatgtgcctctttgtctgcgtgggtcagaagagttgtgcacgcagattagcaggccaaggtctgagccacagcagcatttttatttcagattttgataactgtttatatgtgttgaaaaccaaaatgacatctttttaaagcttatccataaaaaaaaatagatgtcttttatagtggaaaaacacatggggaaaaaaatcatctattttgatgcagcatttgataatgataaaacacctcacacctcactctttatagtgcacaaaatgaatgaggtctgggctaggtagaaaaagggtcaatgctatttttgtttttagaatcattaccttttaccagcttttaaccatctgatatctatagtagacacactatcatagttaacatagtaagttcagcacttgtctcattttaatgtaaagatttgcttccattttcctacaggcagtctctctcttcctcacagtcccactgtgcaggtgctattgttactcttacgaatattttcagtaatgttattttcttctaagtgaaatttctagcctgcactttgatgtcatgtgttccctttgtctttcaaactccaaggttcccttgtggccctctcccttaccctgggaaggcctcttggagaccttacccctggctgtttggactttgtatactttaaataatttaactacccttaattacttaaaaaaaaaaaaaagctttatgattttcataacttattgctgattttaatggattgttaatttcagtcctgtagttttattttatgtttagatagggctgggcaaggaaaaagaaaataaagacaaccatatttagcagtgcagttgagttgtgtgttaatgttagactatccctttgtgagtgacactttaacagcattcactgcttctatatatagtgtaccatcttggtcatacattacgcctcaacatatacttgtgctcttcctttgcctccagaagaagtttttccttgattgtgctatgtttcagtggaagaaattctttgaagtagatgtgagtgaaaaactgcatgcctttagaagcccagtatcagaacttgctacgtttcaggtgctagggacttaatgaaaaacaggacaaaacaattcctttttgtggcccaggtaaattatttctggtttcacttataattactaatggctgagtcaagatgttgtctctgtgtttgcttactcttgatcaagtgtgagacagtttgaagactgtgctaccatacaaagtgaatgaagccagtgactaagcttctgtttgttttgttattctcatggccttcgcttgcattatttgggccttcattcagatgaacttgaggtgccattttgttgcatatgtacaggattatgggctggaaagcatttgttataaacctatagtgcacattttaactgccccctaaattacccttccctgggtttgttttccttggggtggtgtagattgtatgagtaagaagtattaattttttaaaagacaaatcaactttgaagacacaaaagttaattggaagaaataaaaactgtgaacgaagaa

SEQ ID NO: 13038 - DNA, 3470 bp, Homo sapiens
atacacacagactcacagcgagaccgacacacactcccatacactcacacacacaactgcaggcagcgaggctcgggaagtcaggccggcttttcgccccggcgccttctctgctccagccggccgggtctccctgggggcccggagctcggccgggccgcgcagccccgttagaggacgagctcggcggacccccgctcctccatgggcaaacgcgggcggccgcgcaaggaggcgcgctgcgagggcgcggggctggcccccgccgcgcccccggctgtgccccccgccgtggccgcgccccagcccccggccctgcccgaggaccccgctggggccaagcccaggtgccccttctcagacattttcaacaccagcgagaactcgatggagaagcacatcaacacttttctgcagaacgtgcagattctgctcgaggccgccagctacctggagcagatcgagaaagaaaacaaaaagtgtgaacatggctacgcctcttcattcccgtccatgccgagcccccgactgcagcattcaaagcccccacggaggttgagccgggcacagaaacacagcagcgggagcagcaacaccagcactgccaacagatctacacacaatgagctggaaaagaatcgacgagctcatctgcgcctttgtttagaacgcttaaaagttctgattccactaggaccagactgcacccggcacacaacacttggtttgctcaacaaagccaaagcacacatcaagaaacttgaagaagctgaaagaaaaagccagcaccagctcgagaatttggaacgagaacagagatttttaaagtggcgactggaacagctgcagggtcctcaggagatggaacgaatacgaatggacagcattggatcaactatttcttcagatcgttctgattcagagcgagaggagattgaagtggatgttgaaagcacagagttctcccatggagaagtggacaatataagtaccaccagcatcagtgacattgatgaccacagcagcctgccgagtattgggagtgacgagggttactccagtgccagtgtcaaactttcattcacttcatagaacccagcatgacataacagtgcagggcaaaatattcactgggccaattcaatacaaacaatctcttaaattgggttcatgatgcagtctcctctttaaaacaaaacaaaacaaaacaaaactatacttgaacaaaagggtcagaggacctgtatttaagcaaatacttagcaaaaagtggggcagagcctcccaaggagaacaaatattcagaatattcatattggaaaaatcacaatttttaatggcagcagaaaacttgtgtgaaattttcttgatttgagttgattgagaagaggacattggagatgccatcctctttctcttttctagtttgctcatactacattgagtagacacatttaaggatggggttatgaacccttcctgagctttatggtcctaaaagcaaaataaaaactattcgaatgaaaagacaagaaaatcaggtattaatcttggatagctaataatgagctattaaaactcagcctgggacagtttatcatgaagcctgtggatgatcaatcctttattattattttttttttttgaaaaaagctcatttcatgctctgcaaaaggagagactcccatgaagccttttgaaagggatcatcatgcagctcaactttctgttggattccatgctaagcaagctaaccttatcctgcattgttagcactaggcacccagctgccacctctccatcctgctgcccttaggccacatgggagcagtccatgcatgacagcctctatcctacaaggcctatgagtatggattgggggggccaaaaggaaaaagctccatgtgcctctttgtctgcgtgggtcagaagagttgtgcacgcagattagcaggccaaggtctgagccacagcagcatttttatttcagattttgataactgtttatatgtgttgaaaaccaaaatgacatctttttaaagcttatccataaaaaaaaatagatgtcttttatagtggaaaaacacatggggaaaaaaatcatctattttgatgcagcatttgataatgataaaacacctcacacctcactctttatagtgcacaaaatgaatgaggtctgggctaggtagaaaaagggtcaatgctatttttgtttttagaatcattaccttttaccagcttttaaccatctgatatctatagtagacacactatcatagttaacatagtaagttcagcacttgtctcattttaatgtaaagatttgcttccattttcctacaggcagtctctctcttcctcacagtcccactgtgcaggtgctattgttactcttacgaatattttcagtaatgttattttcttctaagtgaaatttctagcctgcactttgatgtcatgtgttccctttgtctttcaaactccaaggttcccttgtggccctctcccttaccctgggaaggcctcttggagaccttacccctggctgtttggactttgtatactttaaataatttaactacccttaattacttaaaaaaaaaaaaaagctttatgattttcataacttattgctgattttaatggattgttaatttcagtcctgtagttttattttatgtttagatagggctgggcaaggaaaaagaaaataaagacaaccatatttagcagtgcagttgagttgtgtgttaatgttagactatccctttgtgagtgacactttaacagcattcactgcttctatatatagtgtaccatcttggtcatacattacgcctcaacatatacttgtgctcttcctttgcctccagaagaagtttttccttgattgtgctatgtttcagtggaagaaattctttgaagtagatgtgagtgaaaaactgcatgcctttagaagcccagtatcagaacttgctacgtttcaggtgctagggacttaatgaaaaacaggacaaaacaattcctttttgtggcccaggtaaattatttctggtttcacttataattactaatggctgagtcaagatgttgtctctgtgtttgcttactcttgatcaagtgtgagacagtttgaagactgtgctaccatacaaagtgaatgaagccagtgactaagcttctgtttgttttgttattctcatggccttcgcttgcattatttgggccttcattcagatgaacttgaggtgccattttgttgcatatgtacaggattatgggctggaaagcatttgttataaacctatagtgcacattttaactgccccctaaattacccttccctgggtttgttttccttggggtggtgtagattgtatgagtaagaagtattaattttttaaaagacaaatcaactttgaagacacaaaagttaattggaagaaataaaaactgtgaacgaagaa

SEQ ID NO: 13039 - DNA, 12450 bp, Homo sapiens
gaagatggcggcggcggcggcggtgacggcgcttcccgtgcggctgaggacgatccgccagtgagcgcggagactgcttccacttcgggcgggggagcgccggaccgaatcggctctctaggccgtggagcttgccgtcccacctccgtccaaatcgacctttcctttctatccccaaccacccctcaacccctgttttcccctgccttccttgcagaggccatggaggacgaggagagacagaagaagctggaggccggcaaagccaagcttgcccagtttcgacaaagaaaagctcagtcggatgggcagagtccttccaagaagcagaaaaaaaagagaaaaacgtcaagcagtaaacatgatgtgtcagcacaccatgatttgaatattgatcaatcacagtgtaatgaaatgtacataaatagttctcagagagtagaatcaactgtgattcctgaatctacaataatgagaactctacatagtggagaaataaccagtcatgagcagggcttctctgtggaactggaaagtgaaatttcaaccacagcagatgactgcagttcagaggtaaatggttgcagttttgtgatgagaacaggaaagcctacaaatttattaagggaagaagaatttggtgttgatgattcttattctgaacaaggagcacaagacagtccgactcatctagagatgatggaaagtgagttggctgggaagcagcatgagattgaagagctaaacagagagctggaagaaatgagggttacctatgggactgaaggactgcagcagttacaagaatttgaagctgccattaaacaaagagatggcattataacccagctcactgctaatttacaacaagcaagaagagaaaaggatgagacaatgagagaatttttagagttgacagaacagagtcaaaaattacagattcaatttcagcaattacaggctagtgaaactctgagaaacagcactcatagtagcacagctgcagacttactacaagccaaacaacagatcctcactcatcaacagcagcttgaagaacaagaccacttattagaagattatcagaaaaagaaagaagacttcacaatgcaaattagtttcttgcaagagaaaattaaagtatatgaaatggaacaagataaaaaagtagaaaactcaaataaagaagaaatacaggaaaaggagacaatcattgaagaattaaacacaaaaataatagaagaagaaaagaaaactcttgagctaaaggataaattaacaactgctgataaattactaggagaattacaagaacagattgtgcaaaagaaccaagaaataaaaaacatgaaattagagctgactaattctaagcaaaaagaaagacagtcttctgaagaaataaaacagttaatggggacagtcgaagaacttcagaagagaaatcataaagacagccagttcgaaactgatatagtacaacgaatggaacaagaaacacaaagaaagttagaacaactccgggcagagctggatgagatgtatgggcagcagatagtgcaaatgaaacaagaattaataagacaacacatggcacagatggaggaaatgaaaacacggcataagggagaaatggagaatgctttaaggtcatattcaaatattacagttaatgaagatcagataaagttaatgaatgtggcaataaatgaactgaatataaaattgcaagatactaactctcaaaaggaaaaactcaaggaagaactaggactaattttagaagaaaagtgtgctctacagagacagcttgaagaccttgttgaagaattgagcttttcaagggaacagattcagagagctagacagacaatagctgaacaagaaagtaaacttaatgaagcacataagtcccttagtacagtggaagatttgaaagctgagattgtttctgcatctgaatccagaaaggaactagaattaaaacatgaagcagaagttacaaattacaagataaaacttgaaatgttagaaaaagaaaagaatgctgtgttagacagaatggctgaatcacaagaagctgaattagagaggctgagaacacagcttctatttagtcacgaagaagagctttccaaactgaaggaagatttagaaattgaacatcgaataaatattgaaaaacttaaagataatttaggcattcactataaacagcagatagatggtttacagaatgaaatgagtcaaaagatagaaaccatgcagtttgaaaaggacaatttgataactaagcagaatcaattaattttggaaatttcaaagctaaaagatttacagcagtctcttgtaaattcaaagtcagaagaaatgactcttcaaatcaatgaacttcaaaaagaaattgaaatactcagacaagaagaaaaagaaaagggtacacttgaacaagaagttcaagaattacaacttaaaacagaattgttagaaaaacagatgaaggaaaaagagaatgatcttcaagaaaaatttgcacaacttgaagcagagaatagcattcttaaagatgaaaagaaaacccttgaagacatgttgaaaatacatactcctgttagccaagaagaaagattgattttcttagactccattaagtccaaatccaaagactctgtgtgggaaaaagaaatagaaatacttatagaggaaaatgaggacctcaaacaacaatgtattcagctaaatgaagagattgaaaagcaaaggaacactttttcatttgctgaaaaaaactttgaagttaactatcaagagttacaagaggagtatgcttgccttctcaaagtaaaagatgatttagaagacagtaaaaataaacaggaattagagtataaaagtaaacttaaagcacttaatgaagagcttcatttgcaaagaataaatccaactacagtgaaaatgaaaagttctgtctttgatgaagacaaaacttttgtagcagaaacattggaaatgggtgaggttgttgaaaaggatacaacagaactcatggaaaaacttgaggtaaccaagcgagagaaattagagctgtcacagagactgtctgatctttctgaacaattgaaacagaaacatggtgagattagttttctaaatgaagaagttaaatctttaaagcaagagaaagaacaagtttcattgagatgtagagagctagaaatcattattaaccacaacagggcagaaaatgtacagtcatgtgatactcaagtaagctctttattagatggagttgtgaccatgacaagcaggggtgctgaaggatcagtttctaaagtaaataaaagttttggtgaagaatcaaaaataatggtggaagataaagtttcttttgaaaatatgactgttggagaagaaagtaagcaagaacagttgattttggatcacttaccatctgtaacaaaggaatcatcacttagagcaactcaaccaagtgaaaatgataaacttcagaaagaactcaatgtacttaaatcagaacagaatgatttaaggctacagatggaagcccaacgcatttgcctctctctggtttattcaactcatgtggatcaggttcgtgaatatatggaaaatgaaaaagataaagctctttgcagtcttaaagaagagcttatttttgctcaagaggaaaagatcaaggaacttcagaaaatacaccagttagaactacagactatgaaaacacaagaaacaggtgatgaaggaaagcctttacatctgctcattggaaaacttcaaaaggcagtgtctgaagaatgttcttattttttacagactttatgcagtgtccttggtgaatattatactcctgctttaaaatgtgaagtaaatgcagaagacaaagagaattctggtgattacatttctgaaaatgaagatccagaattacaagattatagatatgaagttcaagactttcaagaaaatatgcacactcttctcaacaaagtaacagaagaatacaacaaactcttggtacttcaaacacgactaagcaagatctggggacagcagacagatggtatgaaacttgaatttggagaagaaaaccttccaaaagaggaaacagagtttttatcaatccattctcagatgaccaatttggaagacattgatgtcaatcataaaagcaagttatcttctctgcaagatcttgaaaaaactaaacttgaagaacaagttcaagaattagaaagcctcatatcctctttgcagcaacagttgaaagaaactgaacaaaactatgaggcagagatccactgtttacagaagaggcttcaagctgttagtgagtccacggttccgccaagcttacctgttgattcggtggtaattacagaatctgatgcacagagaacaatgtaccctggaagttgtgtgaaaaagaatattgatggtacaatagagttttctggtgaatttggagtgaaagaggaaacaaatatcgttaagttgcttgaaaaacaataccaagaacaattagaagaagaagtagctaaggttattgtgtcaatgagtatagcatttgctcaacaaactgaactgtctagaatatctgggggaaaagaaaatactgcatcatcaaagcaagcacatgctgtgtgtcagcaagaacaacattattttaatgaaatgaaattatcacaggatcaaattggttttcagacttttgagacagtggatgtgaaatttaaagaagaatttaaaccacttagtaaagagttaggagaacatggaaaggaaattttattatcaaatagtgatccccatgatataccagaatcaaaggactgtgtgctgactatttcagaagaaatgttctccaaagataaaacatttatagttagacagtctattcatgatgagatttcagtgtcaagcatggatgcttctagacaactaatgttgaatgaagaacagttggaagatatgagacaggaacttgtacgacaataccaagaacatcaacaggcaacggaattgttaaggcaagcacatatgcggcaaatggagagacagcgagaagaccaggaacagctacaagaagagattaagagacttaatagacaattagcccagagatcctccatagataatgaaaacctggtttcagagagagagagggtgcttttagaggagctggaagcactaaagcagctgtctttagctggaagagagaagctgtgttgtgagctgcgcaacagcagtacgcaaacacagaatggaaatgaaaaccaaggagaagttgaagaacaaacatttaaagaaaaggaattagacagaaaacctgaagatgtgcctcctgagattttgtctaatgaaaggtatgcactccagaaagctaataatagacttttgaagatcctcttagaagttgtaaagacaacagcagctgttgaagaaacaattggtcgccatgtccttgggattctagatagatctagtaaaagccagtcatctgccagcctaatttggaggtcagaagcagaggcatctgtaaagtcatgtgtccatgaggaacatacaagagttacagatgaatccattccctcttattctggaagtgatatgccaagaaatgacattaacatgtggtcaaaagtaactgaggaaggaacagagctgtcacaacgacttgtgaggagtggttttgctggaactgaaatagaccctgaaaatgaagaacttatgctgaacattagctctcgactacaagcagcagttgaaaaactcctagaagccataagtgaaactagcagtcagcttgaacatgcgaaagtgacacagacagagttgatgcgtgagtcatttagacagaaacaagaagcaacagagtcccttaagtgccaagaggaacttcgagagcgccttcatgaggagtccagggccagagaacagctagctgtggagctcagtaaggctgagggcgtcattgatggctatgcagatgaaaaaactctttttgaaaggcaaattcaggaaaaaactgatataatagatcgtcttgagcaggagttgttatgtgcaagtaacaggttgcaagaattggaggcagagcaacagcagatccaagaagaaagagaattactgtccagacaaaaggaagctatgaaagcagaggcaggcccagttgaacaacaattactacaggagacagaaaaattaatgaaggaaaaactagaagtacaatgtcaagctgaaaaagtacgtgatgaccttcaaaaacaagtgaaagctctagaaatagatgtggaagaacaagtcagtaggtttatagagctggaacaagaaaaaaatactgaactaatggatttaagacagcaaaaccaagcattggaaaagcagttagaaaaaatgagaaaatttttagatgagcaagccattgacagagaacatgagagagatgtattccaacaggaaatacagaaactagaacagcaacttaaggttgttcctcgattccagcctatcagtgaacatcaaactagagaggttgaacagttagcaaatcatctgaaagaaaaaacagacaaatgcagtgagcttttgctctctaaagagcagcttcaaagggatatacaagaaaggaatgaagaaatagagaaactggagttcagagtaagagaactggagcaggcgcttcttgtagaggaccgaaaacactttggagctgtagaagctaaaccagaattgtccctagaagtacaattgcaggctgaacgagatgccatagacagaaaggaaaaagagattacaaacttagaagagcaattagaacagtttagagaagaactggaaaataagaatgaagaagttcaacaattacatatgcaattagaaatacagaaaaaggaatctactacccgcctacaagaacttgaacaggaaaacaaattatttaaggatgacatggagaaactgggacttgccataaaggaatctgatgccatgtctactcaagaccaacatgtgctatttgggaaatttgctcaaataatacaggaaaaagaggtagaaattgaccaattaaatgaacaagttacgaaactccagcagcaacttaaaattacaacagataacaaggttattgaagaaaaaaatgaactgataagggatcttgaaacccaaatagaatgtttgatgagtgatcaagaatgtgtgaagagaaatagagaagaagaaatagagcagctcaatgaagtgattgaaaaacttcaacaggaattggcaaatattggacagaagacatcaatgaatgctcattccctctcagaagaagcagacagtttaaaacatcaattggatgtggttatagctgaaaagctggccttggaacagcaagtagaaaccgctaatgaagaaatgaccttcatgaaaaatgtacttaaagaaaccaattttaaaatgaatcagctaacacaggaattattcagcttaaagagagaacgtgaaagtgtggaaaagattcaaagcataccagagaatagtgttaacgtggctatagatcatctgagcaaagacaaacctgaactagaagtagtccttacagaggatgctcttaaatccctagaaaatcagacatacttcaaatcttttgaagaaaatggcaaaggttccataattaatttggaaacaaggttgctacaacttgagagcactgttagtgcaaaggacttagaacttacccagtgttataaacaaataaaagacatgcaagaacaaggccagtttgaaacagaaatgcttcaaaagaagattgtaaacctacagaaaatagttgaagaaaaagtggctgctgctcttgtcagtcaaatccaacttgaggcagttcaggaatatgcaaaattctgtcaagataatcaaacaatttcatcagaacctgaaagaacaaatattcagaatttaaatcaactaagagaagatgagttggggtcagatatatcagcattaaccttgagaatatcagaattagaaagccaggttgttgaaatgcatactagtttgattttagaaaaagaacaagtagaaattgcagaaaaaaatgttttagaaaaagaaaagaagctgctagaactacagaagctattggagggcaatgagaaaaaacagagagagaaagaaaagaaaagaagccctcaagatgttgaagttctcaagacaactactgagctatttcatagcaatgaagaaagtggattttttaatgaactcgaggctcttagagctgaatcagtggctaccaaagcagaacttgccagttataaagaaaaggctgaaaaacttcaagaagagcttttggtaaaagaaacaaatatgacatctcttcagaaagacttaagccaagttagggatcacctcgcagaggcaaaagagaaattgtccattttagaaaaagaagatgagactgaggtacaagaaagcaaaaaggcctgcatgtttgagccacttcctataaaactgagtaagagcattgcatcccagacagatgggactctgaagatcagtagcagcaatcagactccacaaattcttgttaaaaatgcaggaatacaaattaatttacagagtgaatgttcctcagaagaagttactgaaataatcagtcagtttactgaaaaaattgagaagatgcaagaactacatgctgctgaaattttggacatggaatccagacatatttcagaaactgaaaccttaaagagggaacactatgttgccgttcagttactgaaagaggaatgtggtaccttgaaggcagtgatacagtgtctgagaagtaaagagggatcctcaattcctgagctagcacattctgatgcttaccagactagagaaatatgctccagtgattctggatcagactggggtcagggaatttatcttacacacagtcagggatttgacatagcatcagaaggccgaggagaagaaagtgaaagtgcaacagattcctttccaaagaaaataaagggattactgagagctgtccataatgaaggcatgcaggtgctttctctcactgagtctccctatagtgatggagaggaccattctattcagcaggtttcagaaccttggctagaagagagaaaagcttacatcaatacaatctcatctctaaaggatttaattacaaagatgcaactgcaaagagaagccgaggtttatgatagttctcaatctcatgagagcttctcagactggcgaggtgaactactgcttgcccttcaacaagttttcttagaagagcgtagtgttttactagcagcatttcggacggagctgacagctctaggtactacagatgcagttggtttactaaactgtttggaacagagaatacaagaacagggtgttgaatatcaagcagctatggaatgcctccagaaagcagatagaaggagtttgttatctgaaattcaggcactgcatgcacaaatgaatggtaggaaaattactctgaaaagagaacaagagagtgagaaaccaagccaagaactcttggaatataatatacagcagaagcagtctcaaatgctggagatgcaagtggagctcagcagtatgaaagacagagcaacggaactgcaggagcagctgagttctgagaaaatggtggttgctgaactgaagagtgagcttgcacaaactaaattggaactagaaacaacactcaaggcacagcataaacacctaaaagaattggaggctttcaggttggaagttaaagataagacagatgaagtacatttgcttaatgacacattagcaagtgaacagaaaaaatcaagagagctccagtgggctttggagaaagagaaagccaagttgggacgcagtgaagaacgggataaagaagaacttgaggatctgaagttttcacttgagagtcagaaacaaaggaatcttcagctaaatctacttttggaacaacagaaacaactactgaacgaatcccagcaaaaaatagaatcacagagaatgctatatgatgcccagttgtcagaagaacaaggtcgaaacttagagcttcaggtacttcttgaatctgagaaagttcgaattcgggaaatgagtagtaccctagatagggagcgggaattgcacgcacagctgcagagcagtgatggtactggacagtctcggccacccttgccctcagaggacctactgaaagagctgcagaaacagctagaggaaaaacacagtcgcatagtagaattgttaaatgagactgaaaaatataaactggattctttgcaaacacgacagcaaatggaaaaagataggcaggttcacaggaaaacactgcagacagaacaggaggccaacactgagggacagaaaaaaatgcatgagctccagtccaaagtggaagatcttcagcgccagctggaagagaaaagacaacaagtttataagttagaccttgaaggacagcgactacaaggaatcatgcaggaattccagaagcaagaactagaacgagaagaaaaacgagaaagtagaagaattctgtatcagaaccttaatgagccaaccacgtggagcttaaccagtgatagaactagaaattgggttcttcaacagaaaatagaaggagaaacaaaagaatcaaactacgctaaattgattgaaatgaatggaggaggaaccggctgtaatcatgaattagaaatgatcagacaaaagcttcaatgtgtagcttcaaaactacaggttctaccccagaaagcctctgagagactacagtttgaaacagcagatgatgaagatttcatttgggttcaggaaaatattgatgaaattattttacaactacagaaattaactggccagcaaggtgaagagcccagcttggtgtccccaagtacttcttgtggctcattgactgaaagactactgagacaaaatgctgagctgacagggcatatcagtcaactgactgaagagaagaatgacttaaggaacatggttatgaagctggaagagcagatcaggtggtatcgacagacaggagctggtagagataattcttccaggttttcattgaatggtggtgccaacattgaagccatcattgcctctgaaaaagaagtatggaacagagaaaaattgactctccagaaatctttgaaaagggcagaggctgaagtatacaaactgaaagctgaactaagaaatgactctttacttcaaactctgagccctgattctgaacatgtcactttaaagagaatttatggtaaatacttgagggcagaaagttttcgaaaggctctcatttaccagaagaaatacctgctgctgttactgggtgggttccaggaatgtgaagatgccaccttggccctgcttgcccggatgggggggcagccagctttcacggatctagaggtgatcaccaatcgcccaaagggcttcaccaggtttcggtcggccgtcagagtatccattgcaatttccagaatgaaatttttggttcgacggtggcatcgagtcacaggttctgtttccatcaatattaacagagatggctttggactgaatcaaggtgcagaaaagactgactcattttatcattcttctggtgggctggagttatatggagaaccaagacatactacgtatcgctcaagatcagatctggactatattaggtcccctttaccatttcagaataggtacccaggcactccagctgatttcaatcctggttctttagcatgttctcagcttcagaattacgatcctgacagagccctaacagattatatcactcggctagaggcactgcaaagacgacttggaactatacagtcaggttcaactactcaatttcatgctggcatgagaagataatcctttgaaacatcattaattgaagtgattttaaatagatttccttttgtaaatcaatggttcttttgtgcttttgtattgtgaatattcaatgggaccaatatgaacacagcttatgattgtatacaaatcccttgccagcacatgaaaacaaactggaatttgtatatataagcattgtgtatgtattcatgcacaataattattgaattacctgtatatttgtggaatgctaatttaaaacattaaattataaaccttgtgtatttatcaaatgggtgaaaagattaaacttttacgcattacaatactgctgaatgtgtagctcgaggtgtcctgcacttttcttataaggctactgaagttacatgttttgcctaatatattctactggtgatgaagacagataatatcacttgtagagacctatttttgtataatggtagaagttttgaattttatggggtattttgtcaagtactgaaataaaaactgaaataaaaatgacttcaccattttcaccacact

SEQ ID NO: 13040 - DNA, 12474 bp, Homo sapiens
gaagatggcggcggcggcggcggtgacggcgcttcccgtgcggctgaggacgatccgccagtgagcgcggagactgcttccacttcgggcgggggagcgccggaccgaatcggctctctaggccgtggagcttgccgtcccacctccgtccaaatcgacctttcctttctatccccaaccacccctcaacccctgttttcccctgccttccttgcagaggccatggaggacgaggagagacagaagaagctggaggccggcaaagccaagattgaagaactctctttagcttttcttgtcagacagcttgcccagtttcgacaaagaaaagctcagtcggatgggcagagtccttccaagaagcagaaaaaaaagagaaaaacgtcaagcagtaaacatgatgtgtcagcacaccatgatttgaatattgatcaatcacagtgtaatgaaatgtacataaatagttctcagagagtagaatcaactgtgattcctgaatctacaataatgagaactctacatagtggagaaataaccagtcatgagcagggcttctctgtggaactggaaagtgaaatttcaaccacagcagatgactgcagttcagaggtaaatggttgcagttttgtgatgagaacaggaaagcctacaaatttattaagggaagaagaatttggtgttgatgattcttattctgaacaaggagcacaagacagtccgactcatctagagatgatggaaagtgagttggctgggaagcagcatgagattgaagagctaaacagagagctggaagaaatgagggttacctatgggactgaaggactgcagcagttacaagaatttgaagctgccattaaacaaagagatggcattataacccagctcactgctaatttacaacaagcaagaagagaaaaggatgagacaatgagagaatttttagagttgacagaacagagtcaaaaattacagattcaatttcagcaattacaggctagtgaaactctgagaaacagcactcatagtagcacagctgcagacttactacaagccaaacaacagatcctcactcatcaacagcagcttgaagaacaagaccacttattagaagattatcagaaaaagaaagaagacttcacaatgcaaattagtttcttgcaagagaaaattaaagtatatgaaatggaacaagataaaaaagtagaaaactcaaataaagaagaaatacaggaaaaggagacaatcattgaagaattaaacacaaaaataatagaagaagaaaagaaaactcttgagctaaaggataaattaacaactgctgataaattactaggagaattacaagaacagattgtgcaaaagaaccaagaaataaaaaacatgaaattagagctgactaattctaagcaaaaagaaagacagtcttctgaagaaataaaacagttaatggggacagtcgaagaacttcagaagagaaatcataaagacagccagttcgaaactgatatagtacaacgaatggaacaagaaacacaaagaaagttagaacaactccgggcagagctggatgagatgtatgggcagcagatagtgcaaatgaaacaagaattaataagacaacacatggcacagatggaggaaatgaaaacacggcataagggagaaatggagaatgctttaaggtcatattcaaatattacagttaatgaagatcagataaagttaatgaatgtggcaataaatgaactgaatataaaattgcaagatactaactctcaaaaggaaaaactcaaggaagaactaggactaattttagaagaaaagtgtgctctacagagacagcttgaagaccttgttgaagaattgagcttttcaagggaacagattcagagagctagacagacaatagctgaacaagaaagtaaacttaatgaagcacataagtcccttagtacagtggaagatttgaaagctgagattgtttctgcatctgaatccagaaaggaactagaattaaaacatgaagcagaagttacaaattacaagataaaacttgaaatgttagaaaaagaaaagaatgctgtgttagacagaatggctgaatcacaagaagctgaattagagaggctgagaacacagcttctatttagtcacgaagaagagctttccaaactgaaggaagatttagaaattgaacatcgaataaatattgaaaaacttaaagataatttaggcattcactataaacagcagatagatggtttacagaatgaaatgagtcaaaagatagaaaccatgcagtttgaaaaggacaatttgataactaagcagaatcaattaattttggaaatttcaaagctaaaagatttacagcagtctcttgtaaattcaaagtcagaagaaatgactcttcaaatcaatgaacttcaaaaagaaattgaaatactcagacaagaagaaaaagaaaagggtacacttgaacaagaagttcaagaattacaacttaaaacagaattgttagaaaaacagatgaaggaaaaagagaatgatcttcaagaaaaatttgcacaacttgaagcagagaatagcattcttaaagatgaaaagaaaacccttgaagacatgttgaaaatacatactcctgttagccaagaagaaagattgattttcttagactccattaagtccaaatccaaagactctgtgtgggaaaaagaaatagaaatacttatagaggaaaatgaggacctcaaacaacaatgtattcagctaaatgaagagattgaaaagcaaaggaacactttttcatttgctgaaaaaaactttgaagttaactatcaagagttacaagaggagtatgcttgccttctcaaagtaaaagatgatttagaagacagtaaaaataaacaggaattagagtataaaagtaaacttaaagcacttaatgaagagcttcatttgcaaagaataaatccaactacagtgaaaatgaaaagttctgtctttgatgaagacaaaacttttgtagcagaaacattggaaatgggtgaggttgttgaaaaggatacaacagaactcatggaaaaacttgaggtaaccaagcgagagaaattagagctgtcacagagactgtctgatctttctgaacaattgaaacagaaacatggtgagattagttttctaaatgaagaagttaaatctttaaagcaagagaaagaacaagtttcattgagatgtagagagctagaaatcattattaaccacaacagggcagaaaatgtacagtcatgtgatactcaagtaagctctttattagatggagttgtgaccatgacaagcaggggtgctgaaggatcagtttctaaagtaaataaaagttttggtgaagaatcaaaaataatggtggaagataaagtttcttttgaaaatatgactgttggagaagaaagtaagcaagaacagttgattttggatcacttaccatctgtaacaaaggaatcatcacttagagcaactcaaccaagtgaaaatgataaacttcagaaagaactcaatgtacttaaatcagaacagaatgatttaaggctacagatggaagcccaacgcatttgcctctctctggtttattcaactcatgtggatcaggttcgtgaatatatggaaaatgaaaaagataaagctctttgcagtcttaaagaagagcttatttttgctcaagaggaaaagatcaaggaacttcagaaaatacaccagttagaactacagactatgaaaacacaagaaacaggtgatgaaggaaagcctttacatctgctcattggaaaacttcaaaaggcagtgtctgaagaatgttcttattttttacagactttatgcagtgtccttggtgaatattatactcctgctttaaaatgtgaagtaaatgcagaagacaaagagaattctggtgattacatttctgaaaatgaagatccagaattacaagattatagatatgaagttcaagactttcaagaaaatatgcacactcttctcaacaaagtaacagaagaatacaacaaactcttggtacttcaaacacgactaagcaagatctggggacagcagacagatggtatgaaacttgaatttggagaagaaaaccttccaaaagaggaaacagagtttttatcaatccattctcagatgaccaatttggaagacattgatgtcaatcataaaagcaagttatcttctctgcaagatcttgaaaaaactaaacttgaagaacaagttcaagaattagaaagcctcatatcctctttgcagcaacagttgaaagaaactgaacaaaactatgaggcagagatccactgtttacagaagaggcttcaagctgttagtgagtccacggttccgccaagcttacctgttgattcggtggtaattacagaatctgatgcacagagaacaatgtaccctggaagttgtgtgaaaaagaatattgatggtacaatagagttttctggtgaatttggagtgaaagaggaaacaaatatcgttaagttgcttgaaaaacaataccaagaacaattagaagaagaagtagctaaggttattgtgtcaatgagtatagcatttgctcaacaaactgaactgtctagaatatctgggggaaaagaaaatactgcatcatcaaagcaagcacatgctgtgtgtcagcaagaacaacattattttaatgaaatgaaattatcacaggatcaaattggttttcagacttttgagacagtggatgtgaaatttaaagaagaatttaaaccacttagtaaagagttaggagaacatggaaaggaaattttattatcaaatagtgatccccatgatataccagaatcaaaggactgtgtgctgactatttcagaagaaatgttctccaaagataaaacatttatagttagacagtctattcatgatgagatttcagtgtcaagcatggatgcttctagacaactaatgttgaatgaagaacagttggaagatatgagacaggaacttgtacgacaataccaagaacatcaacaggcaacggaattgttaaggcaagcacatatgcggcaaatggagagacagcgagaagaccaggaacagctacaagaagagattaagagacttaatagacaattagcccagagatcctccatagataatgaaaacctggtttcagagagagagagggtgcttttagaggagctggaagcactaaagcagctgtctttagctggaagagagaagctgtgttgtgagctgcgcaacagcagtacgcaaacacagaatggaaatgaaaaccaaggagaagttgaagaacaaacatttaaagaaaaggaattagacagaaaacctgaagatgtgcctcctgagattttgtctaatgaaaggtatgcactccagaaagctaataatagacttttgaagatcctcttagaagttgtaaagacaacagcagctgttgaagaaacaattggtcgccatgtccttgggattctagatagatctagtaaaagccagtcatctgccagcctaatttggaggtcagaagcagaggcatctgtaaagtcatgtgtccatgaggaacatacaagagttacagatgaatccattccctcttattctggaagtgatatgccaagaaatgacattaacatgtggtcaaaagtaactgaggaaggaacagagctgtcacaacgacttgtgaggagtggttttgctggaactgaaatagaccctgaaaatgaagaacttatgctgaacattagctctcgactacaagcagcagttgaaaaactcctagaagccataagtgaaactagcagtcagcttgaacatgcgaaagtgacacagacagagttgatgcgtgagtcatttagacagaaacaagaagcaacagagtcccttaagtgccaagaggaacttcgagagcgccttcatgaggagtccagggccagagaacagctagctgtggagctcagtaaggctgagggcgtcattgatggctatgcagatgaaaaaactctttttgaaaggcaaattcaggaaaaaactgatataatagatcgtcttgagcaggagttgttatgtgcaagtaacaggttgcaagaattggaggcagagcaacagcagatccaagaagaaagagaattactgtccagacaaaaggaagctatgaaagcagaggcaggcccagttgaacaacaattactacaggagacagaaaaattaatgaaggaaaaactagaagtacaatgtcaagctgaaaaagtacgtgatgaccttcaaaaacaagtgaaagctctagaaatagatgtggaagaacaagtcagtaggtttatagagctggaacaagaaaaaaatactgaactaatggatttaagacagcaaaaccaagcattggaaaagcagttagaaaaaatgagaaaatttttagatgagcaagccattgacagagaacatgagagagatgtattccaacaggaaatacagaaactagaacagcaacttaaggttgttcctcgattccagcctatcagtgaacatcaaactagagaggttgaacagttagcaaatcatctgaaagaaaaaacagacaaatgcagtgagcttttgctctctaaagagcagcttcaaagggatatacaagaaaggaatgaagaaatagagaaactggagttcagagtaagagaactggagcaggcgcttcttgtgagtgcagatacttttcaaaaggtagaggaccgaaaacactttggagctgtagaagctaaaccagaattgtccctagaagtacaattgcaggctgaacgagatgccatagacagaaaggaaaaagagattacaaacttagaagagcaattagaacagtttagagaagaactggaaaataagaatgaagaagttcaacaattacatatgcaattagaaatacagaaaaaggaatctactacccgcctacaagaacttgaacaggaaaacaaattatttaaggatgacatggagaaactgggacttgccataaaggaatctgatgccatgtctactcaagaccaacatgtgctatttgggaaatttgctcaaataatacaggaaaaagaggtagaaattgaccaattaaatgaacaagttacgaaactccagcagcaacttaaaattacaacagataacaaggttattgaagaaaaaaatgaactgataagggatcttgaaacccaaatagaatgtttgatgagtgatcaagaatgtgtgaagagaaatagagaagaagaaatagagcagctcaatgaagtgattgaaaaacttcaacaggaattggcaaatattggacagaagacatcaatgaatgctcattccctctcagaagaagcagacagtttaaaacatcaattggatgtggttatagctgaaaagctggccttggaacagcaagtagaaaccgctaatgaagaaatgaccttcatgaaaaatgtacttaaagaaaccaattttaaaatgaatcagctaacacaggaattattcagcttaaagagagaacgtgaaagtgtggaaaagattcaaagcataccagagaatagtgttaacgtggctatagatcatctgagcaaagacaaacctgaactagaagtagtccttacagaggatgctcttaaatccctagaaaatcagacatacttcaaatcttttgaagaaaatggcaaaggttccataattaatttggaaacaaggttgctacaacttgagagcactgttagtgcaaaggacttagaacttacccagtgttataaacaaataaaagacatgcaagaacaaggccagtttgaaacagaaatgcttcaaaagaagattgtaaacctacagaaaatagttgaagaaaaagtggctgctgctcttgtcagtcaaatccaacttgaggcagttcaggaatatgcaaaattctgtcaagataatcaaacaatttcatcagaacctgaaagaacaaatattcagaatttaaatcaactaagagaagatgagttggggtcagatatatcagcattaaccttgagaatatcagaattagaaagccaggttgttgaaatgcatactagtttgattttagaaaaagaacaagtagaaattgcagaaaaaaatgttttagaaaaagaaaagaagctgctagaactacagaagctattggagggcaatgagaaaaaacagagagagaaagaaaagaaaagaagccctcaagatgttgaagttctcaagacaactactgagctatttcatagcaatgaagaaagtggattttttaatgaactcgaggctcttagagctgaatcagtggctaccaaagcagaacttgccagttataaagaaaaggctgaaaaacttcaagaagagcttttggtaaaagaaacaaatatgacatctcttcagaaagacttaagccaagttagggatcacctcgcagaggcaaaagagaaattgtccattttagaaaaagaagatgagactgaggtacaagaaagcaaaaaggcctgcatgtttgagccacttcctataaaactgagtaagagcattgcatcccagacagatgggactctgaagatcagtagcagcaatcagactccacaaattcttgttaaaaatgcaggaatacaaattaatttacagagtgaatgttcctcagaagaagttactgaaataatcagtcagtttactgaaaaaattgagaagatgcaagaactacatgctgctgaaattttggacatggaatccagacatatttcagaaactgaaaccttaaagagggaacactatgttgccgttcagttactgaaagaggaatgtggtaccttgaaggcagtgatacagtgtctgagaagtaaagaggtatttggtttttataatatgtgtttttcaacattgtgtgattctggatcagactggggtcagggaatttatcttacacacagtcagggatttgacatagcatcagaaggccgaggagaagaaagtgaaagtgcaacagattcctttccaaagaaaataaagggattactgagagctgtccataatgaaggcatgcaggtgctttctctcactgagtctccctatagtgatggagaggaccattctattcagcaggtttcagaaccttggctagaagagagaaaagcttacatcaatacaatctcatctctaaaggatttaattacaaagatgcaactgcaaagagaagccgaggtttatgatagttctcaatctcatgagagcttctcagactggcgaggtgaactactgcttgcccttcaacaagttttcttagaagagcgtagtgttttactagcagcatttcggacggagctgacagctctaggtactacagatgcagttggtttactaaactgtttggaacagagaatacaagaacagggtgttgaatatcaagcagctatggaatgcctccagaaagcagatagaaggagtttgttatctgaaattcaggcactgcatgcacaaatgaatggtaggaaaattactctgaaaagagaacaagagagtgagaaaccaagccaagaactcttggaatataatatacagcagaagcagtctcaaatgctggagatgcaagtggagctcagcagtatgaaagacagagcaacggaactgcaggagcagctgagttctgagaaaatggtggttgctgaactgaagagtgagcttgcacaaactaaattggaactagaaacaacactcaaggcacagcataaacacctaaaagaattggaggctttcaggttggaagttaaagataagacagatgaagtacatttgcttaatgacacattagcaagtgaacagaaaaaatcaagagagctccagtgggctttggagaaagagaaagccaagttgggacgcagtgaagaacgggataaagaagaacttgaggatctgaagttttcacttgagagtcagaaacaaaggaatcttcagctaaatctacttttggaacaacagaaacaactactgaacgaatcccagcaaaaaatagaatcacagagaatgctatatgatgcccagttgtcagaagaacaaggtcgaaacttagagcttcaggtacttcttgaatctgagaaagttcgaattcgggaaatgagtagtaccctagatagggagcgggaattgcacgcacagctgcagagcagtgatggtactggacagtctcggccacccttgccctcagaggacctactgaaagagctgcagaaacagctagaggaaaaacacagtcgcatagtagaattgttaaatgagactgaaaaatataaactggattctttgcaaacacgacagcaaatggaaaaagataggcaggttcacaggaaaacactgcagacagaacaggaggccaacactgagggacagaaaaaaatgcatgagctccagtccaaagtggaagatcttcagcgccagctggaagagaaaagacaacaagtttataagttagaccttgaaggacagcgactacaaggaatcatgcaggaattccagaagcaagaactagaacgagaagaaaaacgagaaagtagaagaattctgtatcagaaccttaatgagccaaccacgtggagcttaaccagtgatagaactagaaattgggttcttcaacagaaaatagaaggagaaacaaaagaatcaaactacgctaaattgattgaaatgaatggaggaggaaccggctgtaatcatgaattagaaatgatcagacaaaagcttcaatgtgtagcttcaaaactacaggttctaccccagaaagcctctgagagactacagtttgaaacagcagatgatgaagatttcatttgggttcaggaaaatattgatgaaattattttacaactacagaaattaactggccagcaaggtgaagagcccagcttggtgtccccaagtacttcttgtggctcattgactgaaagactactgagacaaaatgctgagctgacagggcatatcagtcaactgactgaagagaagaatgacttaaggaacatggttatgaagctggaagagcagatcaggtggtatcgacagacaggagctggtagagataattcttccaggttttcattgaatggtggtgccaacattgaagccatcattgcctctgaaaaagaagtatggaacagagaaaaattgactctccagaaatctttgaaaagggcagaggctgaagtatacaaactgaaagctgaactaagaaatgactctttacttcaaactctgagccctgattctgaacatgtcactttaaagagaatttatggtaaatacttgagggcagaaagttttcgaaaggctctcatttaccagaagaaatacctgctgctgttactgggtgggttccaggaatgtgaagatgccaccttggccctgcttgcccggatgggggggcagccagctttcacggatctagaggtgatcaccaatcgcccaaagggcttcaccaggtttcggtcggccgtcagagtatccattgcaatttccagaatgaaatttttggttcgacggtggcatcgagtcacaggttctgtttccatcaatattaacagagatggctttggactgaatcaaggtgcagaaaagactgactcattttatcattcttctggtgggctggagttatatggagaaccaagacatactacgtatcgctcaagatcagatctggactatattaggtcccctttaccatttcagaataggtacccaggcactccagctgatttcaatcctggttctttagcatgttctcagcttcagaattacgatcctgacagagccctaacagattatatcactcggctagaggcactgcaaagacgacttggaactatacagtcaggttcaactactcaatttcatgctggcatgagaagataatcctttgaaacatcattaattgaagtgattttaaatagatttccttttgtaaatcaatggttcttttgtgcttttgtattgtgaatattcaatgggaccaatatgaacacagcttatgattgtatacaaatcccttgccagcacatgaaaacaaactggaatttgtatatataagcattgtgtatgtattcatgcacaataattattgaattacctgtatatttgtggaatgctaatttaaaacattaaattataaaccttgtgtatttatcaaatgggtgaaaagattaaacttttacgcattacaatactgctgaatgtgtagctcgaggtgtcctgcacttttcttataaggctactgaagttacatgttttgcctaatatattctactggtgatgaagacagataatatcacttgtagagacctatttttgtataatggtagaagttttgaattttatggggtattttgtcaagtactgaaataaaaatgacttcaccattttcaccacact

SEQ ID NO: 13041 - DNA, 6058 bp, Homo sapiens
gaagatggcggcggcggcggcggtgacggcgcttcccgtgcggctgaggacgatccgccagtgagcgcggagactgcttccacttcgggcgggggagcgccggaccgaatcggctctctaggccgtggagcttgccgtcccacctccgtccaaatcgacctttcctttctatccccaaccacccctcaacccctgttttcccctgccttccttgcagaggccatggaggacgaggagagacagaagaagctggaggccggcaaagccaagattgaagaactctctttagcttttcttgtcagacagcttgcccagtttcgacaaagaaaagctcagtcggatgggcagagtccttccaagaagcagaaaaaaaagagaaaaacgtcaagcagtaaacatgatgtgtcagcacaccatgatttgaatattgatcaatcacagtgtaatgaaatgtacataaatagttctcagagagtagaatcaactgtgattcctgaatctacaataatgagaactctacatagtggagaaataaccagtcatgagcagggcttctctgtggaactggaaagtgaaatttcaaccacagcagatgactgcagttcagaggtaaatggttgcagttttgtgatgagaacaggaaagcctacaaatttattaagggaagaagaatttggtgttgatgattcttattctgaacaaggagcacaagacagtccgactcatctagagatgatggaaagtgagttggctgggaagcagcatgagattgaagagctaaacagagagctggaagaaatgagggttacctatgggactgaaggactgcagcagttacaagaatttgaagctgccattaaacaaagagatggcattataacccagctcactgctaatttacaacaagcaagaagagaaaaggatgagacaatgagagaatttttagagttgacagaacagagtcaaaaattacagattcaatttcagcaattacaggctagtgaaactctgagaaacagcactcatagtagcacagctgcagacttactacaagccaaacaacagatcctcactcatcaacagcagcttgaagaacaagaccacttattagaagattatcagaaaaagaaagaagacttcacaatgcaaattagtttcttgcaagagaaaattaaagtatatgaaatggaacaagataaaaaagtagaaaactcaaataaagaagaaatacaggaaaaggagacaatcattgaagaattaaacacaaaaataatagaagaagaaaagaaaactcttgagctaaaggataaattaacaactgctgataaattactaggagaattacaagaacagattgtgcaaaagaaccaagaaataaaaaacatgaaattagagctgactaattctaagcaaaaagaaagacagtcttctgaagaaataaaacagttaatggggacagtcgaagaacttcagaagagaaatcataaagacagccagttcgaaactgatatagtacaacgaatggaacaagaaacacaaagaaagttagaacaactccgggcagagctggatgagatgtatgggcagcagatagtgcaaatgaaacaagaattaataagacaacacatggcacagatggaggaaatgaaaacacggcataagggagaaatggagaatgctttaaggtcatattcaaatattacagttaatgaagatcagataaagttaatgaatgtggcaataaatgaactgaatataaaattgcaagatactaactctcaaaaggaaaaactcaaggaagaactaggactaattttagaagaaaagtgtgctctacagagacagcttgaagaccttgttgaagaattgagcttttcaagggaacagattcagagagctagacagacaatagctgaacaagaaagtaaacttaatgaagcacataagtcccttagtacagtggaagatttgaaagctgagattgtttctgcatctgaatccagaaaggaactagaattaaaacatgaagcagaagttacaaattacaagataaaacttgaaatgttagaaaaagaaaagaatgctgtgttagacagaatggctgaatcacaagaagctgaattagagaggctgagaacacagcttctatttagtcacgaagaagagctttccaaactgaaggaagatttagaaattgaacatcgaataaatattgaaaaacttaaagataatttaggcattcactataaacagcagatagatggtttacagaatgaaatgagtcaaaagatagaaaccatgcagtttgaaaaggacaatttgataactaagcagaatcaattaattttggaaatttcaaagctaaaagatttacagcagtctcttgtaaattcaaagtcagaagaaatgactcttcaaatcaatgaacttcaaaaagaaattgaaatactcagacaagaagaaaaagaaaagggtacacttgaacaagaagttcaagaattacaacttaaaacagaattgttagaaaaacagatgaaggaaaaagagaatgatcttcaagaaaaatttgcacaacttgaagcagagaatagcattcttaaagatgaaaagaaaacccttgaagacatgttgaaaatacatactcctgttagccaagaagaaagattgattttcttagactccattaagtccaaatccaaagactctgtgtgggaaaaagaaatagaaatacttatagaggaaaatgaggacctcaaacaacaatgtattcagctaaatgaagagattgaaaagcaaaggaacactttttcatttgctgaaaaaaactttgaagttaactatcaagagttacaagaggagtatgcttgccttctcaaagtaaaagatgatttagaagacagtaaaaataaacaggaattagagtataaaagtaaacttaaagcacttaatgaagagcttcatttgcaaagaataaatccaactacagtgaaaatgaaaagttctgtctttgatgaagacaaaacttttgtagcagaaacattggaaatgggtgaggttgttgaaaaggatacaacagaactcatggaaaaacttgaggtaaccaagcgagagaaattagagctgtcacagagactgtctgatctttctgaacaattgaaacagaaacatggtgagattagttttctaaatgaagaagttaaatctttaaagcaagagaaagaacaagtttcattgagatgtagagagctagaaatcattattaaccacaacagggcagaaaatgtacagtcatgtgatactcaagtaagctctttattagatggagttgtgaccatgacaagcaggggtgctgaaggatcagtttctaaagtaaataaaagttttggtgaagaatcaaaaataatggtggaagataaagtttcttttgaaaatatgactgttggagaagaaagtaagcaagaacagttgattttggatcacttaccatctgtaacaaaggaatcatcacttagagcaactcaaccaagtgaaaatgataaacttcagaaagaactcaatgtacttaaatcagaacagaatgatttaaggctacagatggaagcccaacgcatttgcctctctctggtttattcaactcatgtggatcaggttcgtgaatatatggaaaatgaaaaagataaagctctttgcagtcttaaagaagagcttatttttgctcaagaggaaaagatcaaggaacttcagaaaatacaccagttagaactacagactatgaaaacacaagaaacaggtgatgaaggaaagcctttacatctgctcattggaaaacttcaaaaggcagtgtctgaagaatgttcttattttttacagactttatgcagtgtccttggtgaatattatactcctgctttaaaatgtgaagtaaatgcagaagacaaagagaattctggtgattacatttctgaaaatgaagatccagaattacaagattatagatatgaagttcaagactttcaagaaaatatgcacactcttctcaacaaagtaacagaagaatacaacaaactcttggtacttcaaacacgactaagcaagatctggggacagcagacagatggtatgaaacttgaatttggagaagaaaaccttccaaaagaggaaacagagtttttatcaatccattctcagatgaccaatttggaagacattgatgtcaatcataaaagcaagttatcttctctgcaagatcttgaaaaaactaaacttgaagaacaagttcaagaattagaaagcctcatatcctctttgcagcaacagttgaaagaaactgaacaaaactatgaggcagagatccactgtttacagaagaggcttcaagctgttagtgagtccacggttccgccaagcttacctgttgattcggtggtaattacagaatctgatgcacagagaacaatgtaccctggaagttgtgtgaaaaagaatattgatggtacaatagagttttctggtgaatttggagtgaaagaggaaacaaatatcgttaagttgcttgaaaaacaataccaagaacaattagaagaagaagtagctaaggttattgtgtcaatgagtatagcatttgctcaacaaactgaactgtctagaatatctgggggaaaagaaaatactgcatcatcaaagcaagcacatgctgtgtgtcagcaagaacaacattattttaatgaaatgaaattatcacaggatcaaattggttttcagacttttgagacagtggatgtgaaatttaaagaagaatttaaaccacttagtaaagagttaggagaacatggaaaggaaattttattatcaaatagtgatccccatgatataccagaatcaaaggactgtgtgctgactatttcagaagaaatgttctccaaagataaaacatttatagttagacagtctattcatgatgagatttcagtgtcaagcatggatgcttctagacaactaatgttgaatgaagaacagttggaagatatgagacaggaacttgtacgacaataccaagaacatcaacaggcaacggaattgttaaggcaagcacatatgcggcaaatggagagacagcgagaagaccaggaacagctacaagaagagattaagagacttaatagacaattagcccaggtaagggtcttgtagtcccctttctctccccagttatttttttttccaaacaccaacttgaaccagatccccaattaaaacaacagtattttttatgtagccataatttttttttttttttgccgaaatctgaataaactacatatatttagcatcaggaacacactctatactaagacagcagctttagatcttgttagggacacctatctcaaccttggagtgggcattgtctttctgtcattttatttaactcctttttcaagcactggaaaagtggctacacggttttgtttttttcttttaaatcattccattagccatatatagcaaactcactttgacattttggaaataacattgtgctgaggtgctccattatgcagttactatcattcagttttactatcttcatttatagttttgtgagtccaccaattagcatctcgaaggtttacctttatctgtctttaatccatctttttaatcatgaatggaaatcggaagtagtatgcttctgaaactctttccagggaaacatctcttcttgatttgagaaatgcaaatttatttaacattcttatccctttcttgactaaatttaaatacttcttggtatttgggagctggattcttgtcaactgctgtataaaatatactcacaaaaccattgcagaaaagcaagaaatatttatgtagaagttcttatgaaaacttattgaatttaattttgaaaactgaagctaagagagataataaatatctagagataactattaacagtattctttcaaacataaaataataagataattgggagctgagcataaaacattatttggaaaaattaactttgcttttcttcattgcattttgtgaattc

SEQ ID NO: 13042 - DNA, 12462 bp, Homo sapiens
gaagatggcggcggcggcggcggtgacggcgcttcccgtgcggctgaggacgatccgccagtgagcgcggagactgcttccacttcgggcgggggagcgccggaccgaatcggctctctaggccgtggagcttgccgtcccacctccgtccaaatcgacctttcctttctatccccaaccacccctcaacccctgttttcccctgccttccttgcagaggccatggaggacgaggagagacagaagaagctggaggccggcaaagccaagcttgcccagtttcgacaaagaaaagctcagtcggatgggcagagtccttccaagaagcagaaaaaaaagagaaaaacgtcaagcagtaaacatgatgtgtcagcacaccatgatttgaatattgatcaatcacagtgtaatgaaatgtacataaatagttctcagagagtagaatcaactgtgattcctgaatctacaataatgagaactctacatagtggagaaataaccagtcatgagcagggcttctctgtggaactggaaagtgaaatttcaaccacagcagatgactgcagttcagaggtaaatggttgcagttttgtgatgagaacaggaaagcctacaaatttattaagggaagaagaatttggtgttgatgattcttattctgaacaaggagcacaagacagtccgactcatctagagatgatggaaagtgagttggctgggaagcagcatgagattgaagagctaaacagagagctggaagaaatgagggttacctatgggactgaaggactgcagcagttacaagaatttgaagctgccattaaacaaagagatggcattataacccagctcactgctaatttacaacaagcaagaagagaaaaggatgagacaatgagagaatttttagagttgacagaacagagtcaaaaattacagattcaatttcagcaattacaggctagtgaaactctgagaaacagcactcatagtagcacagctgcagacttactacaagccaaacaacagatcctcactcatcaacagcagcttgaagaacaagaccacttattagaagattatcagaaaaagaaagaagacttcacaatgcaaattagtttcttgcaagagaaaattaaagtatatgaaatggaacaagataaaaaagtagaaaactcaaataaagaagaaatacaggaaaaggagacaatcattgaagaattaaacacaaaaataatagaagaagaaaagaaaactcttgagctaaaggataaattaacaactgctgataaattactaggagaattacaagaacagattgtgcaaaagaaccaagaaataaaaaacatgaaattagagctgactaattctaagcaaaaagaaagacagtcttctgaagaaataaaacagttaatggggacagtcgaagaacttcagaagagaaatcataaagacagccagttcgaaactgatatagtacaacgaatggaacaagaaacacaaagaaagttagaacaactccgggcagagctggatgagatgtatgggcagcagatagtgcaaatgaaacaagaattaataagacaacacatggcacagatggaggaaatgaaaacacggcataagggagaaatggagaatgctttaaggtcatattcaaatattacagttaatgaagatcagataaagttaatgaatgtggcaataaatgaactgaatataaaattgcaagatactaactctcaaaaggaaaaactcaaggaagaactaggactaattttagaagaaaagtgtgctctacagagacagcttgaagaccttgttgaagaattgagcttttcaagggaacagattcagagagctagacagacaatagctgaacaagaaagtaaacttaatgaagcacataagtcccttagtacagtggaagatttgaaagctgagattgtttctgcatctgaatccagaaaggaactagaattaaaacatgaagcagaagttacaaattacaagataaaacttgaaatgttagaaaaagaaaagaatgctgtgttagacagaatggctgaatcacaagaagctgaattagagaggctgagaacacagcttctatttagtcacgaagaagagctttccaaactgaaggaagatttagaaattgaacatcgaataaatattgaaaaacttaaagataatttaggcattcactataaacagcagatagatggtttacagaatgaaatgagtcaaaagatagaaaccatgcagtttgaaaaggacaatttgataactaagcagaatcaattaattttggaaatttcaaagctaaaagatttacagcagtctcttgtaaattcaaagtcagaagaaatgactcttcaaatcaatgaacttcaaaaagaaattgaaatactcagacaagaagaaaaagaaaagggtacacttgaacaagaagttcaagaattacaacttaaaacagaattgttagaaaaacagatgaaggaaaaagagaatgatcttcaagaaaaatttgcacaacttgaagcagagaatagcattcttaaagatgaaaagaaaacccttgaagacatgttgaaaatacatactcctgttagccaagaagaaagattgattttcttagactccattaagtccaaatccaaagactctgtgtgggaaaaagaaatagaaatacttatagaggaaaatgaggacctcaaacaacaatgtattcagctaaatgaagagattgaaaagcaaaggaacactttttcatttgctgaaaaaaactttgaagttaactatcaagagttacaagaggagtatgcttgccttctcaaagtaaaagatgatttagaagacagtaaaaataaacaggaattagagtataaaagtaaacttaaagcacttaatgaagagcttcatttgcaaagaataaatccaactacagtgaaaatgaaaagttctgtctttgatgaagacaaaacttttgtagcagaaacattggaaatgggtgaggttgttgaaaaggatacaacagaactcatggaaaaacttgaggtaaccaagcgagagaaattagagctgtcacagagactgtctgatctttctgaacaattgaaacagaaacatggtgagattagttttctaaatgaagaagttaaatctttaaagcaagagaaagaacaagtttcattgagatgtagagagctagaaatcattattaaccacaacagggcagaaaatgtacagtcatgtgatactcaagtaagctctttattagatggagttgtgaccatgacaagcaggggtgctgaaggatcagtttctaaagtaaataaaagttttggtgaagaatcaaaaataatggtggaagataaagtttcttttgaaaatatgactgttggagaagaaagtaagcaagaacagttgattttggatcacttaccatctgtaacaaaggaatcatcacttagagcaactcaaccaagtgaaaatgataaacttcagaaagaactcaatgtacttaaatcagaacagaatgatttaaggctacagatggaagcccaacgcatttgcctctctctggtttattcaactcatgtggatcaggttcgtgaatatatggaaaatgaaaaagataaagctctttgcagtcttaaagaagagcttatttttgctcaagaggaaaagatcaaggaacttcagaaaatacaccagttagaactacagactatgaaaacacaagaaacaggtgatgaaggaaagcctttacatctgctcattggaaaacttcaaaaggcagtgtctgaagaatgttcttattttttacagactttatgcagtgtccttggtgaatattatactcctgctttaaaatgtgaagtaaatgcagaagacaaagagaattctggtgattacatttctgaaaatgaagatccagaattacaagattatagatatgaagttcaagactttcaagaaaatatgcacactcttctcaacaaagtaacagaagaatacaacaaactcttggtacttcaaacacgactaagcaagatctggggacagcagacagatggtatgaaacttgaatttggagaagaaaaccttccaaaagaggaaacagagtttttatcaatccattctcagatgaccaatttggaagacattgatgtcaatcataaaagcaagttatcttctctgcaagatcttgaaaaaactaaacttgaagaacaagttcaagaattagaaagcctcatatcctctttgcagcaacagttgaaagaaactgaacaaaactatgaggcagagatccactgtttacagaagaggcttcaagctgttagtgagtccacggttccgccaagcttacctgttgattcggtggtaattacagaatctgatgcacagagaacaatgtaccctggaagttgtgtgaaaaagaatattgatggtacaatagagttttctggtgaatttggagtgaaagaggaaacaaatatcgttaagttgcttgaaaaacaataccaagaacaattagaagaagaagtagctaaggttattgtgtcaatgagtatagcatttgctcaacaaactgaactgtctagaatatctgggggaaaagaaaatactgcatcatcaaagcaagcacatgctgtgtgtcagcaagaacaacattattttaatgaaatgaaattatcacaggatcaaattggttttcagacttttgagacagtggatgtgaaatttaaagaagaatttaaaccacttagtaaagagttaggagaacatggaaaggaaattttattatcaaatagtgatccccatgatataccagaatcaaaggactgtgtgctgactatttcagaagaaatgttctccaaagataaaacatttatagttagacagtctattcatgatgagatttcagtgtcaagcatggatgcttctagacaactaatgttgaatgaagaacagttggaagatatgagacaggaacttgtacgacaataccaagaacatcaacaggcaacggaattgttaaggcaagcacatatgcggcaaatggagagacagcgagaagaccaggaacagctacaagaagagattaagagacttaatagacaattagcccagagatcctccatagataatgaaaacctggtttcagagagagagagggtgcttttagaggagctggaagcactaaagcagctgtctttagctggaagagagaagctgtgttgtgagctgcgcaacagcagtacgcaaacacagaatggaaatgaaaaccaaggagaagttgaagaacaaacatttaaagaaaaggaattagacagaaaacctgaagatgtgcctcctgagattttgtctaatgaaaggtatgcactccagaaagctaataatagacttttgaagatcctcttagaagttgtaaagacaacagcagctgttgaagaaacaattggtcgccatgtccttgggattctagatagatctagtaaaagccagtcatctgccagcctaatttggaggtcagaagcagaggcatctgtaaagtcatgtgtccatgaggaacatacaagagttacagatgaatccattccctcttattctggaagtgatatgccaagaaatgacattaacatgtggtcaaaagtaactgaggaaggaacagagctgtcacaacgacttgtgaggagtggttttgctggaactgaaatagaccctgaaaatgaagaacttatgctgaacattagctctcgactacaagcagcagttgaaaaactcctagaagccataagtgaaactagcagtcagcttgaacatgcgaaagtgacacagacagagttgatgcgtgagtcatttagacagaaacaagaagcaacagagtcccttaagtgccaagaggaacttcgagagcgccttcatgaggagtccagggccagagaacagctagctgtggagctcagtaaggctgagggcgtcattgatggctatgcagatgaaaaaactctttttgaaaggcaaattcaggaaaaaactgatataatagatcgtcttgagcaggagttgttatgtgcaagtaacaggttgcaagaattggaggcagagcaacagcagatccaagaagaaagagaattactgtccagacaaaaggaagctatgaaagcagaggcaggcccagttgaacaacaattactacaggagacagaaaaattaatgaaggaaaaactagaagtacaatgtcaagctgaaaaagtacgtgatgaccttcaaaaacaagtgaaagctctagaaatagatgtggaagaacaagtcagtaggtttatagagctggaacaagaaaaaaatactgaactaatggatttaagacagcaaaaccaagcattggaaaagcagttagaaaaaatgagaaaatttttagatgagcaagccattgacagagaacatgagagagatgtattccaacaggaaatacagaaactagaacagcaacttaaggttgttcctcgattccagcctatcagtgaacatcaaactagagaggttgaacagttagcaaatcatctgaaagaaaaaacagacaaatgcagtgagcttttgctctctaaagagcagcttcaaagggatatacaagaaaggaatgaagaaatagagaaactggagttcagagtaagagaactggagcaggcgcttcttgtgagtgcagatacttttcaaaaggtagaggaccgaaaacactttggagctgtagaagctaaaccagaattgtccctagaagtacaattgcaggctgaacgagatgccatagacagaaaggaaaaagagattacaaacttagaagagcaattagaacagtttagagaagaactggaaaataagaatgaagaagttcaacaattacatatgcaattagaaatacagaaaaaggaatctactacccgcctacaagaacttgaacaggaaaacaaattatttaaggatgacatggagaaactgggacttgccataaaggaatctgatgccatgtctactcaagaccaacatgtgctatttgggaaatttgctcaaataatacaggaaaaagaggtagaaattgaccaattaaatgaacaagttacgaaactccagcagcaacttaaaattacaacagataacaaggttattgaagaaaaaaatgaactgataagggatcttgaaacccaaatagaatgtttgatgagtgatcaagaatgtgtgaagagaaatagagaagaagaaatagagcagctcaatgaagtgattgaaaaacttcaacaggaattggcaaatattggacagaagacatcaatgaatgctcattccctctcagaagaagcagacagtttaaaacatcaattggatgtggttatagctgaaaagctggccttggaacagcaagtagaaaccgctaatgaagaaatgaccttcatgaaaaatgtacttaaagaaaccaattttaaaatgaatcagctaacacaggaattattcagcttaaagagagaacgtgaaagtgtggaaaagattcaaagcataccagagaatagtgttaacgtggctatagatcatctgagcaaagacaaacctgaactagaagtagtccttacagaggatgctcttaaatccctagaaaatcagacatacttcaaatcttttgaagaaaatggcaaaggttccataattaatttggaaacaaggttgctacaacttgagagcactgttagtgcaaaggacttagaacttacccagtgttataaacaaataaaagacatgcaagaacaaggccagtttgaaacagaaatgcttcaaaagaagattgtaaacctacagaaaatagttgaagaaaaagtggctgctgctcttgtcagtcaaatccaacttgaggcagttcaggaatatgcaaaattctgtcaagataatcaaacaatttcatcagaacctgaaagaacaaatattcagaatttaaatcaactaagagaagatgagttggggtcagatatatcagcattaaccttgagaatatcagaattagaaagccaggttgttgaaatgcatactagtttgattttagaaaaagaacaagtagaaattgcagaaaaaaatgttttagaaaaagaaaagaagctgctagaactacagaagctattggagggcaatgagaaaaaacagagagagaaagaaaagaaaagaagccctcaagatgttgaagttctcaagacaactactgagctatttcatagcaatgaagaaagtggattttttaatgaactcgaggctcttagagctgaatcagtggctaccaaagcagaacttgccagttataaagaaaaggctgaaaaacttcaagaagagcttttggtaaaagaaacaaatatgacatctcttcagaaagacttaagccaagttagggatcacctcgcagaggcaaaagagaaattgtccattttagaaaaagaagatgagactgaggtacaagaaagcaaaaaggcctgcatgtttgagccacttcctataaaactgagtaagagcattgcatcccagacagatgggactctgaagatcagtagcagcaatcagactccacaaattcttgttaaaaatgcaggaatacaaattaatttacagagtgaatgttcctcagaagaagttactgaaataatcagtcagtttactgaaaaaattgagaagatgcaagaactacatgctgctgaaattttggacatggaatccagacatatttcagaaactgaaaccttaaagagggaacactatgttgccgttcagttactgaaagaggaatgtggtaccttgaaggcagtgatacagtgtctgagaagtaaagagggatcctcaattcctgagctagcacattctgatgcttaccagactagagaaatatgctccagtgattctggatcagactggggtcagggaatttatcttacacacagtcagggatttgacatagcatcagaaggccgaggagaagaaagtgaaagtgcaacagattcctttccaaagaaaataaagggattactgagagctgtccataatgaaggcatgcaggtgctttctctcactgagtctccctatagtgatggagaggaccattctattcagcaggtttcagaaccttggctagaagagagaaaagcttacatcaatacaatctcatctctaaaggatttaattacaaagatgcaactgcaaagagaagccgaggtttatgatagttctcaatctcatgagagcttctcagactggcgaggtgaactactgcttgcccttcaacaagttttcttagaagagcgtagtgttttactagcagcatttcggacggagctgacagctctaggtactacagatgcagttggtttactaaactgtttggaacagagaatacaagaacagggtgttgaatatcaagcagctatggaatgcctccagaaagcagatagaaggagtttgttatctgaaattcaggcactgcatgcacaaatgaatggtaggaaaattactctgaaaagagaacaagagagtgagaaaccaagccaagaactcttggaatataatatacagcagaagcagtctcaaatgctggagatgcaagtggagctcagcagtatgaaagacagagcaacggaactgcaggagcagctgagttctgagaaaatggtggttgctgaactgaagagtgagcttgcacaaactaaattggaactagaaacaacactcaaggcacagcataaacacctaaaagaattggaggctttcaggttggaagttaaagataagacagatgaagtacatttgcttaatgacacattagcaagtgaacagaaaaaatcaagagagctccagtgggctttggagaaagagaaagccaagttgggacgcagtgaagaacgggataaagaagaacttgaggatctgaagttttcacttgagagtcagaaacaaaggaatcttcagctaaatctacttttggaacaacagaaacaactactgaacgaatcccagcaaaaaatagaatcacagagaatgctatatgatgcccagttgtcagaagaacaaggtcgaaacttagagcttcaggtacttcttgaatctgagaaagttcgaattcgggaaatgagtagtaccctagatagggagcgggaattgcacgcacagctgcagagcagtgatggtactggacagtctcggccacccttgccctcagaggacctactgaaagagctgcagaaacagctagaggaaaaacacagtcgcatagtagaattgttaaatgagactgaaaaatataaactggattctttgcaaacacgacagcaaatggaaaaagataggcaggttcacaggaaaacactgcagacagaacaggaggccaacactgagggacagaaaaaaatgcatgagctccagtccaaagtggaagatcttcagcgccagctggaagagaaaagacaacaagtttataagttagaccttgaaggacagcgactacaaggaatcatgcaggaattccagaagcaagaactagaacgagaagaaaaacgagaaagtagaagaattctgtatcagaaccttaatgagccaaccacgtggagcttaaccagtgatagaactagaaattgggttcttcaacagaaaatagaaggagaaacaaaagaatcaaactacgctaaattgattgaaatgaatggaggaggaaccggctgtaatcatgaattagaaatgatcagacaaaagcttcaatgtgtagcttcaaaactacaggttctaccccagaaagcctctgagagactacagtttgaaacagcagatgatgaagatttcatttgggttcaggaaaatattgatgaaattattttacaactacagaaattaactggccagcaaggtgaagagcccagcttggtgtccccaagtacttcttgtggctcattgactgaaagactactgagacaaaatgctgagctgacagggcatatcagtcaactgactgaagagaagaatgacttaaggaacatggttatgaagctggaagagcagatcaggtggtatcgacagacaggagctggtagagataattcttccaggttttcattgaatggtggtgccaacattgaagccatcattgcctctgaaaaagaagtatggaacagagaaaaattgactctccagaaatctttgaaaagggcagaggctgaagtatacaaactgaaagctgaactaagaaatgactctttacttcaaactctgagccctgattctgaacatgtcactttaaagagaatttatggtaaatacttgagggcagaaagttttcgaaaggctctcatttaccagaagaaatacctgctgctgttactgggtgggttccaggaatgtgaagatgccaccttggccctgcttgcccggatgggggggcagccagctttcacggatctagaggtgatcaccaatcgcccaaagggcttcaccaggtttcggtcggccgtcagagtatccattgcaatttccagaatgaaatttttggttcgacggtggcatcgagtcacaggttctgtttccatcaatattaacagagatggctttggactgaatcaaggtgcagaaaagactgactcattttatcattcttctggtgggctggagttatatggagaaccaagacatactacgtatcgctcaagatcagatctggactatattaggtcccctttaccatttcagaataggtacccaggcactccagctgatttcaatcctggttctttagcatgttctcagcttcagaattacgatcctgacagagccctaacagattatatcactcggctagaggcactgcaaagacgacttggaactatacagtcaggttcaactactcaatttcatgctggcatgagaagataatcctttgaaacatcattaattgaagtgattttaaatagatttccttttgtaaatcaatggttcttttgtgcttttgtattgtgaatattcaatgggaccaatatgaacacagcttatgattgtatacaaatcccttgccagcacatgaaaacaaactggaatttgtatatataagcattgtgtatgtattcatgcacaataattattgaattacctgtatatttgtggaatgctaatttaaaacattaaattataaaccttgtgtatttatcaaatgggtgaaaagattaaacttttacgcattacaatactgctgaatgtgtagctcgaggtgtcctgcacttttcttataaggctactgaagttacatgttttgcctaatatattctactggtgatgaagacagataatatcacttgtagagacctatttttgtataatggtagaagttttgaattttatggggtattttgtcaagtactgaaataaaaatgacttcaccattttcaccacact

SEQ ID NO: 13043 - DNA, 3097 bp, Homo sapiens
cccccgagggacatgagagaagaggagcggcgctcaggttattccaggatctttggagacccgaggaaagccgtgttgaccaaaagcaagacaaatgactcacagagaaaaaagatggcagaaccaagggcaactaaagccgtcaggttctgaacagctggtagatgggctggcttactgaaggacatgattcagactgtcccggacccagcagctcatatcaaggaagccttatcagttgtgagtgaggaccagtcgttgtttgagtgtgcctacggaacgccacacctggctaagacagagatgaccgcgtcctcctccagcgactatggacagacttccaagatgagcccacgcgtccctcagcaggattggctgtctcaacccccagccagggtcaccatcaaaatggaatgtaaccctagccaggtgaatggctcaaggaactctcctgatgaatgcagtgtggccaaaggcgggaagatggtgggcagcccagacaccgttgggatgaactacggcagctacatggaggagaagcacatgccacccccaaacatgaccacgaacgagcgcagagttatcgtgccagcagatcctacgctatggagtacagaccatgtgcggcagtggctggagtgggcggtgaaagaatatggccttccagacgtcaacatcttgttattccagaacatcgatgggaaggaactgtgcaagatgaccaaggacgacttccagaggctcacccccagctacaacgccgacatccttctctcacatctccactacctcagagagactcctcttccacatttgacttcagatgatgttgataaagccttacaaaactctccacggttaatgcatgctagaaacacagatttaccatatgagccccccaggagatcagcctggaccggtcacggccaccccacgccccagtcgaaagctgctcaaccatctccttccacagtgcccaaaactgaagaccagcgtcctcagttagatccttatcagattcttggaccaacaagtagccgccttgcaaatccaggcagtggccagatccagctttggcagttcctcctggagctcctgtcggacagctccaactccagctgcatcacctgggaaggcaccaacggggagttcaagatgacggatcccgacgaggtggcccggcgctggggagagcggaagagcaaacccaacatgaactacgataagctcagccgcgccctccgttactactatgacaagaacatcatgaccaaggtccatgggaagcgctacgcctacaagttcgacttccacgggatcgcccaggccctccagccccaccccccggagtcatctctgtacaagtacccctcagacctcccgtacatgggctcctatcacgcccacccacagaagatgaactttgtggcgccccaccctccagccctccccgtgacatcttccagtttttttgctgccccaaacccatactggaattcaccaactgggggtatataccccaacactaggctccccaccagccatatgccttctcatctgggcacttactactaaagacctggcggaggcttttcccatcagcgtgcattcaccagcccatcgccacaaactctatcggagaacatgaatcaaaagtgcctcaagaggaatgaaaaaagctttactggggctggggaaggaagccggggaagagatccaaagactcttgggagggagttactgaagtcttactacagaaatgaggaggatgctaaaaatgtcacgaatatggacatatcatctgtggactgaccttgtaaaagacagtgtatgtagaagcatgaagtcttaaggacaaagtgccaaagaaagtggtcttaagaaatgtataaactttagagtagagtttggaatcccactaatgcaaactgggatgaaactaaagcaatagaaacaacacagttttgacctaacataccgtttataatgccattttaaggaaaactacctgtatttaaaaatagaaacatatcaaaaacaagagaaaagacacgagagagactgtggcccatcaacagacgttgatatgcaactgcatggcatgtgctgttttggttgaaatcaaatacattccgtttgatggacagctgtcagctttctcaaactgtgaagatgacccaaagtttccaactcctttacagtattaccgggactatgaactaaaaggtgggactgaggatgtgtatagagtgagcgtgtgattgtagacagaggggtgaagaaggaggaggaagaggcagagaaggaggagaccaggctgggaaagaaacttctcaagcaatgaagactggactcaggacatttggggactgtgtacaatgagttatggagactcgagggttcatgcagtcagtgttataccaaacccagtgttaggagaaaggacacagcgtaatggagaaagggaagtagtagaattcagaaacaaaaatgcgcatctctttctttgtttgtcaaatgaaaattttaactggaattgtctgatatttaagagaaacattcaggacctcatcattatgtgggggctttgttctccacagggtcaggtaagagatggccttcttggctgccacaatcagaaatcacgcaggcattttgggtaggcggcctccagttttcctttgagtcgcgaacgctgtgcgtttgtcagaatgaagtatacaagtcaatgtttttccccctttttatataataattatataacttatgcatttatacactacgagttgatctcggccagccaaagacacacgacaaaagagacaatcgatataatgtggccttgaattttaactctgtatgcttaatgtttacaatatgaagttattagttcttagaatgcagaatgtatgtaataaaataagcttggcctagcatggcaaatcagatttatacaggagtctgcatttgcactttttttagtgactaaagttgcttaatgaaaacatgtgctgaatgttgtggattttgtgttataatttactttgtccaggaacttgtgcaagggagagccaaggaaataggatgtttggcaccc

SEQ ID NO: 13044 - DNA, 3055 bp, Homo sapiens
gctctaaacaacctcatcaaaactactttctggtcagagagaagcaataattattattaacatttattaacgatcaataaacttgatcgcattatggccagcactattaaggaagccttatcagttgtgagtgaggaccagtcgttgtttgagtgtgcctacggaacgccacacctggctaagacagagatgaccgcgtcctcctccagcgactatggacagacttccaagatgagcccacgcgtccctcagcaggattggctgtctcaacccccagccagggtcaccatcaaaatggaatgtaaccctagccaggtgaatggctcaaggaactctcctgatgaatgcagtgtggccaaaggcgggaagatggtgggcagcccagacaccgttgggatgaactacggcagctacatggaggagaagcacatgccacccccaaacatgaccacgaacgagcgcagagttatcgtgccagcagatcctacgctatggagtacagaccatgtgcggcagtggctggagtgggcggtgaaagaatatggccttccagacgtcaacatcttgttattccagaacatcgatgggaaggaactgtgcaagatgaccaaggacgacttccagaggctcacccccagctacaacgccgacatccttctctcacatctccactacctcagagagactcctcttccacatttgacttcagatgatgttgataaagccttacaaaactctccacggttaatgcatgctagaaacacagggggtgcagcttttattttcccaaatacttcagtatatcctgaagctacgcaaagaattacaactaggccagatttaccatatgagccccccaggagatcagcctggaccggtcacggccaccccacgccccagtcgaaagctgctcaaccatctccttccacagtgcccaaaactgaagaccagcgtcctcagttagatccttatcagattcttggaccaacaagtagccgccttgcaaatccaggcagtggccagatccagctttggcagttcctcctggagctcctgtcggacagctccaactccagctgcatcacctgggaaggcaccaacggggagttcaagatgacggatcccgacgaggtggcccggcgctggggagagcggaagagcaaacccaacatgaactacgataagctcagccgcgccctccgttactactatgacaagaacatcatgaccaaggtccatgggaagcgctacgcctacaagttcgacttccacgggatcgcccaggccctccagccccaccccccggagtcatctctgtacaagtacccctcagacctcccgtacatgggctcctatcacgcccacccacagaagatgaactttgtggcgccccaccctccagccctccccgtgacatcttccagtttttttgctgccccaaacccatactggaattcaccaactgggggtatataccccaacactaggctccccaccagccatatgccttctcatctgggcacttactactaaagacctggcggaggcttttcccatcagcgtgcattcaccagcccatcgccacaaactctatcggagaacatgaatcaaaagtgcctcaagaggaatgaaaaaagctttactggggctggggaaggaagccggggaagagatccaaagactcttgggagggagttactgaagtcttactacagaaatgaggaggatgctaaaaatgtcacgaatatggacatatcatctgtggactgaccttgtaaaagacagtgtatgtagaagcatgaagtcttaaggacaaagtgccaaagaaagtggtcttaagaaatgtataaactttagagtagagtttggaatcccactaatgcaaactgggatgaaactaaagcaatagaaacaacacagttttgacctaacataccgtttataatgccattttaaggaaaactacctgtatttaaaaatagaaacatatcaaaaacaagagaaaagacacgagagagactgtggcccatcaacagacgttgatatgcaactgcatggcatgtgctgttttggttgaaatcaaatacattccgtttgatggacagctgtcagctttctcaaactgtgaagatgacccaaagtttccaactcctttacagtattaccgggactatgaactaaaaggtgggactgaggatgtgtatagagtgagcgtgtgattgtagacagaggggtgaagaaggaggaggaagaggcagagaaggaggagaccaggctgggaaagaaacttctcaagcaatgaagactggactcaggacatttggggactgtgtacaatgagttatggagactcgagggttcatgcagtcagtgttataccaaacccagtgttaggagaaaggacacagcgtaatggagaaagggaagtagtagaattcagaaacaaaaatgcgcatctctttctttgtttgtcaaatgaaaattttaactggaattgtctgatatttaagagaaacattcaggacctcatcattatgtgggggctttgttctccacagggtcaggtaagagatggccttcttggctgccacaatcagaaatcacgcaggcattttgggtaggcggcctccagttttcctttgagtcgcgaacgctgtgcgtttgtcagaatgaagtatacaagtcaatgtttttccccctttttatataataattatataacttatgcatttatacactacgagttgatctcggccagccaaagacacacgacaaaagagacaatcgatataatgtggccttgaattttaactctgtatgcttaatgtttacaatatgaagttattagttcttagaatgcagaatgtatgtaataaaataagcttggcctagcatggcaaatcagatttatacaggagtctgcatttgcactttttttagtgactaaagttgcttaatgaaaacatgtgctgaatgttgtggattttgtgttataatttactttgtccaggaacttgtgcaagggagagccaaggaaataggatgtttggcaccc

SEQ ID NO: 13045 - DNA, 1769 bp, Homo sapiens
gcccacgtctggttcaggggctagaaaagagcgtcgatgccggcggcagtgatgagtcctaggaggcgctggctctttggcggctcggaggagcggctgctgctgctgctgctgctgctggtggcccctttgcagatgtattgctgtccttgaatattagcccatttgaaaacgcctgggaagttcagccatcagtatgtccaagtacaaacttattatgttaagacatggagagggtgcttggaataaggagaaccgtttttgtagctgggtggatcagaaactcaacagcgaaggaatggaggaagctcggaactgtgggaagcaactcaaagcgttaaactttgagtttgatcttgtattcacatctgtccttaatcggtccattcacacagcctggctgatcctggaagagctaggccaggaatgggtgcctgtggaaagctcctggcgtctaaatgagcgtcactatggggccttgatcggtctcaacagggagcagatggctttgaatcatggtgaagaacaagtgaggctctggagaagaagctacaatgtaaccccgcctcccattgaggagtctcatccttactaccaagaaatctacaacgaccggaggtataaagtatgcgatgtgcccttggatcaactgccacggtcggaaagcttaaaggatgttctggagagactccttccctattggaatgaaaggattgctcccgaagtattacgtggcaaaaccattctgatatctgctcatggaaatagcagtagggcactcctaaaacacctggaaggtatctcagatgaagacatcatcaacattactcttcctactggagtccccattcttctggaattggatgaaaacctgcgtgctgttgggcctcatcagttcctgggtgaccaagaggcgatccaagcagccattaagaaagtagaagatcaaggaaaagtgaaacaagctaaaaaatagtctttctcaactgttggctaagaagaaatgcaaaagaagtggcataggagtgtgttatgggtgctgaactctctctctttttccccgattttccagagctaggctgtggagtagagtttgtataggtaactaggtaacttattgtggcccagataaggctttaggatgcctcagtgcttatgtcatagccttatgagttagctttcttgctagccccctagtcggtcaccaaactagtaactagtggggcttaatgaaggtcataagtttctgagatgggagagcaacaagtagagatgaagttaaaggtatttatcattcaagaaatcattattgagtcaccattgacaggcactattctaatcagtagttcactttaatatttaataagattttctgggataacagtaagggatattagataatataccgtatgtatttattactagtcttttcctctaggaaaagggatactttgataattaaggccagaggcccattagttgagaaagtcacagatatatttctccaagaaagccaacaaccaccaccacaatgacagaaatgacaacaaggccctttaacttgtcttctagtttagagacatccttcatttgacatttagtagaattcctctttggccacaagaataagcagcaaataaacaactatggctgttgaggttctcattttggtttgttttaattttttgaactttgggtacctgtaattagtttaaaaataaagttcctgataataaagtgactgaaaatggcatccccaaaaaaaaaaa

SEQ ID NO: 13046 - DNA, 2074 bp, Homo sapiens
ggggctagaaaagagcgtcgatgccggcggcagtgatgagccctagcacgcgtccgctctttggcggctcggaggagcggctgctgctgctgctgctgctgctggtggcccctttgcagaaaagttctaagaacagtgctgttggctcagtgagatgaggttatcggaaaactttctgtttacacaagagttgcctccttcaaagaagcatgcatggtccttgcaggtcactgtgcccatcactctgcatagtccagctgcactctgcttcacacagctgcctgcccattgcaggcatttgagtttgcaatccatgccttaaactttaaatcacactggctacagcgttgtgtgtttcttggtaaacactgggtaaatcagctcctgtggatgttgactgaagtttctatgtttgcaagctaatcctcagcagtttctttatgtattgctgtccttgaatattagcccatttgaaaacgcctgggaagttcagccatcagtatgtccaagtacaaacttattatgttaagacatggagagggtgcttggaataaggagaaccgtttttgtagctgggtggatcagaaactcaacagcgaaggaatggaggaagctcggaactgtgggaagcaactcaaagcgttaaactttgagtttgatcttgtattcacatctgtccttaatcggtccattcacacagcctggctgatcctggaagagctaggccaggaatgggtgcctgtggaaagctcctggcgtctaaatgagcgtcactatggggccttgatcggtctcaacagggagcagatggctttgaatcatggtgaagaacaagtgaggctctggagaagaagctacaatgtaaccccgcctcccattgaggagtctcatccttactaccaagaaatctacaacgaccggaggtataaagtatgcgatgtgcccttggatcaactgccacggtcggaaagcttaaaggatgttctggagagactccttccctattggaatgaaaggattgctcccgaagtattacgtggcaaaaccattctgatatctgctcatggaaatagcagtagggcactcctaaaacacctggaaggtatctcagatgaagacatcatcaacattactcttcctactggagtccccattcttctggaattggatgaaaacctgcgtgctgttgggcctcatcagttcctgggtgaccaagaggcgatccaagcagccattaagaaagtagaagatcaaggaaaagtgaaacaagctaaaaaatagtctttctcaactgttggctaagaagaaatgcaaaagaagtggcataggagtgtgttatgggtgctgaactctctctctttttccccgattttccagagctaggctgtggagtagagtttgtataggtaactaggtaacttattgtggcccagataaggctttaggatgcctcagtgcttatgtcatagccttatgagttagctttcttgctagccccctagtcggtcaccaaactagtaactagtggggcttaatgaaggtcataagtttctgagatgggagagcaacaagtagagatgaagttaaaggtatttatcattcaagaaatcattattgagtcaccattgacaggcactattctaatcagtagttcactttaatatttaataagattttctgggataacagtaagggatattagataatataccgtatgtatttattactagtcttttcctctaggaaaagggatactttgataattaaggccagaggcccattagttgagaaagtcacagatatatttctccaagaaagccaacaaccaccaccacaatgacagaaatgacaacaaggccctttaacttgtcttctagtttagagacatccttcatttgacatttagtagaattcctctttggccacaagaataagcagcaaataaacaactatggctgttgaggttctcattttggtttgttttaattttttgaactttgggtacctgtaattagtttaaaaataaagttcctgataataaagtgactgaaaatggcaaaaaaaaaaaaaaaaa

SEQ ID NO: 13047 - DNA, 5256 bp, Homo sapiens
gagatcaccataaagcctttcccaacatcaggacagtaaagcaactactgaaaaccattcctgaatttgtgatcaatggactcaagtttagggagaggagcacctttggtctgcaacaatggtttgaatcccagtctctaattacttctttcccaaatactctggtcaccaaagggacaatatttggtgagatgcagccattttgttggttagcaggagttcagacgcaagacaatgtcatagtggtagaatacagtatcaacttcaacagcaagcccatctctggaagctcccagaccattgtgccaatcaagtggaggaggcactttcatttagagaggcttatgtgaaccttatatgagaaacttgccaacctgcctctttgattttttagccttactatttctaatacttaggtgctatcttttagagaccctgaaacagccaagacatgacacttagtacagaggaatccatagaggtgtttggggatattaacctcactcttggcatgttgaacaaggaagatattgttaacaaggaagacatttacagtcatctcacttctgttattcagaatactgacatcttggatgatgcaattgtccaacgattgatttattatgcttctaaggatatgagagacaacaatatgctcagagaaatcagaatgctagctggtgaggttttggtgtctcttgctgcacatgatttcaactctgtgatgtatgaagtacaaagtaacttcaggatcttagagctaccagatgaattcgttgtgcttgccctggctgaattggcaaccagctatgtgtcccagagtattcctttcatgatgatgaccctgctcaccatgcaaaccatgctcaggctggccgaggatgaaaggatgaaggggactttctgtattgcccttgagaaattcagcaaagccatttacaaatatgtcaaccactggagagattttccctaccccagactggatgccaaccgactgtctgacaagatcttcatgctgttccggtatataatggagaagtgggcccctttggcctcacccatgcagactttgagcatcgttaaggcccacgggcccacggtgagcttgctgctgcatcgggaagacttccgtggatacgccctgggccaggtgccctggctcctgaaccagtataaagacaaagagattgatttccatgtcactcagagcctaaaacaaatactgactgcagcagttctttatgacattggccttccaaggagcttgagaagatccatctttatcaatttactccagcagatctgcagagctccagagcctccagtaaaggaaaatgaaatgaaagcttcaagctgttttctcattctagcccattccaatcctggagagctgatggaattttttgatgaacaagtaagaagtaataatgaagccattcgagtgggaatcttgactttgttaagattggctgtcaatgctgatgagcccaggttgagggatcacatcatttcaatagaaagaacagtcaaaatcgtcatgggtgatctcagtacaaaagtaagaaattctgttcttctcctcatccaaaccatgtgtgaaaagtcctatattgaagctcgggaaggatggccattgattgattatgtcttctcccagtttgcaacgttgaacaggaatctggagaaaccagtgaaaactaactttcatgagaatgaaaaggaagaggaatctgtccgagaaacaagccttgaggtcttaaaaaccctggacccactggtcattggaatgccccaggtgctatggccaaggatcctgacttttgtggtacctgcagaatacacagaagctctggagcccctgtttagtatcatcagaattctgattatggcagaggagaagaagcagcacagtgccaaggagtcgacagcacttgtcatctctacgggagctgtgaaacttccttcaccacagcagctactggccagacttctggtaatatctatgcctgccagtttaggggagttacatggggctggtgcaatagggcttttgaagatactgcctgagataattcacccaaaattggtagacctatggaaaacacgtttacctgagcttctgcagcctctggaaggaaagaacatcagtaccgttctatgggaaaccatgctgcttcagttgctcaaagaatccttatggaagatcagtgatgtggcctggaccattcagctgactcaggatttcaaacagcaaatgggcagttacagcaataactccactgagaagaaattcctttggaacgccttgggaacaaccttagcatgctgccaagattcagactttgtaaactcacagattaaggagtttctgactgctcccaaccaactgggggatcaaagacagggaataacatctattttaggatactgtgccgagaaccatttggatattgttttaaaagttcttaaaacattccaaaatcaggaaaagtttttcatgaatcgatgtaagagccttttttctgggaaaaagagcctgaccaagacagatgtcatggtcatctatggagcagtggccctccatgctcccaagaagcaacttctctccagacttaatcaagatatcatatcccaagtcctgtctcttcatggccagtgctctcaggttctgggcatgtctgtgatgaacaaggacatggatctgcaaatgagtttcacaagaagcatcactgagattggcattgctgtccaagatgctgaggatcaggggttccagttttcctacaaggagatgctgattggttacatgctggacttcattagagacgagcccctggattccttagctagccctattcggtggaaagccttaatcgccattaggtatctcagtaaactgaaacctcagctctcactacaagaccaccttaacattcttgaggagaatattcggaggctgctgccccttccacctctggaaaatctgaaaagtgaaggccagacagacaaggacaaggagcacattcaatttctctatgaacgatccatggacgccctaggaaaacttctgaagaccatgatgtgggataatgtgaatgcagaggactgtcaagaaatgtttaatcttctccaaatgtggcttgtttcacaaaaagagtgggaaagagaaagagccttccagatcactgcgaaagtgctgacaaatgatattgaggcaccagagaactttaaaattggttcactgcttggacttctggctcctcactcctgtgataccctgcccaccatccgtcaggcggctgctagctcaactattggtctgttctatataaaaggcattcacttggaagtggaaagactgcagggtttgcaggaagggctggaaagtgatgacgtgcaggttcagatcaagatttcttctaaaatagctaagattgtcagtaagttcatcccaaatgaagaaattctgatgttcctagaggaaatgctggacggtctggagagcctcaaccccacttgtacaaaggcctgtggcatatggatgatcactgtcctgaagcagcagggagctgctctggaagatcagctattggagatcttaggcacaatctaccatcacatgccagtcctcagacaaaaagaagaaagttttcagttcattctagaagccatctcccagatagccagctttcacatggatacagttgttgtcaaccttttacagaagcctctgccttttgacagggacacaaagacattgtggaaggcgctggctgaaaagccagcctccagtgggaaactcttgcaagccttaatagacaaactggagactgagttagaagatgacatcgccagggttgaggcaatttcagtggcctgtgctatgtatgaagtgatctcaatgggcacctctgtcaccggcttgtatccagagctgttcactctcctcctgaagctggttagctgcacactgggccagaagatgcccacttgtccctggagccataggcggcatgtgatgcagcagggagaacagcagcagatcccagacccctgcaggctttcaactgctactttaaaatgtttgcaagcccaagccatgagagaaggccttgcaaaggaatctgatgagggggacaacttatggactctactcagcagtcctagtacccaccacataggcgtatgttcactggccaggagcatggcagtgtggcaacacggagtcatactggacatcatggaacagctgctctcatctcttacctcctcctcggagaactaccggataaccggcgcagctttcttctctgagctcatgaaggaaccaatcctttggaagcatgggaatctgcgaaatgtgctgatcttgatggatcaaagtgcctgggactccaacgccactctgaggcagatggccatccgagggctcggcaacacagcatccggggctcctcacaaggtgaagaaacataagcagttaatgctagaatctatcatcagaggcctgtatcacctagctcgcactgaagtcgtctgtgaaagcttgaaggctctaaaaaaaatcctggagctgctgacagaccgagacgtgagcttctacttcaaggaaatagtgctgcaaacaaggaccttctttgaagatgagcaggatgatgtgagattgactgccatcttcttatttgaggacctggcacccctaacaggaagaaggtggaagattttttttgctgaagaaataaaaaagagcctgatttcattccttctgcacctttgggatcccaaccccaagattggagttgcttgccgtgatgtcttgatggtctgcattccctttttgggcctccaggagctctatggggtattagaccgtctccttgatcaggatctaccaagggccagggatttctataggcaattctgtgtgaaactggccaagaaaaaccaggaaattctgtggatcctccacacacactccttcaccttcttcaccagcacctgggaggtgatcaggagtgcagctgtcaaactcacagatgccgttgttctcaatttgaccagccaatatgtggagttactagacagagaacaactgaccacacgactccaagcacttcgtcaagatccatgtattagtgtccagagagcagctgaggctgctttgcagaccctcctgagaaggtgtaaagagacaagcattcctctgtaagccatcaagaaataaactgctggcttttcccaaaaaaaaaaaaaaaa

SEQ ID NO: 13048 - DNA, 6639 bp, Homo sapiens
caggaaaggacttagaagccttacaaatacatctgtgcattcttgcttcagactttacaactgagggccagcccagtctggaagcatctcttattaatgttacaaggaaaccgctacctcagcaaacaaaaggaatggaggaggagacttacaacaaacgccatttaaaaaaaaaagaaaaacttgttttcaggaaacattagaggaaatttggagaatttcagcattgcatagaagcagccttacaggtaaacggatttgacgggcaggctctgtcaaaattctgcagaagtttgatcttccttcttaaggactttgtgtgaagtaattctttactgcttttaaattgctgttgatcagcttctgggtttttgggttctaacttttttgggtatattgaagacacagtgtattacattatattacatttttaaacgttaagttatttttctgccattgtaaatacaagtatcaaaatattcttgcaaagaagtaaacatttttctcagcaagcatatccttttagtaagagagtggaatgctaaacagttcttatccagcattttggacatcttttattttttgtcagagatcctgtctacactgaaaatattaattatataaacctgttgtctctcacctctacattggatcacatggtcacctgcctcatggaaatgccttttttaaaacttcgatttgcagaactccactatttttatacctagctacagttttgagaaagaagaatcagaaccctgacccacttacggttgctgggacaattccccctcccgcatgtattgctgcagtgcccaggacagtaaaatggactacaagcggcgcttcctgcttggcgggtccaagcagaaggtgcagcagcaccagcaatacccgatgcctgagctgggccgagcactgagtgctcccctggcatccacggccaccactgcccccctgggcagtctgaccgctgcaggcagctgccaccatgccatgccccacactactcctatcgccgacatccagcagggcatctccaagtatctggatgccctgaacgtcttctgccgtgccagtactttcctcacagatctcttcagcactgtgttcaggaactctcactactcaaaggcagccacacagctcaaagatgtgcaggagcatgtcatggaagcagccagtcggctgacctcggccataaagcctgagatcgccaagatgctaatggaacttagtgctggggctgcaaattttacggatcagaaggaattcagtctccaggacattgaggtgttggggcgatgtttcctgactgtggtgcaagtccatttccagtttttgactcatgcgttacagaaggtccagccggtggctcactcttgctttgctgaggtcatcgtgccagaaaaaaagaacagcggcagtggcggcggcttatctggcatgggccacacacctgaagtagaggaagctgtgcggtcctggcggggggctgctgaggcgacatctagactaagagaaagaggctgtgatggttgcctggcaggaattgaagttcaacaactcttttgttctcaaagtgcagcaattcctgagcaccagctaaaagaactgaacataaaaatcgacagtgctttgcaagcatataagatagctctggaaagcttaggacactgtgaatatgcaatgaaagccggcttccacctgaatccaaaggcgattgaagcaagtttgcagggctgctgcagcgaggcggaagcccagcagacggggcggaggcagacacccccgcagcccatgcagtgtgagctccccaccgtccctgtgcagataggatcgcacttcctgaagggcgtctcctttaatgagtcggccgccgacaatctgaaacttaagacgcatacaatgttacagctgatgaaggaggcaggctgctataatggaatcacatccagggatgattttcctgtgactgaagtgctgaaccaggtttgcccttccacatggcgaggtgcctgcaagacggcggtgcagctgctgtttggccaggctggactggtggtggttgacacagcacagattgagaataaagaagcctatgccccccagatcagtttagaaggctctagaatcgtggttcaagtcccatccacatggtgcctgaaagaagaccctgctaccatgtccctgctgcagagaagccttgatcctgagaagaccctgggtctagtggacgtgctctacacagctgtgctggacctaaaccgctggagggctggaagggagcaagctttaccctgcatacagatccagctgcaaagggagatctgtgattttggcaaccaggctgacctgccttctggaaatggaaacaaatcttcaggtggcctgcagaagacattctccaaactgacatcccggttcaccaagaaagcttcatgtaccagctccagcagcagcacaaattattccatccaaaataccccttccaaaaacatcttcatagctggatgttccgaagagaaggccaaaatgcctggcaatattgatacaaggttacaaagcattttgaacattggtaatttccccaggactacagacccttcacagtcagctcagaattccagtaatacagtggccaatggctttctcatggagaggcgtgagaacttcctgcatggagatgacggcaaggatgagaagggtatgaacttaccaactgatcaggaaatgcaagaggtgatagattttctctcgggctttaacatgggccagtcacatcagggctctccgttggtgacaaggcataattctgctgccacagccatggtgactgagcagaaggcaggagccatgcaaccacagcagccgtcactgcctgtgccccctccaccacgggcaccccaggctggggcacacacacctctgacaccccagccgggactggcacctcagcagcagtccccaaagcagcaacaacctcaagtccaatactaccaacacctactccagcccattggaccgcagcagcccccgccccagcctcgggcacctgggaaatgggtacatggctcatcccagcagccagcgcaggctgttggagcaggtctgtctcctcttggtcagtggcctggcatatctgatctcagttctgacttgtacagcttgggtctggtgagcagctatatggataatgtgatgtcagaggttctgggacagaagccgcagggacctagaaataacacctggcccaaccgtgaccaaagtgatggagtctttggaatgctgggagagattctgccttttgatcctgcagtgggctcagacccagagtttgcacgctatgtggcaggagtgagccaggcgatgcagcagaagcggcaggcccagcacggtcgccggccaggcaacccccggggcaactggccgcctatggatgacgcgcatcggacctggcccttccccgagttcttcacagaaggggatggcctgcacggtggctggtcgggtgctcagggagactctgccagctcgagtgatgagacatcctcagccaacggggacagcttgttctccatgttttcagggcctgacctcgttgctgctgtcaagcagagaaggaaacacagcagtggagagcaagacaccagcacgctgccctcaccacctctcctcaccacggtggaggatgtgaaccaggataacaaaaccaaaacgtggccacccaaagcaccctggcagcacccttccccgcttcccagcacgctgcccagccccagcgcaccactctatgcagtcaccagccctggcagccagtggaacgacaccatgcagatgctgcagtccccagtgtgggccgcaaccaacgactgcagtgccgctgccttctcctatgtgcagaccccaccccagcccccacccccaccagcacacaaggcagcacccaagggcttcaaggccttccctgggaagggtgagcgcaggccagcctatctgccccagtactgaccccaggccagccagcctgcctgcctgcctgcctgcccgcccagagctgtggggatgagtgtccccaccccagggccacttagctgacaccagcccctcagaggaccagtgcgccccatcccagggagggttccttggggacaagggtggttggcagctccaagcctttaaacctggcttctgaaacgatggcatcagagccctggagagccagctggagacacaggcgtctggccttcaggggcttgctagggaacctgcatgcctagtaagcgccacaggtgactctgatgcaggcgccacagccacacttgaagaaacacagctcttgggtttttagtcctgctgtgtgttgggaagacatcaggcctgaaagctgagggcataactgaccattttttggaaaccctctcctccctcctccacaccttgagtgatgaccacaccaatcactgtattttatagctttttttttcatgtaggtttttagttaaaacatctcctgcctaaaatgcattgaatattttaagataacagatatactggctggaggtttgtttaacactatctatatttaagcttatacaaaatgggcaaaatatagaatatttgtgattggaagcagtcacctggggtttctgggggtggacagttcctcgccacccagcagcaccctgggactgcggcctttcccagctttattgaagcagaatggtggaacttgtgccggaggtacactgctgaaggtgcgtggcggtggaccagccagctgctgtccatgtgcagagcaaggctgcacctgctgcccttcgatccttccacacatggccaggacactgccacaatcctcggggtgtggtcaaggggcactcagagacacctgcactagaaattgcattgacattgtgagctggctcagaagacaaaccaattaagatgtagatagaaattaatttaaggtcttttcttaaaaaaaaaatccacctcattttcagttaacatgtgccattaaatagataacatcctgtggatttagggatattttccagccagaatggatccagaagaattgaatggtgcttaaattgagaaataataataaatatatctatatagaatagacatatcccactgtatattaattgaggttacagaaagttctttatataaaacttatttaaatttttcatatttcatctttgaaaaagtctgagaaaaatccataatattttctggtatgaaagtttgacagtattaatattttttttatattttcttaaatcattaaaccattttaatatatgttaactactaataaatggtttattctttctaactccatataagcttttccagcaaagattgtaataacacatttatgttctcgtttttctacagatataagtaaatttatatataaaaataccaaaaagaggctgggcgtggtggctcacgcctgtaatcccagcactttgggaggccgaggcaggtggatcacctaaggtcaggagttcgagaccagcctggccaatatggtgaaaccccatctctactaaaaatacaaaaattagccgggtgtggtggcgtgcgcctgtagtcccagctactcgggaggctgaagcagaagaatcgcttgaacccgggaggcggaggttacagtgagctgagattgtgccactgcactccagcctgggtgacagagtgagattccgtctcaacaagaaaaaaaaaaaagaatatatatatatgtatgtatgtatgtatgtaaacacacacactaatttgagaggacccgtagggtgtctgagcccagccacctgagtttttagtactgtgttgtcaggctcttcccaggcctcaggtgttgtcttttgtgctgtgtggggatgcattgctgcctgtatttatgatcttttgccgtggttctgagcattcacctcaccatgtttacaaagaactgttttgtatatagacattttcaggcacgtgctttgcaccaaccctgcgtggctcttgtctgtgttagctgtcacggtgtgcacactaatctctgttaaagttgtctatggctgttctacttgtaagatagttttctatttccttcagtaatgtgtccacagtaccctgtatttcgagttccattatactgaagtactcatgttttaatagtgcctctccaaaggcctcaccttggacagaggtcaatccttgatgctccagcacaggtgacgtcactaattgtcactttccagtttgtttttctctattaaggaagacattttctaattgcatctccatgggctgtgagactgtgtgaagccgtttgtgtggtctccatgtaggtgctgtgttcccggcaccgccttgctctgaacactggtaattccaggtgctgcgcttggcagaggggtctcgccaaagcgcatgtgtgtgcatgtgtgaacgtgtgtgtcctttgcatggttgggcgtgggtgccttgctagggcatcagcaggacattgtgtgtatagttacaatgcttccaaactggaactctacattttgtatcttttaaagctcctataagtaaaataactattggctttattaaaaatatacatttaataataaaaaaaaaaaaaaaaaa

SEQ ID NO: 13049 - DNA, 4264 bp, Homo sapiens
atttcccgccagcaggagccgcgcggtagatgcggtgcttttaggagctccgtccgacagaacggttgggccttgccggctgtcggtatgtcgcgacagagcaccctgtacagcttcttccccaagtctccggcgctgagtgatgccaacaaggcctcggccagggcctcacgcgaaggcggccgtgccgccgctgcccccggggcctctccttccccaggcggggatgcggcctggagcgaggctgggcctgggcccaggcccttggcgcgatccgcgtcaccgcccaaggcgaagaacctcaacggagggctgcggagatcggtagcgcctgctgcccccaccagttgtgacttctcaccaggagatttggtttgggccaagatggagggttacccctggtggccttgtctggtttacaaccacccctttgatggaacattcatccgcgagaaagggaaatcagtccgtgttcatgtacagttttttgatgacagcccaacaaggggctgggttagcaaaaggcttttaaagccatatacaggttcaaaatcaaaggaagcccagaagggaggtcatttttacagtgcaaagcctgaaatactgagagcaatgcaacgtgcagatgaagccttaaataaagacaagattaagaggcttgaattggcagtttgtgatgagccctcagagccagaagaggaagaagagatggaggtaggcacaacttacgtaacagataagagtgaagaagataatgaaattgagagtgaagaggaagtacagcctaagacacaaggatctaggcgaagtagccgccaaataaaaaaacgaagggtcatatcagattctgagagtgacattggtggctctgatgtggaatttaagccagacactaaggaggaaggaagcagtgatgaaataagcagtggagtgggggatagtgagagtgaaggcctgaacagccctgtcaaagttgctcgaaagcggaagagaatggtgactggaaatggctctcttaaaaggaaaagctctaggaaggaaacgccctcagccaccaaacaagcaactagcatttcatcagaaaccaagaatactttgagagctttctctgcccctcaaaattctgaatcccaagcccacgttagtggaggtggtgatgacagtagtcgccctactgtttggtatcatgaaactttagaatggcttaaggaggaaaagagaagagatgagcacaggaggaggcctgatcaccccgattttgatgcatctacactctatgtgcctgaggatttcctcaattcttgtactcctgggatgaggaagtggtggcagattaagtctcagaactttgatcttgtcatctgttacaaggtggggaaattttatgagctgtaccacatggatgctcttattggagtcagtgaactggggctggtattcatgaaaggcaactgggcccattctggctttcctgaaattgcatttggccgttattcagattccctggtgcagaagggctataaagtagcacgagtggaacagactgagactccagaaatgatggaggcacgatgtagaaagatggcacatatatccaagtatgatagagtggtgaggagggagatctgtaggatcattaccaagggtacacagacttacagtgtgctggaaggtgatccctctgagaactacagtaagtatcttcttagcctcaaagaaaaagaggaagattcttctggccatactcgtgcatatggtgtgtgctttgttgatacttcactgggaaagtttttcataggtcagttttcagatgatcgccattgttcgagatttaggactctagtggcacactatcccccagtacaagttttatttgaaaaaggaaatctctcaaaggaaactaaaacaattctaaagagttcattgtcctgttctcttcaggaaggtctgatacccggctcccagttttgggatgcatccaaaactttgagaactctccttgaggaagaatattttagggaaaagctaagtgatggcattggggtgatgttaccccaggtgcttaaaggtatgacttcagagtctgattccattgggttgacaccaggagagaaaagtgaattggccctctctgctctaggtggttgtgtcttctacctcaaaaaatgccttattgatcaggagcttttatcaatggctaattttgaagaatatattcccttggattctgacacagtcagcactacaagatctggtgctatcttcaccaaagcctatcaacgaatggtgctagatgcagtgacattaaacaacttggagatttttctgaatggaacaaatggttctactgaaggaaccctactagagagggttgatacttgccatactccttttggtaagcggctcctaaagcaatggctttgtgccccactctgtaaccattatgctattaatgatcgtctagatgccatagaagacctcatggttgtgcctgacaaaatctccgaagttgtagagcttctaaagaagcttccagatcttgagaggctactcagtaaaattcataatgttgggtctcccctgaagagtcagaaccacccagacagcagggctataatgtatgaagaaactacatacagcaagaagaagattattgattttctttctgctctggaaggattcaaagtaatgtgtaaaattatagggatcatggaagaagttgctgatggttttaagtctaaaatccttaagcaggtcatctctctgcagacaaaaaatcctgaaggtcgttttcctgatttgactgtagaattgaaccgatgggatacagcctttgaccatgaaaaggctcgaaagactggacttattactcccaaagcaggctttgactctgattatgaccaagctcttgctgacataagagaaaatgaacagagcctcctggaatacctagagaaacagcgcaacagaattggctgtaggaccatagtctattgggggattggtaggaaccgttaccagctggaaattcctgagaatttcaccactcgcaatttgccagaagaatacgagttgaaatctaccaagaagggctgtaaacgatactggaccaaaactattgaaaagaagttggctaatctcataaatgctgaagaacggagggatgtatcattgaaggactgcatgcggcgactgttctataactttgataaaaattacaaggactggcagtctgctgtagagtgtatcgcagtgttggatgttttactgtgcctggctaactatagtcgagggggtgatggtcctatgtgtcgcccagtaattctgttgccggaagataccccccccttcttagagcttaaaggatcacgccatccttgcattacgaagactttttttggagatgattttattcctaatgacattctaataggctgtgaggaagaggagcaggaaaatggcaaagcctattgtgtgcttgttactggaccaaatatggggggcaagtctacgcttatgagacaggctggcttattagctgtaatggcccagatgggttgttacgtccctgctgaagtgtgcaggctcacaccaattgatagagtgtttactagacttggtgcctcagacagaataatgtcaggtgaaagtacattttttgttgaattaagtgaaactgccagcatactcatgcatgcaacagcacattctctggtgcttgtggatgaattaggaagaggtactgcaacatttgatgggacggcaatagcaaatgcagttgttaaagaacttgctgagactataaaatgtcgtacattattttcaactcactaccattcattagtagaagattattctcaaaatgttgctgtgcgcctaggacatatggcatgcatggtagaaaatgaatgtgaagaccccagccaggagactattacgttcctctataaattcattaagggagcttgtcctaaaagctatggctttaatgcagcaaggcttgctaatctcccagaggaagttattcaaaagggacatagaaaagcaagagaatttgagaagatgaatcagtcactacgattatttcgggaagtttgcctggctagtgaaaggtcaactgtagatgctgaagctgtccataaattgctgactttgattaaggaattatagactgactacattggaagctttgagttgacttctgaccaaaggtggtaaattcagacaacattatgatctaataaactttattttttaaaaatga

SEQ ID NO: 13050 - DNA, 2093 bp, Homo sapiens
ttagcggtgctcgggtccggtaacaacatggcggcgtccgtgaggggctcctttgggcaggggtagtgtttggtgtccctgtcttgcgtgatattgacaaactgaagctttcctgcaccactggacttaaggaagagtgtactcgtaggcggacagctttagtggccggccggccgctctcatcccccgtaaggagcagagtcctttgtactgaccaagatgagcaacatctacatccaggagcctcccacgaatgggaaggttttattgaaaactacagctggagatattgacatagagttgtggtccaaagaagctcctaaagcttgcagaaattttatccaactttgtttggaagcttattatgacaataccatttttcatagagttgtgcctggtttcatagtccaaggcggagatcctactggcacagggagtggtggagagtctatctatggagcgccattcaaagatgaatttcattcacggttgcgttttaatcggagaggactggttgccatggcaaatgctggttctcatgataatggcagccagtttttcttcacactgggtcgagcagatgaacttaacaataagcataccatctttggaaaggttacaggggatacagtatataacatgttgcgactgtcagaagtagacattgatgatgacgaaagaccacataatccacacaaaataaaaagctgtgaggttttgtttaatccttttgatgacatcattccaagggaaattaaaaggctgaaaaaagagaaaccagaggaggaagtaaagaaattgaaacccaaaggcacaaaaaattttagtttactttcatttggagaggaagctgaggaagaagaggaggaagtaaatcgagttagtcagagcatgaagggcaaaagcaaaagtagtcatgacttgcttaaggatgatccacatctcagttctgttccagttgtagaaagtgaaaaaggtgatgcaccagatttagttgatgatggagaagatgaaagtgcagagcatgatgaatatattgatggtgatgaaaagaacctgatgagagaaagaattgccaaaaaattaaaaaaggacacaagtgcgaatgttaaatcagctggagaaggagaagtggagaagaaatcagtcagccgcagtgaagagctcagaaaagaagcaagacaattaaaacgggaactcttagcagcaaaacaaaaaaaagtagaaaatgcagcaaaacaagcagaaaaaagaagtgaagaggaagaagcccctccagatggtgctgttgccgaatacagaagagaaaagcaaaagtatgaagctttgaggaagcaacagtcaaagaagggaacttcccgggaagatcagacccttgcactgctgaaccagtttaaatctaaactcactcaagcaattgctgaaacgcctgaaaatgacattcctgaaacagaagtagaagatgatgaaggatggatgtcacatgtacttcagtttgaggataaaagcagaaaagtgaaagatgcaagcatgcaagactcagatacatttgaaatctatgatcctcggaatccagtgaataaaagaaggagggaagaaagcaaaaagctgatgagagagaaaaaagaaagaagataaaatgagaataatgataaccagaacttgctggaaatgtgcctacaatggccttgtaacagccattgttcccaacagcatcacttaggggtgtgaaaagaagtatttttgaacctgttgtctggttttgaaaaacaattatcttgttttgcaaattgtggaatgatgtaagcaaatgcttttggttactggtacatgtgttttttcctagctgaccttttatattgctaaatctgaaataaaataactttccttccacattacatgttaaccattgcagactgcaagcctgtttgtgtccttttaccctaaaatatatgaaggcttccttttcaagatttttttataagaagttcctacagaaagaatatttgtgggaaacctccctttcactaacttcagaatataataaaatattataaataaaatatagaatataaatatgaaaaaaaaaaaaa

SEQ ID NO: 13051 - DNA, 3254 bp, Homo sapiens
ggagcgagagcccggcgatggcggctgcgccggccttgaagcactggcgcaccacgctggagcgggtggagaagttcgtgtcgccgctctactttaccgactgtaacctccgcggcaggctttttggggccagctgccctgtggctgtgctctccagcttcctgacgccggagagacttccctaccaggaggcagtccagcgggacttccgccccgcgcaggtcggcgacagcttcggacccacatggtggacctgctggttccgggtggagctgaccatcccagaggcatgggtgggccaggaagttcacctttgctgggaaagtgatggagaaggtctggtgtggcgtgatggagaacctgtccagggtttaaccaaagagggtgagaagaccagctatgtcctgactgacaggctgggggaaagagacccccgaagcctcactctctatgtggaagtagcctgcaatgggctcctgggggccgggaagggaagcatgattgcagcccctgaccctgagaagatgttccagctgagccgggctgagctagctgtgttccaccgggatgtccacatgctcctggtggatctggagctgctgctgggcatagccaagggcctcgggaaggacaaccagcgcagcttccaggccctgtacacagccaatcagatggtgaacgtgtgtgaccctgcccagcccgagaccttcccagtggcccaggccctggcctccaggttctttggccaacatgggggtgaaagccaacacaccattcatgccacagggcactgccacattgatacagcctggctttggcccttcaaagagactgtgaggaaatgtgcccggagctgggtgaccgccctgcagctcatggagcggaaccctgagttcatctttgcctgctcccaggcgcagcagctggaatgggtgaagagccgctaccctggcctgtactcccgcatccaggagtttgcgtgccgtgggcagtttgtgcctgtggggggcacctgggtggagatggatgggaacctgcccagtggagaggccatggtgaggcagtttttgcagggccagaacttctttctgcaggagtttgggaagatgtgctctgagttctggctgccggacacctttggctactcagcacagctcccccagatcatgcacggctgtggcatcaggcgctttctcacccagaaattgagctggaatttggtgaactccttcccacaccatacatttttctgggagggcctggatggctcccgtgtactggtccacttcccacctggcgactcctatgggatgcagggcagcgtggaggaggtgctgaagaccgtggccaacaaccgggacaaggggcgggccaaccacagtgccttcctctttggctttggggatgggggtggtggccccacccagaccatgctggaccgcctgaagcgcctgagcaatacggatgggctgcccagggtgcagctatcttctccaagacagctcttctcagcactggagagtgactcagagcagctgtgcacgtgggttggggagctcttcttggagctgcacaatggcacatacaccacccatgcccagatcaagaaggggaaccgggaatgtgagcggatcctgcacgacgtggagctgctcagtagcctggccctggcccgcagtgcccagttcctatacccagcagcccagctgcagcacctctggaggctccttcttctgaaccagttccatgatgtggtgactggaagctgcatccagatggtggcagaggaagccatgtgccattatgaagacatccgttcccatggcaatacactgctcagcgctgcagccgcagccctgtgtgctggggagccaggtcctgagggcctcctcatcgtcaacacactgccctggaagcggatcgaagtgatggccctgcccaaaccgggcggggcccacagcctagccctggtgacagtgcccagcatgggctatgctcctgttcctccccccacctcactgcagcccctgctgccccagcagcctgtgttcgtagtgcaagagactgatggctccgtgactctggacaatggcatcatccgagtgaagctggacccaactggtcgcctgacgtccttggtcctggtggcctctggcagggaggccattgctgagggcgccgtggggaaccagtttgtgctatttgatgatgtccccttgtactgggatgcatgggacgtcatggactaccacctggagacacggaagcctgtgctgggccaggcagggaccctggcagtgggcaccgagggcggcctgcggggcagcgcctggttcttgctacagatcagccccaacagtcggcttagccaggaggttgtgctggacgttggctgcccctatgtccgcttccacaccgaggtacactggcatgaggcccacaagttcctgaaggtggagttccctgctcgcgtgcggagttcccaggccacctatgagatccagtttgggcacctgcagcgacctacccactacaatacctcttgggactgggctcgatttgaggtgtgggcccatcgctggatggatctgtcagaacacggctttgggctggccctgctcaacgactgcaagtatggcgcgtcagtgcgaggcagcatcctcagcctctcgctcttgcgggcgcctaaagccccggacgctactgctgacacggggcgccacgagttcacctatgcactgatgccgcacaagggctctttccaggatgctggcgttatccaagctgcctacagcctaaacttccccctgttggctctgccagcccccagcccagcgcccgccacctcctggagtgcgttttccgtgtcttcacccgcggtcgtattggagaccgtcaagcaggcggagagcagcccccagcgccgctcgctggtcctgaggctgtatgaggcccacggcagccacgtggactgctggctgcacttgtcgctgccggttcaggaggccatcctctgcgatctcttggagcgaccagaccctgctggccacttgacccttcgggacaaccgcctgaagctcaccttttctcccttccaagtgctgtccctgttgctcgtgcttcagcctccgccacactgagtccctggggctggggttttgtttgtagaaggctctggggactcctaatttctgcttccccagcctaaagcagggatcagtcttttcttgtggaataaatccttggatcgggaa

SEQ ID NO: 13052 - DNA, 14123 bp, Homo sapiens
tgcaacggaaacttttggctccacgaacagaaaagcaagagcaaaaactcagttaaatgcgttcttcctccatctttgcctagtccaaaaggaaaaaaaaagaaacagaaaaaagaaaaactgtttggaagagtagcgttgaggtttgctttttacctgtttttcctctagaacagccaggtggattcacatgatccaattttttaattgtcttctatgtcccactccgaataacccggatgccccagcacaatcagagagatcgttttttttaaaaaaaatttcagcctccaaaggtaggaggggagtgttaggggagaaagtactttaattaaaaatcaataactcgaggtttttgggatacggtttgccatttcctaattaagaaatgggtttgacagtccctttgtacacactgctatgcaaaccccaaagggttggcggctgtccgggcgatgacactccggtcccctgcgagaccccgggccagccaggcccgtccgccgccggcctctggggtccgtccccggctcgcgcagacctctcgcttctctcggctctgtctcctgcgctcagctctgctcggggccggccgcctcaggctcgccgccaccaggtcgttgcaaataccttttccctccccggggccccagcgcgcggccacctcccagcctccccccctcccaccctggcagcggggccctttcccggctcaggaacagcagcagcccgggccgcgccggcaggaagcgaggcccatgttgctgctgttccctggcgcgcctccccgccctccgggggccgccacggctcttccgcgctcccgggcacccccctccgcgcctgcgctgtgccccacgggggcggggctcagattcctgtcagcggcggcggcggtggcggcgaccgtcagttttcgctgaggagaaacacgaaacggaccctttggctctcccccttccccttccccgtcctgaacccctctcctggtcaccgagaatcagtccccgtggagttccccctccacctcgccatcgtttcctcggtcctcggcccagtggaagtcactaccctcgaggaggaggcagcggcagccgccctcgcgtcgccgcccccggttcggtgcccgcggtcccggagaggaggtgccgccgccaccgccgctccccccctcccgctgccctcgggccgggctgggtcgagctgcgatgccctcggacttcatctcattgctcagcgcggacctagacctggaatcgcccaagtccctctactcgcgagaatctgtctatgatcttctcccaaaggagttacagttacctccatctagagaaacatctgtagcatcaatgagtcagacaagcggtggtgaggcaggctcgcctcctccagctgttgttgctgctgatgcttcttcagctccctcctcttcctccatgggcggtgcttgcagctcctttaccacctcttccagccctaccatttattctacctcagtcaccgacagcaaggctatgcaagtggagagctgctcctcagccgtgggggtaagtaacagaggggtaagtgaaaagcagttaaccagtaacacagttcagcagcatccatcaacaccgaagaggcacacagtcttgtacatctcaccaccacctgaggacttgctggataacagtcggatgtcctgccaggatgaggggtgtggattggaatctgagcagagctgcagtatgtggatggaggattccccctccaacttcagtaacatgagcaccagttcctacaatgataacactgaggtacctcgtaaatcacgaaaacgaaatccaaagcagaggccgggggtcaaacgacgagattgtgaagaatctaatatggatatatttgatgccgacagtgccaaagcacctcactatgtgctttctcagcttaccacggacaacaaaggcaactcaaaagcgggaaatggaacattggaaaaccaaaaaggaactggagtaaagaagagccctatgttgtgtggacaatatcctgttaaaagtgagggaaaggagctgaagatagttgtacaacctgagacacagcaccgagctcggtacctgactgagggcagccgtggctcagtgaaagatagaacacagcaaggctttcctacagtaaagctggaaggccataatgaacctgtagtgttgcaagtgtttgtgggcaacgactctggacgagtgaaaccacatggattttatcaggcctgcagagtaactggacgaaatacaactccttgcaaagaagtggacattgaaggcactactgttatagaagtcggccttgatcctagcaacaacatgacactggcggtggactgcgtagggatattgaaattgaggaatgctgatgtcgaagccagaataggaattgctggttccaagaagaaaagcactcgtgccagattggtttttcgagttaatatcatgaggaaagatggctccactttgacactgcaaacaccctcttctccaattttgtgtactcagccagcaggagtgccagaaatcttaaagaaaagcttgcatagctgttcagtgaaaggagaagaagaagtgtttttaatcggcaagaactttctgaaaggaactaaagttattttccaagaaaatgtttctgatgaaaactcttggaagtcagaagctgaaattgatatggaactatttcatcagaatcatcttattgtgaaggttcctccctatcatgaccaacatataactttgcctgtgtcagtgggaatatatgtagtgacaaatgctggaagatctcatgatgttcaaccattcacttacactccagacccagcagcagctggtgctttgaatgtaaatgtgaagaaggaaatatctagtccagcaagaccttgctcttttgaagaggccatgaaagcaatgaaaactactggatgtaatttagataaggtaaatattatccctaatgccctgatgactccactcataccaagcagtatgattaagagtgaagatgttactccaatggaagtaacagcagaaaaaagatcttccactatttttaagactacaaagtctgttggatcaactcagcaaacattagaaaacatctcaaacatagcaggaaatggctctttttcatcaccatcatcttcccacctaccttctgaaaatgaaaaacagcagcagattcagcccaaggcatacaacccagagaccctgacaactattcaaacccaggacatctcacagcctggtacttttccagcagtttctgcttctagtcagctgcccaacagcgatgcactattgcagcaggctacacagtttcagacaagagaaactcagtctagagagatattacagtcagatggtacagtggttaatttgtcacaactgactgaggcatcacaacaacagcagcagtcaccactacaagaacaagcacagactttacagcagcagatttcatcaaatatttttccatcaccaaatagtgtgagtcagcttcagaatactattcagcagctgcaagcagggagtttcacaggcagtactgctagtggcagcagtggaagtgttgacttggtccaacaagttttagaggcacagcagcagttatcttcagttttattttctgctccagatggtaatgagaatgttcaagagcagcttagtgcagatatttttcaacaagtcagtcaaattcagagtggtgtaagccctggaatgttttcctcaacagagccaacagtccataccagaccagataatttattacctggaagagctgaaagtgttcatccacagtctgaaaacacgttatctaatcaacagcagcagcagcagcagcaacagcaagtgatggaatcttcagccgcaatggtgatggagatgcaacagagtatctgccaggcagctgcccagattcagtcagagttattcccttcaactgcttcagcaaatggaaaccttcagcaatcgccagtttaccagcagacttctcacatgatgagtgcattgtctaccaatgaggatatgcaaatgcagtgtgaattgttttcttctcctcctgcagtttctggaaatgaaacttctacaactaccacacagcaggttgcaacccctggcactaccatgtttcagacatcaagttcaggagatggagaagaaactggaacacaagcaaaacagattcagaacagtgtctttcagaccatggtccaaatgcaacatagtggggacaatcaacctcaagttaaccttttttcatccacaaaaagtatgatgagtgttcagaatagtggtacccaacaacaaggtaatggtttattccagcaagggaatgagatgatgtcacttcaatctggaaattttttgcagcagtcttctcattcacaggcccaactttttcatcctcaaaatcctattgccgatgctcagaacctttcccaggaaactcaaggttctctctttcatagtccaaatcctattgtccacagtcagacttctacaacctcctctgaacaaatgcagcctccaatgtttcactctcaaagtaccattgctgtgttacagggctcttcagttcctcaagaccagcagtcaaccaacatatttctttcccagagtcccatgaataatcttcagactaacacagtagcccaagaagcattttttgcagcaccgaactcaatttctccacttcagtcaacatcaaacagtgaacaacaagctgctttccaacagcaagctccaatatcacacatccagactcctatgctttcccaagaacaggcacaacccccgcagcagggtttatttcagcctcaggtggccctgggctcccttccacctaatccaatgcctcaaagccaacaaggaaccatgttccagtcacagcactcaatagttgccatgcagagtaactctccatcccaggaacagcagcagcagcagcaacagcagcagcaacagcagcagcaacaacaacagagcattttattcagtaatcagaataccatggctacaatggcgtctccaaagcaaccaccaccaaacatgatattcaacccaaatcaaaatccaatggctaatcaggagcaacagaaccagtcaatttttcaccaacaaagtaacatggccccaatgaatcaagagcaacagcccatgcaatttcagagtcagtccacagtttcctcacttcagaacccaggtcctacccagtcggaatcatcacagacccccttgttccatagctctcctcagattcagttggtacaagggtcacctagttctcaagagcagcaagtaactctcttcttatctccagcatccatgtctgccttgcagaccagtataaatcaacaagatatgcaacagtctcctctttattcccctcagaacaacatgcctggaattcaaggagccacatcttcgcctcaaccacaggctactttatttcacaacacagcaggaggcacaatgaaccaactgcagaattctcctggctcatctcagcagacatcaggaatgttcttatttggcattcaaaataactgtagtcagcttttaacctctggaccagctacattgcctgatcagttgatggccataagtcagccaggccaaccacaaaacgagggccagccacctgtgacaacacttctttctcagcaaatgccagagaattctccactggcatcctctataaacaccaaccagaacatcgaaaagattgatttgcttgtttcattgcaaaaccaagggaacaacttgactggctccttttaactggatataaattccacgaagaaaatcctgattccaagatgtcctgagatcttgtggttccatgagaattattactttaaaaacaaaacaaaatataaaaaactgtgtttgagtaaactgatagattttactctgactgcaaaagagcacacctatgctgcttgttgcagtaactaaccaccaatgttaacatcttcatattttatattcctaataacagtgatgactgagaatctatttgagtttccagctggcagaattaattgttattattttcctaggcgcaatttccttaaacgtacagtttaaattcaaggctggaccactcagttattattgctattagaaaataatatatcatgtttacttttgttcttcattattttctttcctgcattgttttagtcaagtaatggcttttgaaaaagtaaagttcaataataactaaggctgtgatttttttcaatataaaaggcacagctgttggccaaagtgaaggaatcttttttcagttttattggagaaactgaagggtaacattctaacaagtaaactgtatgtgcagataaaagtactcttgatttaacacaaaggcagatgatacacttataaaactgggaacagctggaatgcttcttgattttattttttcagagagttgttagttctctgggtttctactaaggggtttagccataactgtgcatagaaaaataattatctgtaaaaaatgaaggggataatatatgataaattatgttctgatatcctcctacagtagtttaaattgacagaaaaatttgaatgttttcttcttaacccagtcttaggctggtattccctttttatatatatctatattacttttcacctctttttcactttactttagagaactattaatatactactggcttcatgaccctgtagcatctttggccactttaatctagggtgacctagcaatcctgcagcacagggcagagagtactgtcttaggaattattaggagttgattcctgagaaacaacacatttttccccatgaacggtgctgttctgaagtcttcaaatttttccctctaataggaaacagtataaattttaattaaaaaaaaaaggcaaactaaaatttcttgaaatatcacttctccctgatctgcagtgagtataaattcacttgtcacctcagtgctttacagtttgaagtggtcacttacctgatggttcccacaagccttaggctttacagggttgtatcattgacttaaaatgaagaattaacttgtgttacatctataaagagcaaaataacacactccagaacttggcagttgtagcattagttatacagttttgggtgttcttgccacccgtgggatgcctgcttctcactaccacctgtgtctggacacatgcttatgtctcattttccttttggcatgtggaaagctgtcaatgcagtgtaaggccaacgtgtgtgtggcttctatgtgttgagataatgttttggtatccttgtccgtttcatttattttttaagtgtacaaaaaataacctgttaattgttgaaggctacttttctgttctttttttttttttttttctatcctgtacatttagttgaactgtgcggaattgtggtgttggttttgtttacacagccagatttttccttctttttgttttgtgatgatcttcctttgttctttgaatgtgctcttttgtctttttctcttttttctcatgttttcttccctccacctccacccctttctttctttctctctctgattgagaggcattgaattacgttttcagtagtacaggcttcttgccgatatgaagggaacttttcagaaagagacctactctgggtcatttaattttgaatacagttttcaatcgttcaagttttggatggtttatatctaatgtgtgtttcatttttttggaaagctatattttgtatttaggaaatggtatactattttgctatttgtactgagtgagtacattggcataaatatagaaatttatatatatacatatatataaactattcttttttgccacacatttttgtggtaaatttgtgagtttgtctgatgttctaccacaacgtggcgtctgataacagtgagggggggtggggtttgttatgtctttattgagtatttaagtatcttttgaaacaaatgacctgttcatctgtggccattccatcaggcagttagttccttgatgtcagtagtgggctaaaggcagcttactgtgtgtttgctggagctttcactcagccaagtgttagagtcaggaaacccattgaggcaatggcgtcaaatggtgtttcacaagaatgagccattcagtctttgctcactatatatttaatattttattattgttgttattgttattattaattggctttctgtattctatgccttttatttataaagacactaagaaaacccatgtttgtaattttaataacatttttcccatcttgtaatatccagagctactttataaattctctgaaccaaaagtattttcctcagtgtatctcttctcccccagcccctattgggaaaaattacccagtatagttcaggttatgaggaggatcagccacacaatccagtgcttcagtttgaaaatgtaaaattctaaccctaaagtagggttggttgaaatttcagacaaagcaaacccagcaggtataaaaagtagtataaatacaaatctgtaagttatttttgaattttctgaacttttttctaagagattacataggagactaaagaaatctatctgttcaagttctaattaggatgattgttaatactgcactgtggatgaagtggcgactggcttgtgtgctgacttctgtggtttagcaagaggtttattgttatcaaatgctaattggcaatgccaagtcactgggaccaattttctgttttataatatctaagtttagaacagaatatatacctgaactgtagtggtttgatcggatggagacagaaaacccgatttttattctcataaattttgtggttatttatacaagggctgtgctatgctaccatattcttgttcaataataataggtttgttgttttttttacattgttaaatgttccttacccctaaaggtcaatgttaagtacaacattctgaaaatacaatttggctacgaagagtattcatcttctttgaagctcagtggttgatatttgtgctaataatgcaatttcctgattactgttacaagttatagctacatatgggagagactcagtgagccagcaaaggccatagaaacaacaatttattaaatgtatttatggcagaaggacctaaataaactgtgagccaccttttcttctttatattgttacatttaagtgttcttgctttcagcaactcacattaatgcttggagcttatctctttctctctctctctctctctctctgtgtgtgtgtgtgtatgtgtgtgtgtgtgtgtgtgtgtttccttattgtcattccattatatatccacaccaacatgggtgacgataattcaaagtcatattttgcctctaagcttgatcatgttacctttatgattaaagtatcatgttatttagccaatgcaaatctgttttaaaacaaatagtttaaaaaaagaacaagtttttaagggctttattatagaagaagtattaatgaaggactttccttcctccctccctttcctcccctccctgcctcccttcttcccttccatctccccctcctccctgccttctttgtttctccttcccttattcctccctccctcctttctcccttccttcctttcttccattcatccttccttgccttttatttttattttttgtaatatcacatgtgctgtagtttggaattttattctagtgcatttcttgctcatcagaacctcagctaatctacctaggaaaaatagtatcaaaggaaatgagaaagttgtatctgagtccctccagaactaagataattctttttgaccatttaagcctttataaatgcgttttgaccatttaagcctttataaatgcttgttttaggaaagtgaatctgttagatgcatcaacaaataatgaccaggacaaaacgatttaataattaaagtctcaaatcaccatggttatacattttcaccagaaatagtaatcttacaatttttcatttttctgatgaagatttctgttccaatatctgtttcctaatagattttttaaattaattagctttcctctgctttatgaccacaggttttatccctaaccgagacagctgtcttatatctgcatgccttagactgtgtggagggactccatgaagaaagaccataggttagaaaaataactcatagtatataccctagtaagtgggttagtagaatctcataacatgtattaaaaagaggttttcttctctgcttgtttgtgtcactagagcaaaattgtagagataatgctcataatgcagtaaatatcagaataatatctacaatatcatttgtggatggtcccaggtcccagtgctctagttactttacttctttttttttttttgagatggagtcttgctctgtctctcaggctagagcagtgtgcgatctcagctcactgcagcctccacctcccaggttcaagcgattctcctgcctcagcctcccaagtagccaggattacaggcaccctccactaggcccggctaattttttttgtatttttttagtagagatggggttttgccatgttggccaggctggtttcgaactcctaacctccagtgatccacctgcctcggcgtcccaaagtgctaggattacaggcatgagccaccacatccggcctaattacttctttaatccccatttatttttatgccattctagcctcatttattaataaaattatgtttttactttctctttcaggaaattttttaaattaatattttatatctagatctaatgctatggaaaagtgcctttttatcatttataatttcatttttcactatttccaaaaacacataaacaaatagtttcagtaggtcccagcttttactttttccatttaaaccttcttttctccatttcttccctttggcttaagaataaaagaaaaggtacattgctagaattgtttctttgggagagggtaaaagattacagaattagactgttcagcctttatataaactaaatttgtcttcatctcaaccagctaatggtaggtcttatctgaatactcatgagaattttagcatctgtgaaactccatgcaccagatgtgtgtaaatttcaggaagaaagtgttgaaagcattttctctgatgttaattagatggaaataaatcactaaaacatagtttaggtaaagcctgattatgccacttttttttaactagacagggcaaagttgtttatgttagtgtacttcttgtctatcctcagttaatttacctagacaaaaagtgtcaaaggaaatgagaaaaaggttatatctgactccctccagacctaagataattccttttgatcagatacagtcagatggagtgccttggtttttgttaattttgcctctattccagctccttaccacagcggtggtgcttaaagaaaggatcatcagcaacaggtcaggatagttctacctttgggatagggctgctttccccgtgctagtatttctgtgactgttagtggcactgaggactgcaaacttttatgcaatattcttaataccctattgatattatgcactttaatcattccaaagaagccaagaatgctgtatagtgatgattccttcctaatgaattcatcttaactatttagaatgttatgtcccttttcttttggatagccaacttggtataaatgttatatggatttttctaaaatgactatataggacttaagactttgaaatgtaatttacttataaggggaaataattatgctttagcacatcattttagaaacgtcacattttagaaacattcagcttgctaacctacatgtttgggaattcattaaaaccagttgtctatatattttgtgccatgtatataagaacattacaatatatctttttctacatatgtagtatgtgcaaccagtggttctcagagtatggttctcagcccaccagctagtatcagtatcacctgggaactagttagaaatgtaaattctttggccccatcccagacatactgagtcagaaactctggaatagggcccccgcaatctgttttcacaagccctccaggtgattctgatgcacactttaaagtttaggaaccactgggctaagactctgttgagatatagagtttttcttccactcagactgatatagttatacattgttcttcatgtaaattcagcttaacctggttatctataatcttttattggcaaaagttaattctcagtactgcctatagagatacagtgtattttatgtacatacacaattagtctaattcttgataattcagttaatttagtttggcattttcctaccacttactaaaaggtttacattaaatgactgatttaaatatataggtgcaatgttctatgtttattttaattgttatgacatttaagtagctaatataattgaccggtgctaaagtctcctgtttatccataaaatgggtacattatgggcagtgtaatacaagctttcttttcattgcctagtactttaccagcagaccacagttttgccctggctagaccaaccctcagaacaaaatcatcattccttgtatttatatttgtatctgagatagtaaacaagatggctggccaggtcaacatggcaccttaacttatttttttaataggtaaaacttcttcaaaagtagcttgctttgtataagaactaagctatcagtatagatatagctatccttggagcttatgtttcagacaagaattatttactaaaataaataataaacaagataatgcattatacaatttgggcatttctcgtttctcaagtgtatgcatcatggtaaatataaactaaccacaagataggtagattgattcatttcattttaatctccttgtgtaattcagtacctccataattgttctaatcttcttcccactgtttacaaattaccagttaattaactcgtgaaagaaaaattcacatatcagaataaaaataaatgtatactcactttataaaaatcaccactgctgtctttccttaatactagcagtggaaatgtaagtggcttactctacaaattttggtgctggcaaatacataggcaaactgttgggagctgctctagttacattcctcccttcttattccctttttctcttcctcactttattgcataacatattcctgtacccaaagcattctaccacagttctatttgactcccacttgtaataactcctttaaaaaattccatgtttaaccatatgaccctgcttgcttactcatattctccctccctctccccttcctttctctctcttccagaagtcatttgcctggtttgaaatattttgtagggattgcttattatattattttagctgatgaacctcaggacaacgtctacacacacacacatacatacacgcacacaaaatctcagctgttgaagagtgggcttggaatcagacttctgtgtccagtaaaaaactcctgcactgaagtcattgtgacttgagtagttacagactgattccagtgaacttgatctaatttcttttgatctaatgaatgtgtctgcttaccttgtttccttttaattgataagctccaagtagttgctaattttttgacaactttaaatgagtttcattcacttcttttacttaatgttttaagtatagtaccaataatttcattaacctgttctcaagtggtttagctaccattctgccatttttaatttttatttaattttatttgcttgagcacactgatcaaccactgaactgccttcttccattgtcctgcaatgatataagggttacatttttgtgtatatggctttcatagttgggatttcagagcactgataccagatattttcagtttgttctctgggggaatttcatttgcatctatgtttttagctatctgtgataacttgttaaatattaaaaagatattttgcttctattggaacatttgtatactcgcaactatatttctgtaaacagctgcagtcaaaaataaaacactgaaagttaaaaaaaaaaaaaaaaaaaa

SEQ ID NO: 13053 - DNA, 14239 bp, Homo sapiens
tgcaacggaaacttttggctccacgaacagaaaagcaagagcaaaaactcagttaaatgcgttcttcctccatctttgcctagtccaaaaggaaaaaaaaagaaacagaaaaaagaaaaactgtttggaagagtagcgttgaggtttgctttttacctgtttttcctctagaacagccaggtggattcacatgatccaattttttaattgtcttctatgtcccactccgaataacccggatgccccagcacaatcagagagatcgttttttttaaaaaaaatttcagcctccaaaggtaggaggggagtgttaggggagaaagtactttaattaaaaatcaataactcgaggtttttgggatacggtttgccatttcctaattaagaaatgggtttgacagtccctttgtacacactgctatgcaaaccccaaagggttggcggctgtccgggcgatgacactccggtcccctgcgagaccccgggccagccaggcccgtccgccgccggcctctggggtccgtccccggctcgcgcagacctctcgcttctctcggctctgtctcctgcgctcagctctgctcggggccggccgcctcaggctcgccgccaccaggtcgttgcaaataccttttccctccccggggccccagcgcgcggccacctcccagcctccccccctcccaccctggcagcggggccctttcccggctcaggaacagcagcagcccgggccgcgccggcaggaagcgaggcccatgttgctgctgttccctggcgcgcctccccgccctccgggggccgccacggctcttccgcgctcccgggcacccccctccgcgcctgcgctgtgccccacgggggcggggctcagattcctgtcagcggcggcggcggtggcggcgaccgtcagttttcgctgaggagaaacacgaaacggaccctttggctctcccccttccccttccccgtcctgaacccctctcctggtcaccgagaatcagtccccgtggagttccccctccacctcgccatcgtttcctcggtcctcggcccagtggaagtcactaccctcgaggaggaggcagcggcagccgccctcgcgtcgccgcccccggttcggtgcccgcggtcccggagaggaggtgccgccgccaccgccgctccccccctcccgctgccctcgggccgggctgggtcgagctgcgatgccctcggacttcatctcattgctcagcgcggacctagacctggaatcgcccaagtccctctactcgcgagattctctgaagttacacccatcacagaattttcatagagctggactattggaagaatctgtctatgatcttctcccaaaggagttacagttacctccatctagagaaacatctgtagcatcaatgagtcagacaagcggtggtgaggcaggctcgcctcctccagctgttgttgctgctggatttgcctctgaagcagggagtgtctgcattaaaaatgacctgtagttctctgcttcatagatgcttcttcagctccctcctcttcctccatgggcggtgcttgcagctcctttaccacctcttccagccctaccatttattctacctcagtcaccgacagcaaggctatgcaagtggagagctgctcctcagccgtgggggtaagtaacagaggggtaagtgaaaagcagttaaccagtaacacagttcagcagcatccatcaacaccgaagaggcacacagtcttgtacatctcaccaccacctgaggacttgctggataacagtcggatgtcctgccaggatgaggggtgtggattggaatctgagcagagctgcagtatgtggatggaggattccccctccaacttcagtaacatgagcaccagttcctacaatgataacactgaggtacctcgtaaatcacgaaaacgaaatccaaagcagaggccgggggtcaaacgacgagattgtgaagaatctaatatggatatatttgatgccgacagtgccaaagcacctcactatgtgctttctcagcttaccacggacaacaaaggcaactcaaaagcgggaaatggaacattggaaaaccaaaaaggaactggagtaaagaagagccctatgttgtgtggacaatatcctgttaaaagtgagggaaaggagctgaagatagttgtacaacctgagacacagcaccgagctcggtacctgactgagggcagccgtggctcagtgaaagatagaacacagcaaggctttcctacagtaaagctggaaggccataatgaacctgtagtgttgcaagtgtttgtgggcaacgactctggacgagtgaaaccacatggattttatcaggcctgcagagtaactggacgaaatacaactccttgcaaagaagtggacattgaaggcactactgttatagaagtcggccttgatcctagcaacaacatgacactggcggtggactgcgtagggatattgaaattgaggaatgctgatgtcgaagccagaataggaattgctggttccaagaagaaaagcactcgtgccagattggtttttcgagttaatatcatgaggaaagatggctccactttgacactgcaaacaccctcttctccaattttgtgtactcagccagcaggagtgccagaaatcttaaagaaaagcttgcatagctgttcagtgaaaggagaagaagaagtgtttttaatcggcaagaactttctgaaaggaactaaagttattttccaagaaaatgtttctgatgaaaactcttggaagtcagaagctgaaattgatatggaactatttcatcagaatcatcttattgtgaaggttcctccctatcatgaccaacatataactttgcctgtgtcagtgggaatatatgtagtgacaaatgctggaagatctcatgatgttcaaccattcacttacactccagacccagcagcagctggtgctttgaatgtaaatgtgaagaaggaaatatctagtccagcaagaccttgctcttttgaagaggccatgaaagcaatgaaaactactggatgtaatttagataaggtaaatattatccctaatgccctgatgactccactcataccaagcagtatgattaagagtgaagatgttactccaatggaagtaacagcagaaaaaagatcttccactatttttaagactacaaagtctgttggatcaactcagcaaacattagaaaacatctcaaacatagcaggaaatggctctttttcatcaccatcatcttcccacctaccttctgaaaatgaaaaacagcagcagattcagcccaaggcatacaacccagagaccctgacaactattcaaacccaggacatctcacagcctggtacttttccagcagtttctgcttctagtcagctgcccaacagcgatgcactattgcagcaggctacacagtttcagacaagagaaactcagtctagagagatattacagtcagatggtacagtggttaatttgtcacaactgactgaggcatcacaacaacagcagcagtcaccactacaagaacaagcacagactttacagcagcagatttcatcaaatatttttccatcaccaaatagtgtgagtcagcttcagaatactattcagcagctgcaagcagggagtttcacaggcagtactgctagtggcagcagtggaagtgttgacttggtccaacaagttttagaggcacagcagcagttatcttcagttttattttctgctccagatggtaatgagaatgttcaagagcagcttagtgcagatatttttcaacaagtcagtcaaattcagagtggtgtaagccctggaatgttttcctcaacagagccaacagtccataccagaccagataatttattacctggaagagctgaaagtgttcatccacagtctgaaaacacgttatctaatcaacagcagcagcagcagcagcaacagcaagtgatggaatcttcagccgcaatggtgatggagatgcaacagagtatctgccaggcagctgcccagattcagtcagagttattcccttcaactgcttcagcaaatggaaaccttcagcaatcgccagtttaccagcagacttctcacatgatgagtgcattgtctaccaatgaggatatgcaaatgcagtgtgaattgttttcttctcctcctgcagtttctggaaatgaaacttctacaactaccacacagcaggttgcaacccctggcactaccatgtttcagacatcaagttcaggagatggagaagaaactggaacacaagcaaaacagattcagaacagtgtctttcagaccatggtccaaatgcaacatagtggggacaatcaacctcaagttaaccttttttcatccacaaaaagtatgatgagtgttcagaatagtggtacccaacaacaaggtaatggtttattccagcaagggaatgagatgatgtcacttcaatctggaaattttttgcagcagtcttctcattcacaggcccaactttttcatcctcaaaatcctattgccgatgctcagaacctttcccaggaaactcaaggttctctctttcatagtccaaatcctattgtccacagtcagacttctacaacctcctctgaacaaatgcagcctccaatgtttcactctcaaagtaccattgctgtgttacagggctcttcagttcctcaagaccagcagtcaaccaacatatttctttcccagagtcccatgaataatcttcagactaacacagtagcccaagaagcattttttgcagcaccgaactcaatttctccacttcagtcaacatcaaacagtgaacaacaagctgctttccaacagcaagctccaatatcacacatccagactcctatgctttcccaagaacaggcacaacccccgcagcagggtttatttcagcctcaggtggccctgggctcccttccacctaatccaatgcctcaaagccaacaaggaaccatgttccagtcacagcactcaatagttgccatgcagagtaactctccatcccaggaacagcagcagcagcagcaacagcagcagcaacagcagcagcaacaacaacagagcattttattcagtaatcagaataccatggctacaatggcgtctccaaagcaaccaccaccaaacatgatattcaacccaaatcaaaatccaatggctaatcaggagcaacagaaccagtcaatttttcaccaacaaagtaacatggccccaatgaatcaagagcaacagcccatgcaatttcagagtcagtccacagtttcctcacttcagaacccaggtcctacccagtcggaatcatcacagacccccttgttccatagctctcctcagattcagttggtacaagggtcacctagttctcaagagcagcaagtaactctcttcttatctccagcatccatgtctgccttgcagaccagtataaatcaacaagatatgcaacagtctcctctttattcccctcagaacaacatgcctggaattcaaggagccacatcttcgcctcaaccacaggctactttatttcacaacacagcaggaggcacaatgaaccaactgcagaattctcctggctcatctcagcagacatcaggaatgttcttatttggcattcaaaataactgtagtcagcttttaacctctggaccagctacattgcctgatcagttgatggccataagtcagccaggccaaccacaaaacgagggccagccacctgtgacaacacttctttctcagcaaatgccagagaattctccactggcatcctctataaacaccaaccagaacatcgaaaagattgatttgcttgtttcattgcaaaaccaagggaacaacttgactggctccttttaactggatataaattccacgaagaaaatcctgattccaagatgtcctgagatcttgtggttccatgagaattattactttaaaaacaaaacaaaatataaaaaactgtgtttgagtaaactgatagattttactctgactgcaaaagagcacacctatgctgcttgttgcagtaactaaccaccaatgttaacatcttcatattttatattcctaataacagtgatgactgagaatctatttgagtttccagctggcagaattaattgttattattttcctaggcgcaatttccttaaacgtacagtttaaattcaaggctggaccactcagttattattgctattagaaaataatatatcatgtttacttttgttcttcattattttctttcctgcattgttttagtcaagtaatggcttttgaaaaagtaaagttcaataataactaaggctgtgatttttttcaatataaaaggcacagctgttggccaaagtgaaggaatcttttttcagttttattggagaaactgaagggtaacattctaacaagtaaactgtatgtgcagataaaagtactcttgatttaacacaaaggcagatgatacacttataaaactgggaacagctggaatgcttcttgattttattttttcagagagttgttagttctctgggtttctactaaggggtttagccataactgtgcatagaaaaataattatctgtaaaaaatgaaggggataatatatgataaattatgttctgatatcctcctacagtagtttaaattgacagaaaaatttgaatgttttcttcttaacccagtcttaggctggtattccctttttatatatatctatattacttttcacctctttttcactttactttagagaactattaatatactactggcttcatgaccctgtagcatctttggccactttaatctagggtgacctagcaatcctgcagcacagggcagagagtactgtcttaggaattattaggagttgattcctgagaaacaacacatttttccccatgaacggtgctgttctgaagtcttcaaatttttccctctaataggaaacagtataaattttaattaaaaaaaaaaggcaaactaaaatttcttgaaatatcacttctccctgatctgcagtgagtataaattcacttgtcacctcagtgctttacagtttgaagtggtcacttacctgatggttcccacaagccttaggctttacagggttgtatcattgacttaaaatgaagaattaacttgtgttacatctataaagagcaaaataacacactccagaacttggcagttgtagcattagttatacagttttgggtgttcttgccacccgtgggatgcctgcttctcactaccacctgtgtctggacacatgcttatgtctcattttccttttggcatgtggaaagctgtcaatgcagtgtaaggccaacgtgtgtgtggcttctatgtgttgagataatgttttggtatccttgtccgtttcatttattttttaagtgtacaaaaaataacctgttaattgttgaaggctacttttctgttctttttttttttttttttctatcctgtacatttagttgaactgtgcggaattgtggtgttggttttgtttacacagccagatttttccttctttttgttttgtgatgatcttcctttgttctttgaatgtgctcttttgtctttttctcttttttctcatgttttcttccctccacctccacccctttctttctttctctctctgattgagaggcattgaattacgttttcagtagtacaggcttcttgccgatatgaagggaacttttcagaaagagacctactctgggtcatttaattttgaatacagttttcaatcgttcaagttttggatggtttatatctaatgtgtgtttcatttttttggaaagctatattttgtatttaggaaatggtatactattttgctatttgtactgagtgagtacattggcataaatatagaaatttatatatatacatatatataaactattcttttttgccacacatttttgtggtaaatttgtgagtttgtctgatgttctaccacaacgtggcgtctgataacagtgagggggggtggggtttgttatgtctttattgagtatttaagtatcttttgaaacaaatgacctgttcatctgtggccattccatcaggcagttagttccttgatgtcagtagtgggctaaaggcagcttactgtgtgtttgctggagctttcactcagccaagtgttagagtcaggaaacccattgaggcaatggcgtcaaatggtgtttcacaagaatgagccattcagtctttgctcactatatatttaatattttattattgttgttattgttattattaattggctttctgtattctatgccttttatttataaagacactaagaaaacccatgtttgtaattttaataacatttttcccatcttgtaatatccagagctactttataaattctctgaaccaaaagtattttcctcagtgtatctcttctcccccagcccctattgggaaaaattacccagtatagttcaggttatgaggaggatcagccacacaatccagtgcttcagtttgaaaatgtaaaattctaaccctaaagtagggttggttgaaatttcagacaaagcaaacccagcaggtataaaaagtagtataaatacaaatctgtaagttatttttgaattttctgaacttttttctaagagattacataggagactaaagaaatctatctgttcaagttctaattaggatgattgttaatactgcactgtggatgaagtggcgactggcttgtgtgctgacttctgtggtttagcaagaggtttattgttatcaaatgctaattggcaatgccaagtcactgggaccaattttctgttttataatatctaagtttagaacagaatatatacctgaactgtagtggtttgatcggatggagacagaaaacccgatttttattctcataaattttgtggttatttatacaagggctgtgctatgctaccatattcttgttcaataataataggtttgttgttttttttacattgttaaatgttccttacccctaaaggtcaatgttaagtacaacattctgaaaatacaatttggctacgaagagtattcatcttctttgaagctcagtggttgatatttgtgctaataatgcaatttcctgattactgttacaagttatagctacatatgggagagactcagtgagccagcaaaggccatagaaacaacaatttattaaatgtatttatggcagaaggacctaaataaactgtgagccaccttttcttctttatattgttacatttaagtgttcttgctttcagcaactcacattaatgcttggagcttatctctttctctctctctctctctctctctgtgtgtgtgtgtgtatgtgtgtgtgtgtgtgtgtgtgtttccttattgtcattccattatatatccacaccaacatgggtgacgataattcaaagtcatattttgcctctaagcttgatcatgttacctttatgattaaagtatcatgttatttagccaatgcaaatctgttttaaaacaaatagtttaaaaaaagaacaagtttttaagggctttattatagaagaagtattaatgaaggactttccttcctccctccctttcctcccctccctgcctcccttcttcccttccatctccccctcctccctgccttctttgtttctccttcccttattcctccctccctcctttctcccttccttcctttcttccattcatccttccttgccttttatttttattttttgtaatatcacatgtgctgtagtttggaattttattctagtgcatttcttgctcatcagaacctcagctaatctacctaggaaaaatagtatcaaaggaaatgagaaagttgtatctgagtccctccagaactaagataattctttttgaccatttaagcctttataaatgcgttttgaccatttaagcctttataaatgcttgttttaggaaagtgaatctgttagatgcatcaacaaataatgaccaggacaaaacgatttaataattaaagtctcaaatcaccatggttatacattttcaccagaaatagtaatcttacaatttttcatttttctgatgaagatttctgttccaatatctgtttcctaatagattttttaaattaattagctttcctctgctttatgaccacaggttttatccctaaccgagacagctgtcttatatctgcatgccttagactgtgtggagggactccatgaagaaagaccataggttagaaaaataactcatagtatataccctagtaagtgggttagtagaatctcataacatgtattaaaaagaggttttcttctctgcttgtttgtgtcactagagcaaaattgtagagataatgctcataatgcagtaaatatcagaataatatctacaatatcatttgtggatggtcccaggtcccagtgctctagttactttacttctttttttttttttgagatggagtcttgctctgtctctcaggctagagcagtgtgcgatctcagctcactgcagcctccacctcccaggttcaagcgattctcctgcctcagcctcccaagtagccaggattacaggcaccctccactaggcccggctaattttttttgtatttttttagtagagatggggttttgccatgttggccaggctggtttcgaactcctaacctccagtgatccacctgcctcggcgtcccaaagtgctaggattacaggcatgagccaccacatccggcctaattacttctttaatccccatttatttttatgccattctagcctcatttattaataaaattatgtttttactttctctttcaggaaattttttaaattaatattttatatctagatctaatgctatggaaaagtgcctttttatcatttataatttcatttttcactatttccaaaaacacataaacaaatagtttcagtaggtcccagcttttactttttccatttaaaccttcttttctccatttcttccctttggcttaagaataaaagaaaaggtacattgctagaattgtttctttgggagagggtaaaagattacagaattagactgttcagcctttatataaactaaatttgtcttcatctcaaccagctaatggtaggtcttatctgaatactcatgagaattttagcatctgtgaaactccatgcaccagatgtgtgtaaatttcaggaagaaagtgttgaaagcattttctctgatgttaattagatggaaataaatcactaaaacatagtttaggtaaagcctgattatgccacttttttttaactagacagggcaaagttgtttatgttagtgtacttcttgtctatcctcagttaatttacctagacaaaaagtgtcaaaggaaatgagaaaaaggttatatctgactccctccagacctaagataattccttttgatcagatacagtcagatggagtgccttggtttttgttaattttgcctctattccagctccttaccacagcggtggtgcttaaagaaaggatcatcagcaacaggtcaggatagttctacctttgggatagggctgctttccccgtgctagtatttctgtgactgttagtggcactgaggactgcaaacttttatgcaatattcttaataccctattgatattatgcactttaatcattccaaagaagccaagaatgctgtatagtgatgattccttcctaatgaattcatcttaactatttagaatgttatgtcccttttcttttggatagccaacttggtataaatgttatatggatttttctaaaatgactatataggacttaagactttgaaatgtaatttacttataaggggaaataattatgctttagcacatcattttagaaacgtcacattttagaaacattcagcttgctaacctacatgtttgggaattcattaaaaccagttgtctatatattttgtgccatgtatataagaacattacaatatatctttttctacatatgtagtatgtgcaaccagtggttctcagagtatggttctcagcccaccagctagtatcagtatcacctgggaactagttagaaatgtaaattctttggccccatcccagacatactgagtcagaaactctggaatagggcccccgcaatctgttttcacaagccctccaggtgattctgatgcacactttaaagtttaggaaccactgggctaagactctgttgagatatagagtttttcttccactcagactgatatagttatacattgttcttcatgtaaattcagcttaacctggttatctataatcttttattggcaaaagttaattctcagtactgcctatagagatacagtgtattttatgtacatacacaattagtctaattcttgataattcagttaatttagtttggcattttcctaccacttactaaaaggtttacattaaatgactgatttaaatatataggtgcaatgttctatgtttattttaattgttatgacatttaagtagctaatataattgaccggtgctaaagtctcctgtttatccataaaatgggtacattatgggcagtgtaatacaagctttcttttcattgcctagtactttaccagcagaccacagttttgccctggctagaccaaccctcagaacaaaatcatcattccttgtatttatatttgtatctgagatagtaaacaagatggctggccaggtcaacatggcaccttaacttatttttttaataggtaaaacttcttcaaaagtagcttgctttgtataagaactaagctatcagtatagatatagctatccttggagcttatgtttcagacaagaattatttactaaaataaataataaacaagataatgcattatacaatttgggcatttctcgtttctcaagtgtatgcatcatggtaaatataaactaaccacaagataggtagattgattcatttcattttaatctccttgtgtaattcagtacctccataattgttctaatcttcttcccactgtttacaaattaccagttaattaactcgtgaaagaaaaattcacatatcagaataaaaataaatgtatactcactttataaaaatcaccactgctgtctttccttaatactagcagtggaaatgtaagtggcttactctacaaattttggtgctggcaaatacataggcaaactgttgggagctgctctagttacattcctcccttcttattccctttttctcttcctcactttattgcataacatattcctgtacccaaagcattctaccacagttctatttgactcccacttgtaataactcctttaaaaaattccatgtttaaccatatgaccctgcttgcttactcatattctccctccctctccccttcctttctctctcttccagaagtcatttgcctggtttgaaatattttgtagggattgcttattatattattttagctgatgaacctcaggacaacgtctacacacacacacatacatacacgcacacaaaatctcagctgttgaagagtgggcttggaatcagacttctgtgtccagtaaaaaactcctgcactgaagtcattgtgacttgagtagttacagactgattccagtgaacttgatctaatttcttttgatctaatgaatgtgtctgcttaccttgtttccttttaattgataagctccaagtagttgctaattttttgacaactttaaatgagtttcattcacttcttttacttaatgttttaagtatagtaccaataatttcattaacctgttctcaagtggtttagctaccattctgccatttttaatttttatttaattttatttgcttgagcacactgatcaaccactgaactgccttcttccattgtcctgcaatgatataagggttacatttttgtgtatatggctttcatagttgggatttcagagcactgataccagatattttcagtttgttctctgggggaatttcatttgcatctatgtttttagctatctgtgataacttgttaaatattaaaaagatattttgcttctattggaacatttgtatactcgcaactatatttctgtaaacagctgcagtcaaaaataaaacactgaaagttaaaaaaaaaaaaaaaaaaaa

SEQ ID NO: 13054 - DNA, 14185 bp, Homo sapiens
tgcaacggaaacttttggctccacgaacagaaaagcaagagcaaaaactcagttaaatgcgttcttcctccatctttgcctagtccaaaaggaaaaaaaaagaaacagaaaaaagaaaaactgtttggaagagtagcgttgaggtttgctttttacctgtttttcctctagaacagccaggtggattcacatgatccaattttttaattgtcttctatgtcccactccgaataacccggatgccccagcacaatcagagagatcgttttttttaaaaaaaatttcagcctccaaaggtaggaggggagtgttaggggagaaagtactttaattaaaaatcaataactcgaggtttttgggatacggtttgccatttcctaattaagaaatgggtttgacagtccctttgtacacactgctatgcaaaccccaaagggttggcggctgtccgggcgatgacactccggtcccctgcgagaccccgggccagccaggcccgtccgccgccggcctctggggtccgtccccggctcgcgcagacctctcgcttctctcggctctgtctcctgcgctcagctctgctcggggccggccgcctcaggctcgccgccaccaggtcgttgcaaataccttttccctccccggggccccagcgcgcggccacctcccagcctccccccctcccaccctggcagcggggccctttcccggctcaggaacagcagcagcccgggccgcgccggcaggaagcgaggcccatgttgctgctgttccctggcgcgcctccccgccctccgggggccgccacggctcttccgcgctcccgggcacccccctccgcgcctgcgctgtgccccacgggggcggggctcagattcctgtcagcggcggcggcggtggcggcgaccgtcagttttcgctgaggagaaacacgaaacggaccctttggctctcccccttccccttccccgtcctgaacccctctcctggtcaccgagaatcagtccccgtggagttccccctccacctcgccatcgtttcctcggtcctcggcccagtggaagtcactaccctcgaggaggaggcagcggcagccgccctcgcgtcgccgcccccggttcggtgcccgcggtcccggagaggaggtgccgccgccaccgccgctccccccctcccgctgccctcgggccgggctgggtcgagctgcgatgccctcggacttcatctcattgctcagcgcggacctagacctggaatcgcccaagtccctctactcgcgagaatctgtctatgatcttctcccaaaggagttacagttacctccatctagagaaacatctgtagcatcaatgagtcagacaagcggtggtgaggcaggctcgcctcctccagctgttgttgctgctggatttgcctctgaagcagggagtgtctgcattaaaaatgacctgtagttctctgcttcatagatgcttcttcagctccctcctcttcctccatgggcggtgcttgcagctcctttaccacctcttccagccctaccatttattctacctcagtcaccgacagcaaggctatgcaagtggagagctgctcctcagccgtgggggtaagtaacagaggggtaagtgaaaagcagttaaccagtaacacagttcagcagcatccatcaacaccgaagaggcacacagtcttgtacatctcaccaccacctgaggacttgctggataacagtcggatgtcctgccaggatgaggggtgtggattggaatctgagcagagctgcagtatgtggatggaggattccccctccaacttcagtaacatgagcaccagttcctacaatgataacactgaggtacctcgtaaatcacgaaaacgaaatccaaagcagaggccgggggtcaaacgacgagattgtgaagaatctaatatggatatatttgatgccgacagtgccaaagcacctcactatgtgctttctcagcttaccacggacaacaaaggcaactcaaaagcgggaaatggaacattggaaaaccaaaaaggaactggagtaaagaagagccctatgttgtgtggacaatatcctgttaaaagtgagggaaaggagctgaagatagttgtacaacctgagacacagcaccgagctcggtacctgactgagggcagccgtggctcagtgaaagatagaacacagcaaggctttcctacagtaaagctggaaggccataatgaacctgtagtgttgcaagtgtttgtgggcaacgactctggacgagtgaaaccacatggattttatcaggcctgcagagtaactggacgaaatacaactccttgcaaagaagtggacattgaaggcactactgttatagaagtcggccttgatcctagcaacaacatgacactggcggtggactgcgtagggatattgaaattgaggaatgctgatgtcgaagccagaataggaattgctggttccaagaagaaaagcactcgtgccagattggtttttcgagttaatatcatgaggaaagatggctccactttgacactgcaaacaccctcttctccaattttgtgtactcagccagcaggagtgccagaaatcttaaagaaaagcttgcatagctgttcagtgaaaggagaagaagaagtgtttttaatcggcaagaactttctgaaaggaactaaagttattttccaagaaaatgtttctgatgaaaactcttggaagtcagaagctgaaattgatatggaactatttcatcagaatcatcttattgtgaaggttcctccctatcatgaccaacatataactttgcctgtgtcagtgggaatatatgtagtgacaaatgctggaagatctcatgatgttcaaccattcacttacactccagacccagcagcagctggtgctttgaatgtaaatgtgaagaaggaaatatctagtccagcaagaccttgctcttttgaagaggccatgaaagcaatgaaaactactggatgtaatttagataaggtaaatattatccctaatgccctgatgactccactcataccaagcagtatgattaagagtgaagatgttactccaatggaagtaacagcagaaaaaagatcttccactatttttaagactacaaagtctgttggatcaactcagcaaacattagaaaacatctcaaacatagcaggaaatggctctttttcatcaccatcatcttcccacctaccttctgaaaatgaaaaacagcagcagattcagcccaaggcatacaacccagagaccctgacaactattcaaacccaggacatctcacagcctggtacttttccagcagtttctgcttctagtcagctgcccaacagcgatgcactattgcagcaggctacacagtttcagacaagagaaactcagtctagagagatattacagtcagatggtacagtggttaatttgtcacaactgactgaggcatcacaacaacagcagcagtcaccactacaagaacaagcacagactttacagcagcagatttcatcaaatatttttccatcaccaaatagtgtgagtcagcttcagaatactattcagcagctgcaagcagggagtttcacaggcagtactgctagtggcagcagtggaagtgttgacttggtccaacaagttttagaggcacagcagcagttatcttcagttttattttctgctccagatggtaatgagaatgttcaagagcagcttagtgcagatatttttcaacaagtcagtcaaattcagagtggtgtaagccctggaatgttttcctcaacagagccaacagtccataccagaccagataatttattacctggaagagctgaaagtgttcatccacagtctgaaaacacgttatctaatcaacagcagcagcagcagcagcaacagcaagtgatggaatcttcagccgcaatggtgatggagatgcaacagagtatctgccaggcagctgcccagattcagtcagagttattcccttcaactgcttcagcaaatggaaaccttcagcaatcgccagtttaccagcagacttctcacatgatgagtgcattgtctaccaatgaggatatgcaaatgcagtgtgaattgttttcttctcctcctgcagtttctggaaatgaaacttctacaactaccacacagcaggttgcaacccctggcactaccatgtttcagacatcaagttcaggagatggagaagaaactggaacacaagcaaaacagattcagaacagtgtctttcagaccatggtccaaatgcaacatagtggggacaatcaacctcaagttaaccttttttcatccacaaaaagtatgatgagtgttcagaatagtggtacccaacaacaaggtaatggtttattccagcaagggaatgagatgatgtcacttcaatctggaaattttttgcagcagtcttctcattcacaggcccaactttttcatcctcaaaatcctattgccgatgctcagaacctttcccaggaaactcaaggttctctctttcatagtccaaatcctattgtccacagtcagacttctacaacctcctctgaacaaatgcagcctccaatgtttcactctcaaagtaccattgctgtgttacagggctcttcagttcctcaagaccagcagtcaaccaacatatttctttcccagagtcccatgaataatcttcagactaacacagtagcccaagaagcattttttgcagcaccgaactcaatttctccacttcagtcaacatcaaacagtgaacaacaagctgctttccaacagcaagctccaatatcacacatccagactcctatgctttcccaagaacaggcacaacccccgcagcagggtttatttcagcctcaggtggccctgggctcccttccacctaatccaatgcctcaaagccaacaaggaaccatgttccagtcacagcactcaatagttgccatgcagagtaactctccatcccaggaacagcagcagcagcagcaacagcagcagcaacagcagcagcaacaacaacagagcattttattcagtaatcagaataccatggctacaatggcgtctccaaagcaaccaccaccaaacatgatattcaacccaaatcaaaatccaatggctaatcaggagcaacagaaccagtcaatttttcaccaacaaagtaacatggccccaatgaatcaagagcaacagcccatgcaatttcagagtcagtccacagtttcctcacttcagaacccaggtcctacccagtcggaatcatcacagacccccttgttccatagctctcctcagattcagttggtacaagggtcacctagttctcaagagcagcaagtaactctcttcttatctccagcatccatgtctgccttgcagaccagtataaatcaacaagatatgcaacagtctcctctttattcccctcagaacaacatgcctggaattcaaggagccacatcttcgcctcaaccacaggctactttatttcacaacacagcaggaggcacaatgaaccaactgcagaattctcctggctcatctcagcagacatcaggaatgttcttatttggcattcaaaataactgtagtcagcttttaacctctggaccagctacattgcctgatcagttgatggccataagtcagccaggccaaccacaaaacgagggccagccacctgtgacaacacttctttctcagcaaatgccagagaattctccactggcatcctctataaacaccaaccagaacatcgaaaagattgatttgcttgtttcattgcaaaaccaagggaacaacttgactggctccttttaactggatataaattccacgaagaaaatcctgattccaagatgtcctgagatcttgtggttccatgagaattattactttaaaaacaaaacaaaatataaaaaactgtgtttgagtaaactgatagattttactctgactgcaaaagagcacacctatgctgcttgttgcagtaactaaccaccaatgttaacatcttcatattttatattcctaataacagtgatgactgagaatctatttgagtttccagctggcagaattaattgttattattttcctaggcgcaatttccttaaacgtacagtttaaattcaaggctggaccactcagttattattgctattagaaaataatatatcatgtttacttttgttcttcattattttctttcctgcattgttttagtcaagtaatggcttttgaaaaagtaaagttcaataataactaaggctgtgatttttttcaatataaaaggcacagctgttggccaaagtgaaggaatcttttttcagttttattggagaaactgaagggtaacattctaacaagtaaactgtatgtgcagataaaagtactcttgatttaacacaaaggcagatgatacacttataaaactgggaacagctggaatgcttcttgattttattttttcagagagttgttagttctctgggtttctactaaggggtttagccataactgtgcatagaaaaataattatctgtaaaaaatgaaggggataatatatgataaattatgttctgatatcctcctacagtagtttaaattgacagaaaaatttgaatgttttcttcttaacccagtcttaggctggtattccctttttatatatatctatattacttttcacctctttttcactttactttagagaactattaatatactactggcttcatgaccctgtagcatctttggccactttaatctagggtgacctagcaatcctgcagcacagggcagagagtactgtcttaggaattattaggagttgattcctgagaaacaacacatttttccccatgaacggtgctgttctgaagtcttcaaatttttccctctaataggaaacagtataaattttaattaaaaaaaaaaggcaaactaaaatttcttgaaatatcacttctccctgatctgcagtgagtataaattcacttgtcacctcagtgctttacagtttgaagtggtcacttacctgatggttcccacaagccttaggctttacagggttgtatcattgacttaaaatgaagaattaacttgtgttacatctataaagagcaaaataacacactccagaacttggcagttgtagcattagttatacagttttgggtgttcttgccacccgtgggatgcctgcttctcactaccacctgtgtctggacacatgcttatgtctcattttccttttggcatgtggaaagctgtcaatgcagtgtaaggccaacgtgtgtgtggcttctatgtgttgagataatgttttggtatccttgtccgtttcatttattttttaagtgtacaaaaaataacctgttaattgttgaaggctacttttctgttctttttttttttttttttctatcctgtacatttagttgaactgtgcggaattgtggtgttggttttgtttacacagccagatttttccttctttttgttttgtgatgatcttcctttgttctttgaatgtgctcttttgtctttttctcttttttctcatgttttcttccctccacctccacccctttctttctttctctctctgattgagaggcattgaattacgttttcagtagtacaggcttcttgccgatatgaagggaacttttcagaaagagacctactctgggtcatttaattttgaatacagttttcaatcgttcaagttttggatggtttatatctaatgtgtgtttcatttttttggaaagctatattttgtatttaggaaatggtatactattttgctatttgtactgagtgagtacattggcataaatatagaaatttatatatatacatatatataaactattcttttttgccacacatttttgtggtaaatttgtgagtttgtctgatgttctaccacaacgtggcgtctgataacagtgagggggggtggggtttgttatgtctttattgagtatttaagtatcttttgaaacaaatgacctgttcatctgtggccattccatcaggcagttagttccttgatgtcagtagtgggctaaaggcagcttactgtgtgtttgctggagctttcactcagccaagtgttagagtcaggaaacccattgaggcaatggcgtcaaatggtgtttcacaagaatgagccattcagtctttgctcactatatatttaatattttattattgttgttattgttattattaattggctttctgtattctatgccttttatttataaagacactaagaaaacccatgtttgtaattttaataacatttttcccatcttgtaatatccagagctactttataaattctctgaaccaaaagtattttcctcagtgtatctcttctcccccagcccctattgggaaaaattacccagtatagttcaggttatgaggaggatcagccacacaatccagtgcttcagtttgaaaatgtaaaattctaaccctaaagtagggttggttgaaatttcagacaaagcaaacccagcaggtataaaaagtagtataaatacaaatctgtaagttatttttgaattttctgaacttttttctaagagattacataggagactaaagaaatctatctgttcaagttctaattaggatgattgttaatactgcactgtggatgaagtggcgactggcttgtgtgctgacttctgtggtttagcaagaggtttattgttatcaaatgctaattggcaatgccaagtcactgggaccaattttctgttttataatatctaagtttagaacagaatatatacctgaactgtagtggtttgatcggatggagacagaaaacccgatttttattctcataaattttgtggttatttatacaagggctgtgctatgctaccatattcttgttcaataataataggtttgttgttttttttacattgttaaatgttccttacccctaaaggtcaatgttaagtacaacattctgaaaatacaatttggctacgaagagtattcatcttctttgaagctcagtggttgatatttgtgctaataatgcaatttcctgattactgttacaagttatagctacatatgggagagactcagtgagccagcaaaggccatagaaacaacaatttattaaatgtatttatggcagaaggacctaaataaactgtgagccaccttttcttctttatattgttacatttaagtgttcttgctttcagcaactcacattaatgcttggagcttatctctttctctctctctctctctctctctgtgtgtgtgtgtgtatgtgtgtgtgtgtgtgtgtgtgtttccttattgtcattccattatatatccacaccaacatgggtgacgataattcaaagtcatattttgcctctaagcttgatcatgttacctttatgattaaagtatcatgttatttagccaatgcaaatctgttttaaaacaaatagtttaaaaaaagaacaagtttttaagggctttattatagaagaagtattaatgaaggactttccttcctccctccctttcctcccctccctgcctcccttcttcccttccatctccccctcctccctgccttctttgtttctccttcccttattcctccctccctcctttctcccttccttcctttcttccattcatccttccttgccttttatttttattttttgtaatatcacatgtgctgtagtttggaattttattctagtgcatttcttgctcatcagaacctcagctaatctacctaggaaaaatagtatcaaaggaaatgagaaagttgtatctgagtccctccagaactaagataattctttttgaccatttaagcctttataaatgcgttttgaccatttaagcctttataaatgcttgttttaggaaagtgaatctgttagatgcatcaacaaataatgaccaggacaaaacgatttaataattaaagtctcaaatcaccatggttatacattttcaccagaaatagtaatcttacaatttttcatttttctgatgaagatttctgttccaatatctgtttcctaatagattttttaaattaattagctttcctctgctttatgaccacaggttttatccctaaccgagacagctgtcttatatctgcatgccttagactgtgtggagggactccatgaagaaagaccataggttagaaaaataactcatagtatataccctagtaagtgggttagtagaatctcataacatgtattaaaaagaggttttcttctctgcttgtttgtgtcactagagcaaaattgtagagataatgctcataatgcagtaaatatcagaataatatctacaatatcatttgtggatggtcccaggtcccagtgctctagttactttacttctttttttttttttgagatggagtcttgctctgtctctcaggctagagcagtgtgcgatctcagctcactgcagcctccacctcccaggttcaagcgattctcctgcctcagcctcccaagtagccaggattacaggcaccctccactaggcccggctaattttttttgtatttttttagtagagatggggttttgccatgttggccaggctggtttcgaactcctaacctccagtgatccacctgcctcggcgtcccaaagtgctaggattacaggcatgagccaccacatccggcctaattacttctttaatccccatttatttttatgccattctagcctcatttattaataaaattatgtttttactttctctttcaggaaattttttaaattaatattttatatctagatctaatgctatggaaaagtgcctttttatcatttataatttcatttttcactatttccaaaaacacataaacaaatagtttcagtaggtcccagcttttactttttccatttaaaccttcttttctccatttcttccctttggcttaagaataaaagaaaaggtacattgctagaattgtttctttgggagagggtaaaagattacagaattagactgttcagcctttatataaactaaatttgtcttcatctcaaccagctaatggtaggtcttatctgaatactcatgagaattttagcatctgtgaaactccatgcaccagatgtgtgtaaatttcaggaagaaagtgttgaaagcattttctctgatgttaattagatggaaataaatcactaaaacatagtttaggtaaagcctgattatgccacttttttttaactagacagggcaaagttgtttatgttagtgtacttcttgtctatcctcagttaatttacctagacaaaaagtgtcaaaggaaatgagaaaaaggttatatctgactccctccagacctaagataattccttttgatcagatacagtcagatggagtgccttggtttttgttaattttgcctctattccagctccttaccacagcggtggtgcttaaagaaaggatcatcagcaacaggtcaggatagttctacctttgggatagggctgctttccccgtgctagtatttctgtgactgttagtggcactgaggactgcaaacttttatgcaatattcttaataccctattgatattatgcactttaatcattccaaagaagccaagaatgctgtatagtgatgattccttcctaatgaattcatcttaactatttagaatgttatgtcccttttcttttggatagccaacttggtataaatgttatatggatttttctaaaatgactatataggacttaagactttgaaatgtaatttacttataaggggaaataattatgctttagcacatcattttagaaacgtcacattttagaaacattcagcttgctaacctacatgtttgggaattcattaaaaccagttgtctatatattttgtgccatgtatataagaacattacaatatatctttttctacatatgtagtatgtgcaaccagtggttctcagagtatggttctcagcccaccagctagtatcagtatcacctgggaactagttagaaatgtaaattctttggccccatcccagacatactgagtcagaaactctggaatagggcccccgcaatctgttttcacaagccctccaggtgattctgatgcacactttaaagtttaggaaccactgggctaagactctgttgagatatagagtttttcttccactcagactgatatagttatacattgttcttcatgtaaattcagcttaacctggttatctataatcttttattggcaaaagttaattctcagtactgcctatagagatacagtgtattttatgtacatacacaattagtctaattcttgataattcagttaatttagtttggcattttcctaccacttactaaaaggtttacattaaatgactgatttaaatatataggtgcaatgttctatgtttattttaattgttatgacatttaagtagctaatataattgaccggtgctaaagtctcctgtttatccataaaatgggtacattatgggcagtgtaatacaagctttcttttcattgcctagtactttaccagcagaccacagttttgccctggctagaccaaccctcagaacaaaatcatcattccttgtatttatatttgtatctgagatagtaaacaagatggctggccaggtcaacatggcaccttaacttatttttttaataggtaaaacttcttcaaaagtagcttgctttgtataagaactaagctatcagtatagatatagctatccttggagcttatgtttcagacaagaattatttactaaaataaataataaacaagataatgcattatacaatttgggcatttctcgtttctcaagtgtatgcatcatggtaaatataaactaaccacaagataggtagattgattcatttcattttaatctccttgtgtaattcagtacctccataattgttctaatcttcttcccactgtttacaaattaccagttaattaactcgtgaaagaaaaattcacatatcagaataaaaataaatgtatactcactttataaaaatcaccactgctgtctttccttaatactagcagtggaaatgtaagtggcttactctacaaattttggtgctggcaaatacataggcaaactgttgggagctgctctagttacattcctcccttcttattccctttttctcttcctcactttattgcataacatattcctgtacccaaagcattctaccacagttctatttgactcccacttgtaataactcctttaaaaaattccatgtttaaccatatgaccctgcttgcttactcatattctccctccctctccccttcctttctctctcttccagaagtcatttgcctggtttgaaatattttgtagggattgcttattatattattttagctgatgaacctcaggacaacgtctacacacacacacatacatacacgcacacaaaatctcagctgttgaagagtgggcttggaatcagacttctgtgtccagtaaaaaactcctgcactgaagtcattgtgacttgagtagttacagactgattccagtgaacttgatctaatttcttttgatctaatgaatgtgtctgcttaccttgtttccttttaattgataagctccaagtagttgctaattttttgacaactttaaatgagtttcattcacttcttttacttaatgttttaagtatagtaccaataatttcattaacctgttctcaagtggtttagctaccattctgccatttttaatttttatttaattttatttgcttgagcacactgatcaaccactgaactgccttcttccattgtcctgcaatgatataagggttacatttttgtgtatatggctttcatagttgggatttcagagcactgataccagatattttcagtttgttctctgggggaatttcatttgcatctatgtttttagctatctgtgataacttgttaaatattaaaaagatattttgcttctattggaacatttgtatactcgcaactatatttctgtaaacagctgcagtcaaaaataaaacactgaaagttaaaaaaaaaaaaaaaaaaaa

SEQ ID NO: 13055 - DNA, 5304 bp, Homo sapiens
ggcggtggcggcgaccgtcagttttcgctgaggagaaacacgaaacggaccctttggctctcccccttccccttccccgtcctgaacccctctcctggtcaccgagaatcagtccccgtggagttccccctccacctcgccatcgtttcctcggtcctcggcccagtggaagtcactaccctcgaggaggaggcagcggcagccgccctcgcgtcgccgcccccggttcggtgcccgcggtcccggagaggaggtgccgccgccaccgccgctccccccctcccgctgccctcgggccgggctgggtcgagctgcgatgccctcggacttcatctcattgctcagcgcggacctagacctggaatcgcccaagtccctctactcgcgagaatctgtctatgatcttctcccaaaggagttacagttacctccatctagagaaacatctgtagcatcaatgagtcagacaagcggtggtgaggcaggctcgcctcctccagctgttgttgctgctggatttgcctctgaagcagggagtgtctgcattaaaaatgacctgtagttctctgcttcatagatgcttcttcagctccctcctcttcctccatgggcggtgcttgcagctcctttaccacctcttccagccctaccatttattctacctcagtcaccgacagcaaggctatgcaagtggagagctgctcctcagccgtgggggtaagtaacagaggggtaagtgaaaagcagttaaccagtaacacagttcagcagcatccatcaacaccgaagaggcacacagtcttgtacatctcaccaccacctgaggacttgctggataacagtcggatgtcctgccaggatgaggggtgtggattggaatctgagcagagctgcagtatgtggatggaggattccccctccaacttcagtaacatgagcaccagttcctacaatgataacactgaggtacctcgtaaatcacgaaaacgaaatccaaagcagaggccgggggtcaaacgacgagattgtgaagaatctaatatggatatatttgatgccgacagtgccaaagcacctcactatgtgctttctcagcttaccacggacaacaaaggcaactcaaaagcgggaaatggaacattggaaaaccaaaaaggaactggagtaaagaagagccctatgttgtgtggacaatatcctgttaaaagtgagggaaaggagctgaagatagttgtacaacctgagacacagcaccgagctcggtacctgactgagggcagccgtggctcagtgaaagatagaacacagcaaggctttcctacagtaaagctggaaggccataatgaacctgtagtgttgcaagtgtttgtgggcaacgactctggacgagtgaaaccacatggattttatcaggcctgcagagtaactggacgaaatacaactccttgcaaagaagtggacattgaaggcactactgttatagaagtcggccttgatcctagcaacaacatgacactggcggtggactgcgtagggatattgaaattgaggaatgctgatgtcgaagccagaataggaattgctggttccaagaagaaaagcactcgtgccagattggtttttcgagttaatatcatgaggaaagatggctccactttgacactgcaaacaccctcttctccaattttgtgtactcagccagcaggagtgccagaaatcttaaagaaaagcttgcatagctgttcagtgaaaggagaagaagaagtgtttttaatcggcaagaactttctgaaaggaactaaagttattttccaagaaaatgtttctgatgaaaactcttggaagtcagaagctgaaattgatatggaactatttcatcagaatcatcttattgtgaaggttcctccctatcatgaccaacatataactttgcctgtgtcagtgggaatatatgtagtgacaaatgctggaagatctcatgatgttcaaccattcacttacactccagacccagcagcagctggtgctttgaatgtaaatgtgaagaaggaaatatctagtccagcaagaccttgctcttttgaagaggccatgaaagcaatgaaaactactggatgtaatttagataaggtaaatattatccctaatgccctgatgactccactcataccaagcagtatgattaagagtgaagatgttactccaatggaagtaacagcagaaaaaagatcttccactatttttaagactacaaagtctgttggatcaactcagcaaacattagaaaacatctcaaacatagcaggaaatggctctttttcatcaccatcatcttcccacctaccttctgaaaatgaaaaacagcagcagattcagcccaaggcatacaacccagagaccctgacaactattcaaacccaggacatctcacagcctggtacttttccagcagtttctgcttctagtcagctgcccaacagcgatgcactattgcagcaggctacacagtttcagacaagagaaactcagtctagagagatattacagtcagatggtacagtggttaatttgtcacaactgactgaggcatcacaacaacagcagcagtcaccactacaagaacaagcacagactttacagcagcagatttcatcaaatatttttccatcaccaaatagtgtgagtcagcttcagaatactattcagcagctgcaagcagggagtttcacaggcagtactgctagtggcagcagtggaagtgttgacttggtccaacaagttttagaggcacagcagcagttatcttcagttttattttctgctccagatggtaatgagaatgttcaagagcagcttagtgcagatatttttcaacaagtcagtcaaattcagagtggtgtaagccctggaatgttttcctcaacagagccaacagtccataccagaccagataatttattacctggaagagctgaaagtgttcatccacagtctgaaaacacgttatctaatcaacagcagcagcagcagcagcaacagcaagtgatggaatcttcagccgcaatggtgatggagatgcaacagagtatctgccaggcagctgcccagattcagtcagagttattcccttcaactgcttcagcaaatggaaaccttcagcaatcgccagtttaccagcagacttctcacatgatgagtgcattgtctaccaatgaggatatgcaaatgcagtgtgaattgttttcttctcctcctgcagtttctggaaatgaaacttctacaactaccacacagcaggttgcaacccctggcactaccatgtttcagacatcaagttcaggagatggagaagaaactggaacacaagcaaaacagattcagaacagtgtctttcagaccatggtccaaatgcaacatagtggggacaatcaacctcaagttaaccttttttcatccacaaaaagtatgatgagtgttcagaatagtggtacccaacaacaaggtaatggtttattccagcaagggaatgagatgatgtcacttcaatctggaaattttttgcagcagtcttctcattcacaggcccaactttttcatcctcaaaatcctattgccgatgctcagaacctttcccaggaaactcaaggttctctctttcatagtccaaatcctattgtccacagtcagacttctacaacctcctctgaacaaatgcagcctccaatgtttcactctcaaagtaccattgctgtgttacagggctcttcagttcctcaagaccagcagtcaaccaacatatttctttcccagagtcccatgaataatcttcagactaacacagtagcccaagaagcattttttgcagcaccgaactcaatttctccacttcagtcaacatcaaacagtgaacaacaagctgctttccaacagcaagctccaatatcacacatccagactcctatgctttcccaagaacaggcacaacccccgcagcagggtttatttcagcctcaggtggccctgggctcccttccacctaatccaatgcctcaaagccaacaaggaaccatgttccagtcacagcactcaatagttgccatgcagagtaactctccatcccaggaacagcagcagcagcagcaacagcagcagcaacagcagcagcaacaacaacagagcattttattcagtaatcagaataccatggctacaatggcgtctccaaagcaaccaccaccaaacatgatattcaacccaaatcaaaatccaatggctaatcaggagcaacagaaccagtcaatttttcaccaacaaagtaacatggccccaatgaatcaagagcaacagcccatgcaatttcagagtcagtccacagtttcctcacttcagaacccaggtcctacccagtcggaatcatcacagacccccttgttccatagctctcctcagattcagttggtacaagggtcacctagttctcaagagcagcaagtaactctcttcttatctccagcatccatgtctgccttgcagaccagtataaatcaacaagatatgcaacagtctcctctttattcccctcagaacaacatgcctggaattcaaggagccacatcttcgcctcaaccacaggctactttatttcacaacacagcaggaggcacaatgaaccaactgcagaattctcctggctcatctcagcagacatcaggaatgttcttatttggcattcaaaataactgtagtcagcttttaacctctggaccagctacattgcctgatcagttgatggccataagtcagccaggccaaccacaaaacgagggccagccacctgtgacaacacttctttctcagcaaatgccagagaattctccactggcatcctctataaacaccaaccagaacatcgaaaagattgatttgcttgtttcattgcaaaaccaagggaacaacttgactggctccttttaactggatatgtaagtattgcattttggcttcttattgaaaagcatcagattttattcttcttaacagatttaggttaagtaatagtagttctaatcttttaaaatgtggctttctcacaagatgatacttttttactctgaataaaattattctgaatgatagcttatggtcatatagttaatacagaccaggccgggcgtggtggctcatgcctgtaatcccagcactttgagagaccaaggtgggcggatcacgaggtcaggcgatcgagaccatcctggctaacatggtgaaaccccgtctctactaaaaaatacaaaaaaaaaaaaa

SEQ ID NO: 13056 - DNA, 14177 bp, Homo sapiens
tgcaacggaaacttttggctccacgaacagaaaagcaagagcaaaaactcagttaaatgcgttcttcctccatctttgcctagtccaaaaggaaaaaaaaagaaacagaaaaaagaaaaactgtttggaagagtagcgttgaggtttgctttttacctgtttttcctctagaacagccaggtggattcacatgatccaattttttaattgtcttctatgtcccactccgaataacccggatgccccagcacaatcagagagatcgttttttttaaaaaaaatttcagcctccaaaggtaggaggggagtgttaggggagaaagtactttaattaaaaatcaataactcgaggtttttgggatacggtttgccatttcctaattaagaaatgggtttgacagtccctttgtacacactgctatgcaaaccccaaagggttggcggctgtccgggcgatgacactccggtcccctgcgagaccccgggccagccaggcccgtccgccgccggcctctggggtccgtccccggctcgcgcagacctctcgcttctctcggctctgtctcctgcgctcagctctgctcggggccggccgcctcaggctcgccgccaccaggtcgttgcaaataccttttccctccccggggccccagcgcgcggccacctcccagcctccccccctcccaccctggcagcggggccctttcccggctcaggaacagcagcagcccgggccgcgccggcaggaagcgaggcccatgttgctgctgttccctggcgcgcctccccgccctccgggggccgccacggctcttccgcgctcccgggcacccccctccgcgcctgcgctgtgccccacgggggcggggctcagattcctgtcagcggcggcggcggtggcggcgaccgtcagttttcgctgaggagaaacacgaaacggaccctttggctctcccccttccccttccccgtcctgaacccctctcctggtcaccgagaatcagtccccgtggagttccccctccacctcgccatcgtttcctcggtcctcggcccagtggaagtcactaccctcgaggaggaggcagcggcagccgccctcgcgtcgccgcccccggttcggtgcccgcggtcccggagaggaggtgccgccgccaccgccgctccccccctcccgctgccctcgggccgggctgggtcgagctgcgatgccctcggacttcatctcattgctcagcgcggacctagacctggaatcgcccaagtccctctactcgcgagattctctgaagttacacccatcacagaattttcatagagctggactattggaagaatctgtctatgatcttctcccaaaggagttacagttacctccatctagagaaacatctgtagcatcaatgagtcagacaagcggtggtgaggcaggctcgcctcctccagctgttgttgctgctgatgcttcttcagctccctcctcttcctccatgggcggtgcttgcagctcctttaccacctcttccagccctaccatttattctacctcagtcaccgacagcaaggctatgcaagtggagagctgctcctcagccgtgggggtaagtaacagaggggtaagtgaaaagcagttaaccagtaacacagttcagcagcatccatcaacaccgaagaggcacacagtcttgtacatctcaccaccacctgaggacttgctggataacagtcggatgtcctgccaggatgaggggtgtggattggaatctgagcagagctgcagtatgtggatggaggattccccctccaacttcagtaacatgagcaccagttcctacaatgataacactgaggtacctcgtaaatcacgaaaacgaaatccaaagcagaggccgggggtcaaacgacgagattgtgaagaatctaatatggatatatttgatgccgacagtgccaaagcacctcactatgtgctttctcagcttaccacggacaacaaaggcaactcaaaagcgggaaatggaacattggaaaaccaaaaaggaactggagtaaagaagagccctatgttgtgtggacaatatcctgttaaaagtgagggaaaggagctgaagatagttgtacaacctgagacacagcaccgagctcggtacctgactgagggcagccgtggctcagtgaaagatagaacacagcaaggctttcctacagtaaagctggaaggccataatgaacctgtagtgttgcaagtgtttgtgggcaacgactctggacgagtgaaaccacatggattttatcaggcctgcagagtaactggacgaaatacaactccttgcaaagaagtggacattgaaggcactactgttatagaagtcggccttgatcctagcaacaacatgacactggcggtggactgcgtagggatattgaaattgaggaatgctgatgtcgaagccagaataggaattgctggttccaagaagaaaagcactcgtgccagattggtttttcgagttaatatcatgaggaaagatggctccactttgacactgcaaacaccctcttctccaattttgtgtactcagccagcaggagtgccagaaatcttaaagaaaagcttgcatagctgttcagtgaaaggagaagaagaagtgtttttaatcggcaagaactttctgaaaggaactaaagttattttccaagaaaatgtttctgatgaaaactcttggaagtcagaagctgaaattgatatggaactatttcatcagaatcatcttattgtgaaggttcctccctatcatgaccaacatataactttgcctgtgtcagtgggaatatatgtagtgacaaatgctggaagatctcatgatgttcaaccattcacttacactccagacccagcagcagctggtgctttgaatgtaaatgtgaagaaggaaatatctagtccagcaagaccttgctcttttgaagaggccatgaaagcaatgaaaactactggatgtaatttagataaggtaaatattatccctaatgccctgatgactccactcataccaagcagtatgattaagagtgaagatgttactccaatggaagtaacagcagaaaaaagatcttccactatttttaagactacaaagtctgttggatcaactcagcaaacattagaaaacatctcaaacatagcaggaaatggctctttttcatcaccatcatcttcccacctaccttctgaaaatgaaaaacagcagcagattcagcccaaggcatacaacccagagaccctgacaactattcaaacccaggacatctcacagcctggtacttttccagcagtttctgcttctagtcagctgcccaacagcgatgcactattgcagcaggctacacagtttcagacaagagaaactcagtctagagagatattacagtcagatggtacagtggttaatttgtcacaactgactgaggcatcacaacaacagcagcagtcaccactacaagaacaagcacagactttacagcagcagatttcatcaaatatttttccatcaccaaatagtgtgagtcagcttcagaatactattcagcagctgcaagcagggagtttcacaggcagtactgctagtggcagcagtggaagtgttgacttggtccaacaagttttagaggcacagcagcagttatcttcagttttattttctgctccagatggtaatgagaatgttcaagagcagcttagtgcagatatttttcaacaagtcagtcaaattcagagtggtgtaagccctggaatgttttcctcaacagagccaacagtccataccagaccagataatttattacctggaagagctgaaagtgttcatccacagtctgaaaacacgttatctaatcaacagcagcagcagcagcagcaacagcaagtgatggaatcttcagccgcaatggtgatggagatgcaacagagtatctgccaggcagctgcccagattcagtcagagttattcccttcaactgcttcagcaaatggaaaccttcagcaatcgccagtttaccagcagacttctcacatgatgagtgcattgtctaccaatgaggatatgcaaatgcagtgtgaattgttttcttctcctcctgcagtttctggaaatgaaacttctacaactaccacacagcaggttgcaacccctggcactaccatgtttcagacatcaagttcaggagatggagaagaaactggaacacaagcaaaacagattcagaacagtgtctttcagaccatggtccaaatgcaacatagtggggacaatcaacctcaagttaaccttttttcatccacaaaaagtatgatgagtgttcagaatagtggtacccaacaacaaggtaatggtttattccagcaagggaatgagatgatgtcacttcaatctggaaattttttgcagcagtcttctcattcacaggcccaactttttcatcctcaaaatcctattgccgatgctcagaacctttcccaggaaactcaaggttctctctttcatagtccaaatcctattgtccacagtcagacttctacaacctcctctgaacaaatgcagcctccaatgtttcactctcaaagtaccattgctgtgttacagggctcttcagttcctcaagaccagcagtcaaccaacatatttctttcccagagtcccatgaataatcttcagactaacacagtagcccaagaagcattttttgcagcaccgaactcaatttctccacttcagtcaacatcaaacagtgaacaacaagctgctttccaacagcaagctccaatatcacacatccagactcctatgctttcccaagaacaggcacaacccccgcagcagggtttatttcagcctcaggtggccctgggctcccttccacctaatccaatgcctcaaagccaacaaggaaccatgttccagtcacagcactcaatagttgccatgcagagtaactctccatcccaggaacagcagcagcagcagcaacagcagcagcaacagcagcagcaacaacaacagagcattttattcagtaatcagaataccatggctacaatggcgtctccaaagcaaccaccaccaaacatgatattcaacccaaatcaaaatccaatggctaatcaggagcaacagaaccagtcaatttttcaccaacaaagtaacatggccccaatgaatcaagagcaacagcccatgcaatttcagagtcagtccacagtttcctcacttcagaacccaggtcctacccagtcggaatcatcacagacccccttgttccatagctctcctcagattcagttggtacaagggtcacctagttctcaagagcagcaagtaactctcttcttatctccagcatccatgtctgccttgcagaccagtataaatcaacaagatatgcaacagtctcctctttattcccctcagaacaacatgcctggaattcaaggagccacatcttcgcctcaaccacaggctactttatttcacaacacagcaggaggcacaatgaaccaactgcagaattctcctggctcatctcagcagacatcaggaatgttcttatttggcattcaaaataactgtagtcagcttttaacctctggaccagctacattgcctgatcagttgatggccataagtcagccaggccaaccacaaaacgagggccagccacctgtgacaacacttctttctcagcaaatgccagagaattctccactggcatcctctataaacaccaaccagaacatcgaaaagattgatttgcttgtttcattgcaaaaccaagggaacaacttgactggctccttttaactggatataaattccacgaagaaaatcctgattccaagatgtcctgagatcttgtggttccatgagaattattactttaaaaacaaaacaaaatataaaaaactgtgtttgagtaaactgatagattttactctgactgcaaaagagcacacctatgctgcttgttgcagtaactaaccaccaatgttaacatcttcatattttatattcctaataacagtgatgactgagaatctatttgagtttccagctggcagaattaattgttattattttcctaggcgcaatttccttaaacgtacagtttaaattcaaggctggaccactcagttattattgctattagaaaataatatatcatgtttacttttgttcttcattattttctttcctgcattgttttagtcaagtaatggcttttgaaaaagtaaagttcaataataactaaggctgtgatttttttcaatataaaaggcacagctgttggccaaagtgaaggaatcttttttcagttttattggagaaactgaagggtaacattctaacaagtaaactgtatgtgcagataaaagtactcttgatttaacacaaaggcagatgatacacttataaaactgggaacagctggaatgcttcttgattttattttttcagagagttgttagttctctgggtttctactaaggggtttagccataactgtgcatagaaaaataattatctgtaaaaaatgaaggggataatatatgataaattatgttctgatatcctcctacagtagtttaaattgacagaaaaatttgaatgttttcttcttaacccagtcttaggctggtattccctttttatatatatctatattacttttcacctctttttcactttactttagagaactattaatatactactggcttcatgaccctgtagcatctttggccactttaatctagggtgacctagcaatcctgcagcacagggcagagagtactgtcttaggaattattaggagttgattcctgagaaacaacacatttttccccatgaacggtgctgttctgaagtcttcaaatttttccctctaataggaaacagtataaattttaattaaaaaaaaaaggcaaactaaaatttcttgaaatatcacttctccctgatctgcagtgagtataaattcacttgtcacctcagtgctttacagtttgaagtggtcacttacctgatggttcccacaagccttaggctttacagggttgtatcattgacttaaaatgaagaattaacttgtgttacatctataaagagcaaaataacacactccagaacttggcagttgtagcattagttatacagttttgggtgttcttgccacccgtgggatgcctgcttctcactaccacctgtgtctggacacatgcttatgtctcattttccttttggcatgtggaaagctgtcaatgcagtgtaaggccaacgtgtgtgtggcttctatgtgttgagataatgttttggtatccttgtccgtttcatttattttttaagtgtacaaaaaataacctgttaattgttgaaggctacttttctgttctttttttttttttttttctatcctgtacatttagttgaactgtgcggaattgtggtgttggttttgtttacacagccagatttttccttctttttgttttgtgatgatcttcctttgttctttgaatgtgctcttttgtctttttctcttttttctcatgttttcttccctccacctccacccctttctttctttctctctctgattgagaggcattgaattacgttttcagtagtacaggcttcttgccgatatgaagggaacttttcagaaagagacctactctgggtcatttaattttgaatacagttttcaatcgttcaagttttggatggtttatatctaatgtgtgtttcatttttttggaaagctatattttgtatttaggaaatggtatactattttgctatttgtactgagtgagtacattggcataaatatagaaatttatatatatacatatatataaactattcttttttgccacacatttttgtggtaaatttgtgagtttgtctgatgttctaccacaacgtggcgtctgataacagtgagggggggtggggtttgttatgtctttattgagtatttaagtatcttttgaaacaaatgacctgttcatctgtggccattccatcaggcagttagttccttgatgtcagtagtgggctaaaggcagcttactgtgtgtttgctggagctttcactcagccaagtgttagagtcaggaaacccattgaggcaatggcgtcaaatggtgtttcacaagaatgagccattcagtctttgctcactatatatttaatattttattattgttgttattgttattattaattggctttctgtattctatgccttttatttataaagacactaagaaaacccatgtttgtaattttaataacatttttcccatcttgtaatatccagagctactttataaattctctgaaccaaaagtattttcctcagtgtatctcttctcccccagcccctattgggaaaaattacccagtatagttcaggttatgaggaggatcagccacacaatccagtgcttcagtttgaaaatgtaaaattctaaccctaaagtagggttggttgaaatttcagacaaagcaaacccagcaggtataaaaagtagtataaatacaaatctgtaagttatttttgaattttctgaacttttttctaagagattacataggagactaaagaaatctatctgttcaagttctaattaggatgattgttaatactgcactgtggatgaagtggcgactggcttgtgtgctgacttctgtggtttagcaagaggtttattgttatcaaatgctaattggcaatgccaagtcactgggaccaattttctgttttataatatctaagtttagaacagaatatatacctgaactgtagtggtttgatcggatggagacagaaaacccgatttttattctcataaattttgtggttatttatacaagggctgtgctatgctaccatattcttgttcaataataataggtttgttgttttttttacattgttaaatgttccttacccctaaaggtcaatgttaagtacaacattctgaaaatacaatttggctacgaagagtattcatcttctttgaagctcagtggttgatatttgtgctaataatgcaatttcctgattactgttacaagttatagctacatatgggagagactcagtgagccagcaaaggccatagaaacaacaatttattaaatgtatttatggcagaaggacctaaataaactgtgagccaccttttcttctttatattgttacatttaagtgttcttgctttcagcaactcacattaatgcttggagcttatctctttctctctctctctctctctctctgtgtgtgtgtgtgtatgtgtgtgtgtgtgtgtgtgtgtttccttattgtcattccattatatatccacaccaacatgggtgacgataattcaaagtcatattttgcctctaagcttgatcatgttacctttatgattaaagtatcatgttatttagccaatgcaaatctgttttaaaacaaatagtttaaaaaaagaacaagtttttaagggctttattatagaagaagtattaatgaaggactttccttcctccctccctttcctcccctccctgcctcccttcttcccttccatctccccctcctccctgccttctttgtttctccttcccttattcctccctccctcctttctcccttccttcctttcttccattcatccttccttgccttttatttttattttttgtaatatcacatgtgctgtagtttggaattttattctagtgcatttcttgctcatcagaacctcagctaatctacctaggaaaaatagtatcaaaggaaatgagaaagttgtatctgagtccctccagaactaagataattctttttgaccatttaagcctttataaatgcgttttgaccatttaagcctttataaatgcttgttttaggaaagtgaatctgttagatgcatcaacaaataatgaccaggacaaaacgatttaataattaaagtctcaaatcaccatggttatacattttcaccagaaatagtaatcttacaatttttcatttttctgatgaagatttctgttccaatatctgtttcctaatagattttttaaattaattagctttcctctgctttatgaccacaggttttatccctaaccgagacagctgtcttatatctgcatgccttagactgtgtggagggactccatgaagaaagaccataggttagaaaaataactcatagtatataccctagtaagtgggttagtagaatctcataacatgtattaaaaagaggttttcttctctgcttgtttgtgtcactagagcaaaattgtagagataatgctcataatgcagtaaatatcagaataatatctacaatatcatttgtggatggtcccaggtcccagtgctctagttactttacttctttttttttttttgagatggagtcttgctctgtctctcaggctagagcagtgtgcgatctcagctcactgcagcctccacctcccaggttcaagcgattctcctgcctcagcctcccaagtagccaggattacaggcaccctccactaggcccggctaattttttttgtatttttttagtagagatggggttttgccatgttggccaggctggtttcgaactcctaacctccagtgatccacctgcctcggcgtcccaaagtgctaggattacaggcatgagccaccacatccggcctaattacttctttaatccccatttatttttatgccattctagcctcatttattaataaaattatgtttttactttctctttcaggaaattttttaaattaatattttatatctagatctaatgctatggaaaagtgcctttttatcatttataatttcatttttcactatttccaaaaacacataaacaaatagtttcagtaggtcccagcttttactttttccatttaaaccttcttttctccatttcttccctttggcttaagaataaaagaaaaggtacattgctagaattgtttctttgggagagggtaaaagattacagaattagactgttcagcctttatataaactaaatttgtcttcatctcaaccagctaatggtaggtcttatctgaatactcatgagaattttagcatctgtgaaactccatgcaccagatgtgtgtaaatttcaggaagaaagtgttgaaagcattttctctgatgttaattagatggaaataaatcactaaaacatagtttaggtaaagcctgattatgccacttttttttaactagacagggcaaagttgtttatgttagtgtacttcttgtctatcctcagttaatttacctagacaaaaagtgtcaaaggaaatgagaaaaaggttatatctgactccctccagacctaagataattccttttgatcagatacagtcagatggagtgccttggtttttgttaattttgcctctattccagctccttaccacagcggtggtgcttaaagaaaggatcatcagcaacaggtcaggatagttctacctttgggatagggctgctttccccgtgctagtatttctgtgactgttagtggcactgaggactgcaaacttttatgcaatattcttaataccctattgatattatgcactttaatcattccaaagaagccaagaatgctgtatagtgatgattccttcctaatgaattcatcttaactatttagaatgttatgtcccttttcttttggatagccaacttggtataaatgttatatggatttttctaaaatgactatataggacttaagactttgaaatgtaatttacttataaggggaaataattatgctttagcacatcattttagaaacgtcacattttagaaacattcagcttgctaacctacatgtttgggaattcattaaaaccagttgtctatatattttgtgccatgtatataagaacattacaatatatctttttctacatatgtagtatgtgcaaccagtggttctcagagtatggttctcagcccaccagctagtatcagtatcacctgggaactagttagaaatgtaaattctttggccccatcccagacatactgagtcagaaactctggaatagggcccccgcaatctgttttcacaagccctccaggtgattctgatgcacactttaaagtttaggaaccactgggctaagactctgttgagatatagagtttttcttccactcagactgatatagttatacattgttcttcatgtaaattcagcttaacctggttatctataatcttttattggcaaaagttaattctcagtactgcctatagagatacagtgtattttatgtacatacacaattagtctaattcttgataattcagttaatttagtttggcattttcctaccacttactaaaaggtttacattaaatgactgatttaaatatataggtgcaatgttctatgtttattttaattgttatgacatttaagtagctaatataattgaccggtgctaaagtctcctgtttatccataaaatgggtacattatgggcagtgtaatacaagctttcttttcattgcctagtactttaccagcagaccacagttttgccctggctagaccaaccctcagaacaaaatcatcattccttgtatttatatttgtatctgagatagtaaacaagatggctggccaggtcaacatggcaccttaacttatttttttaataggtaaaacttcttcaaaagtagcttgctttgtataagaactaagctatcagtatagatatagctatccttggagcttatgtttcagacaagaattatttactaaaataaataataaacaagataatgcattatacaatttgggcatttctcgtttctcaagtgtatgcatcatggtaaatataaactaaccacaagataggtagattgattcatttcattttaatctccttgtgtaattcagtacctccataattgttctaatcttcttcccactgtttacaaattaccagttaattaactcgtgaaagaaaaattcacatatcagaataaaaataaatgtatactcactttataaaaatcaccactgctgtctttccttaatactagcagtggaaatgtaagtggcttactctacaaattttggtgctggcaaatacataggcaaactgttgggagctgctctagttacattcctcccttcttattccctttttctcttcctcactttattgcataacatattcctgtacccaaagcattctaccacagttctatttgactcccacttgtaataactcctttaaaaaattccatgtttaaccatatgaccctgcttgcttactcatattctccctccctctccccttcctttctctctcttccagaagtcatttgcctggtttgaaatattttgtagggattgcttattatattattttagctgatgaacctcaggacaacgtctacacacacacacatacatacacgcacacaaaatctcagctgttgaagagtgggcttggaatcagacttctgtgtccagtaaaaaactcctgcactgaagtcattgtgacttgagtagttacagactgattccagtgaacttgatctaatttcttttgatctaatgaatgtgtctgcttaccttgtttccttttaattgataagctccaagtagttgctaattttttgacaactttaaatgagtttcattcacttcttttacttaatgttttaagtatagtaccaataatttcattaacctgttctcaagtggtttagctaccattctgccatttttaatttttatttaattttatttgcttgagcacactgatcaaccactgaactgccttcttccattgtcctgcaatgatataagggttacatttttgtgtatatggctttcatagttgggatttcagagcactgataccagatattttcagtttgttctctgggggaatttcatttgcatctatgtttttagctatctgtgataacttgttaaatattaaaaagatattttgcttctattggaacatttgtatactcgcaactatatttctgtaaacagctgcagtcaaaaataaaacactgaaagttaaaaaaaaaaaaaaaaaaaa

SEQ ID NO: 13057 - DNA, 3511 bp, Homo sapiens
ggaagccagacagctggctcgagcctctcctgctcagcaccatggctaagacccctagtgaccatctgctgtccaccctggaggagctggtgccctatgacttcgagaagttcaagttcaagctgcagaacaccagtgtgcagaaggagcactccaggatcccccggagccagatccagagagccaggccggtgaagatggccactctgctggtcacctactatggggaagagtacgccgtgcagctcaccctgcaggtcctgcgggccatcaaccagcgcctgctggccgaggagctccacagggcagccattcaggaatattccacacaagaaaacggcacagatgattccgcagcgtccagctccctgggggagaacaagcccaggagcctgaagactccagaccaccccgaggggaacgaggggaacggccctcggccgtacgggggcggagctgccagcctgcggtgcagccagcccgaggccgggagggggctgtcgaggaagcccctgagcaaacgcagagagaaggcctcggagggcctggacgcgcagggcaagcctcggacccggagcccggccctgccgggcgggagaagccccggcccctgcagggcgctagaggggggccaggccgaggtccggctgcgcagaaacgccagctccgcggggaggctgcaggggctggcggggggcgccccggggcagaaggagtgcaggcccttcgaagtgtacctgccctcgggaaagatgcgacctagaagccttgaggtcaccatttctacaggggagaaggcgcccgcaaatccagaaattctcctgactctagaggaaaagacagctgcgaatctggactcggcaacagaaccccgggcaaggcccactccggatggaggggcatctgcggacctgaaggaaggccctggaaatccagaacattcggtcaccggaaggccaccagacacggctgcgagtccccgctgccacgcccaggaaggagacccagttgacggtacctgtgtgcgtgattcctgcagcttccccgaggcagtttctgggcacccccaggcctcaggcagccgctcacctggctgcccccggtgccaggactcccatgaaaggaagagcccgggaagcctaagcccccagcccctgccacagtgtaagcgccacctgaagcaggtccagctgctcttctgtgaggatcacgatgagcccatctgcctcatctgcagtctgagtcaggagcaccaaggccaccgggtgcgccccattgaggaggtcgccctggaacacaagaagaaaattcagaagcagctggagcatctgaagaagctgagaaaatcaggggaggagcagcgatcctatggggaggagaaggcagtgagctttctgaaacaaactgaagcgctgaagcagcgggtgcagaggaagctggagcaggtgtactacttcctggaacagcaggagcatttctttgtggcctcactggaggacgtgggccagatggttgggcagatcaggaaggcatatgacacccgcgtatcccaggacatcgccctgctcgatgcgctgattggggaactggaggccaaggagtgccagtcagaatgggaacttctgcaggacattggagacatcttgcacagggctaagacagtgcctgtccctgaaaagtggaccactcctcaagagataaaacaaaagatccaactcctccaccagaagtcagagtttgtggagaagagcacaaagtacttctcagaaaccctgcgttcagaaatggaaatgttcaatgttccagagctgattggcgctcaggcacatgctgttaatgtgattctggatgcagaaaccgcttaccccaacctcatcttctctgatgatctgaagagtgttagacttggaaacaagtgggagaggctgcctgatggcccgcaaagatttgacagctgtatcattgttctgggctctccgagtttcctctctggccgccgttactgggaggtggaggttggagacaagacagcatggatcctgggagcctgcaagacatccataagcaggaaagggaacatgactctgtcgccagagaatggctactgggtggtgataatgatgaaggaaaatgagtaccaggcgtccagcgttcccccgacccgcctgctaataaaggagcctcccaagcgtgtgggcatcttcgtggactacagagttggaagcatctccttttacaatgtgacagccagatcccacatctatacattcgccagctgctctttctctgggccccttcaacctatcttcagccctgggacacgtgatggagggaagaacacagctcctctgactatctgtccagtgggtggtcaggggcctgactgaatgcccaacactgcatctctcttcctgcttctggccttgtatcttgcattcacactcaatagtcacggaatgccgactaggtgctagctgctatgggaaatgcaaaaataacaaaatagttactgtgcccacggagcctacccgattatagcagaggtaagttaggaacgaacatgttagtcaatccgggtgaagacatgtactgatgacacaccatggatttcagaggaggaagtacggagtcgttgcataatccgcccctggtgggtggcactctcaggtgctcctgaacagaagatttggccctcattttccctcagaaccccacggcaaggatatatgtccccttgttctctctgcttctgtcttgaggatatgggaagcctagagaaacgcaagcagactggattgggatagaagtatttgtgtacctggattaatgaactatgattttttttttttttttttgagaccaaatcttgctctgtggcccaggctggagtgcagtggcacgatctcagctcactgcaacctccacctcccaggttcaagcgattctcctgcctcagcctcctgagcagctgggattacaggtgcgtgccaccacaccaggctggttttcttgtatttttagtagagacgggggtttcaccatgttagccaggctggtctcgaactcctgacctcaggtgatccacccgcctcagcctcccaaagtgctgggattacaggcatgagccactgtgcccggcctatgattcttttttttttttttttttgagacaaagttttgctcttgtcacccaggctggagtgcagtggtgcaatcttggctcactgcaacctccgcctcccaggttcaagagattctcctgcctcagcctccgaagtagctgggattacaggcgcccgccaccatgcccggctaattttttgcatttttagtagacatgaggtttcatcatgttggccaggccggtctcaaactcctgacctcaggtgatgcacccacctcagcctcccaaagtgcagggattacaggcatgagccaccatgcctggccatgattcttaagagaattgactgggcctcatgaataaaaaaattagaaaatctaaaaaaaa

SEQ ID NO: 13058 - DNA, 1700 bp, Homo sapiens
ggcggcggcagcgggttcggttgcgcgtggcgcacggggtgggagcggagcccaggccgggagcaggcgccgccgccagcgaccatggggaacgtgttggctgccagctcgccgcccgcagggccgccaccgccgcctgcgccggccctcgtggggctgccgccacctccgccctcgccgccgggcttcacgctgccgccgctgggaggcagcctgggcgccggcaccagtacgagtcgaagttcggaacggacccccggggctgcaaccgccagcgcctcaggggccgccgaggatggggcctgcggctgcctgcccaacccgggcacattcgaggagtgccaccggaagtgcaaggagctgtttcccattcagatggagggtgtcaagctcacagtcaacaaagggttgagtaaccattttcaggtcaaccacacagtagccctcagcacaatcggggagtccaactaccacttcggggtcacatatgtggggacaaagcagctgagtcccacagaggcgttccctgtactggtgggtgacatggacaacagtggcagtctcaacgctcaggtcattcaccagctgggccccggtctcaggtccaagatggccatccagacccagcagtcgaagtttgtgaactggcaggtggacggggagtatcggggctctgacttcacagcagccgtcaccctggggaacccagacgtcctcgtgggttcaggaatcctcgtagcccactacctccagagcatcacgccttgcctggccctgggtggagagctggtctaccaccggcggcctggagaggagggcactgtcatgtctctagctgggaaatacacattgaacaactggttggcaacggtaacgttgggccaggcgggcatgcacgcaacatactaccacaaagccagtgaccagctgcaggtgggtgtggagtttgaggccagcacaaggatgcaggacaccagcgtctccttcgggtaccagctggacctgcccaaggccaacctcctcttcaaaggctctgtggatagcaactggatcgtgggtgccacgctggagaagaagctcccacccctgcccctgacactggcccttggggccttcctgaatcaccgcaagaacaagtttcagtgtggctttggcctcaccatcggctgagccctcctggcccccgccttccacgcccttccgattccacctccacctccacctccccctgccacagaggggagacctgagcccccctcccttccctccccccttgggggtcggggggggacattggaaaggagggaccccgccaccccagcagctgaggaggggattctggaactgaatggcgcttcgggattctgagtagcaggggcagcatgcccagtgggcctggggtcccgggagggattccggaattgaggggcacgcaggattctgagcaccaggggcagaggcggccagacaacctcagggaggagtgtcctggcgtccccatcctccaaagggcctgggcccgccccgagggggcagcgagaggagcttccccatccccggtcagtccaccctgccccgtccactttcccatctcctcggtataaatcatgtttataagttatggaagaaccgggacattttacagaaaaaaaacaaaaaacaacaaaaaatatacgtgggaaaaaaaaaaaaaaaaaaaa

SEQ ID NO: 13059 - DNA, 2164 bp, Homo sapiens
cttccagctggtgggagttgacgacgtggtgctgggcgttgggaccctactttatctagttcgggaagttgggttgtggggtcatacctgtctgtctgctcccagctttcttgggtttcttccgacggcgtggggcctcgctaaggaattcccggcccctcagggccacggctttagcggtgtcttttgcgagttcttcgtaagtacatcttaaagctgtcaagatggttctagcagaccttggaagaaaaataacatcagcattacgctcattgagcaatgccaccattatcaatgaagaggtattgaatgctatgctaaaagaagtctgtaccgctttgttggaagcagatgttaatattaaactagtgaagcaactaagagaaaatgttaagtctgctattgatcttgaagagatggcatctggtcttaacaaaagaaaaatgattcagcatgctgtatttaaagaacttgtgaagcttgtagaccctggagttaaggcatggacacccactaaaggaaaacaaaatgtgattatgtttgttggattgcaagggagtggtaaaacaacaacatgttcaaagctagcatattattaccagaggaaaggttggaagacctgtttaatatgtgcagacacattcagagcaggggcttttgaccaactaaaacagaatgctaccaaagcaagaattccattttatggaagctatacagaaatggatcctgtcatcattgcttctgaaggagtagagaaatttaaaaatgaaaattttgaaattattattgttgatacaagtggccgccacaaacaagaagactctttgtttgaagaaatgcttcaagttgctaatgctatacaacctgataacattgtttatgtgatggatgcctccattgggcaggcttgtgaagcccaggctaaggcttttaaagataaagtagatgtagcctcagtaatagtgacaaaacttgatggccatgcaaaaggaggtggtgcactcagtgcagtcgctgccacaaaaagtccgattattttcattggtacaggggaacatatagatgactttgaacctttcaaaacacagccttttattagcaaacttcttggtatgggcgacattgaaggactgatagataaagtcaacgagttgaagttggatgacaatgaagcacttatagagaagttgaaacatggtcagtttacgttgcgagacatgtatgagcaatttcaaaatatcatgaaaatgggccccttcagtcagatcttggggatgatccctggttttgggacagattttatgagcaaaggaaatgaacaggagtcaatggcaaggctaaagaaattaatgacaataatggatagtatgaatgatcaagaactagacagtacggatggtgccaaagtttttagtaaacaaccaggaagaatccaaagagtagcaagaggatcgggtgtatcaacaagagatgttcaagaacttttgacacaatataccaagtttgcacagatggtaaaaaagatgggaggtatcaaaggacttttcaaaggtggcgacatgtctaagaatgtgagccagtcacagatggcaaaattgaaccaacaaatggccaaaatgatggatcctagggttcttcatcacatgggtggtatggcaggacttcagtcaatgatgaggcagtttcaacagggtgctgctggcaacatgaaaggcatgatgggattcaataatatgtaaagaaaatgccttaatataaactgactcagttgaatacctaatttgctgagacctcagcgtttcccttctttttgcgaattggggggaaagtgtatttttcttgcttatcatgcactctttccttttcttctcgcccgcttttcccctccttttctttttccttccttctttcctccctttaatataagggagaaatacatggtttttgtggaaatcattatatgtttgctttagattttcttctgttttcaccatcataacacttaagttaaatcatgatgtaaaattttagtacttaaaggtttttaattatctcgaaggccaagcattgcatttgtaaacagtcctggtcagtagttaaataatgtttcaattaaagtgctgtaaaataaacttcaaagtggttataaaaaaaaaaaaaaaaa

SEQ ID NO: 13060 - DNA, 2105 bp, Homo sapiens
tgcgaggcagctcgctcgttctgcgatctattgagagtggcttccaagagccccgtgcctatgtctgggagggagggaagatggcagccgtggcggcaggcggcctggtgggaaaggggcgcgacatcagcctagcggccctgcagcgccacgacccctatatcaaccgcatcgtggacgtggccagccaggtggctctgtacaccttcggccatcgggccaacgagtgggagaaaactgatgtggaaggaaccttatttgtttatacaaggtctgcttctccaaagcatggattcaccattatgaataggctgagcatggaaaataggacagaacctattactaaagacttggatttccaactccaggaccctttccttctctacagaaatgccagattgtccatctatggaatttggttttatgataaggaagaatgccaaagaattgcagagcttatgaaaaacctaactcagtatgaacagttgaaagcccatcagggaactggagcaggaatttccccagtgatcctcaattcaggagagggcaaagaagtagacattttacgaatgctcatcaaggccaaagacgaatacacaaagtgtaaaacctgttctgagccaaaaaagataaccagttcctctgccatctatgacaatccaaatctcatcaaaccaattccagtgaaacccagtgaaaaccagcaacagcgtatacctcagcccaaccagaccttagaccctgaaccccaacacttatccttgacagctctgtttgggaagcaggacaaagctacatgtcaggaaactgtggagcctccgcagactctccaccagcagcagcagcagcagcagcagcagcaagagaagcttccaattaggcagggggttgtacgctccctgtcctatgaggaacccagaagacactcaccccccattgagaagcagctctgtccagccattcagaaactcatggtcaggagcgcagacctccacccattgtcagagctgcctgaaaaccggccttgtgaaaatggcagtacccattctgcgggagaattttttacaggacctgtccagccagggtctcctcacaacattggaacttctcgtggtgtacaaaatgcttccagaactcagaacctgttcgagaaacttcagagtaccccaggggcagcaaacaagtgtgaccctagtacaccagcacctgccagctcagctgccctgaaccgcagcagagctcccacttctgtcacccctgtggctccaggaaagggtctggctcagccaccacaggcctatttcaatggctcccttccacctcagacagtaggacatcaggctcatggaagagaacagtccacactcccaagacaaacactccccatctctggtagtcagactggcagctctggagtgatctcccctcaagagttactgaagaagcttcagattgtacagcaggagcagcagctgcatgcctctaaccggccagccttggccgctaagtttcctgtgctcgctcagagctctggaacagggaaacccttggaatcctggatcaacaagacacccaacacagaacagcagactcctcttttccaggtcatctcacctcagcgcatccctgctacagcagctccgtctctgcttatgtcccccatggtgttcgcacaacccacctccgtcccgccaaaggaaagggagagcggcctcttgcctgtgggaggccaggagccacctgctgctgccaccagcctcctcctgcccatacagagcccggagccctccgtgatcaccagcagcccactcaccaagctccagctccaggaggcactgctgtacctcattcagaatgatgacaacttcttaaatataatctatgaagcctatctcttcagcatgactcaagcagccatgaaaaagactatgtgacagcaaggccttttaaaactgattttcaaggtccttctagaactccggcacaaggttctttcatgttgagtgttgtttccttcaatgtttctgccttttttaaaaaaaaagtatgtgtaatatgaagtaaaatgtttcagacttttttttatactcaaaaaaaaaaaaaaa

SEQ ID NO: 13061 - DNA, 2236 bp, Homo sapiens
aacaggcaggaagaaagctttctgtactacaccagagggttggggctgtggatttagctactctcacctgaggctactgagcaagttgtcatgcaccatgagacaaagcccaagctgtcccaccaggcagtaagtatggagaggttcaggcacatggcatagctgctatttcgcacaattttcactacaccagtggtgacaaaatagaagaggttcatccatacacagaacctggtgaagagctggaggcagaaagaagtgtctatgtggagacgcaactgaaacaaaggtggcacagcaactgttccaatcccgtgtctttcctcatggcttcccaggagtttgaggttgaagctattgttgacaaaagacaggataaaaatgggaatacacagtatttggttcggtggaaaggttatgacaaacaggatgacacttgggaaccagagcagcacctcatgaactgtgaaaaatgtgtacatgattttaatagacgacagactgaaaaacagaaaaaactgacatggactacaaccagtagaattttttcaaacaatgccagaagaagaacttccagatctacaaaagcaaactattctaagaactctcctaaaacgccagtgactgataaacaccacaggtccaaaaaccgcaagttatttgctgccagcaagaacgttaggagaaaggcagcttcaattctctccgacacaaagaatatggagataataaattcaactattgagacccttgcacctgacagcccctttgaccacaaaactgtgagtggctttcagaaacttgagaaactggaccctattgcagcagatcagcaggacacggtggtcttcaaggtgacagaagggaaactcctccgggaccctttgtcacgtcctggtgcagaacagactggaatacagaacaagactcagatacacccactaatgtcgcagatgtctggctcagttactgcttctatggccacaggttcagctacccgaaagggtatagtggtattaatagacccattagcagccaatgggacaacagacatgcatacctcagttccaagagtgaaaggtgggcaaagaaatattactgatgacagcagagaccagccttttatcaagaagatgcacttcaccataaggctaacagaaagtgccagcacatacagagacattgtagtgaagaaagaggatggattcacccagatagtgctatcaactagatcgacagaaaaaaatgcactgaatacagaagtaattaaagaaatagttaatgctctgaatagcgctgctgcagatgacagcaagctcgtgctgttcagtgcagctggaagtgtcttttgctgcggtcttgattttgggtactttgtgaagcacttaaggaataacagaaacacagcaagccttgaaatggtggacaccatcaagaactttgtgaatacttttattcaatttaaaaagcctattgttgtatcagtcaatggccctgcgattggactaggtgcatccatcctgcctctttgtgatctcgtgtgggctaatgaaaaggcttggttccaaaccccttatacgacctttggacagagtccagatggctgttcttctattacattccccaaaatgatgggtaaagcatctgccaatgaaatgttaattgctgggcgaaagctgacagcaagggaggcatgcgccaaaggcctggtctctcaggtatttttgactggaactttcacccaagaggttatgattcaaattaaggagcttgcctcatacaatccaattgtactggaagaatgtaaggccctcgttcgctgtaatattaagttggagttggaacaggccaatgagagagagtgtgaggtgctgaggaagatctggagctcagcccaagggatagaatccatgttaaagtatgttgaaaataaaattgatgagttttaattgtcagtctgtctgctcaggacacaagaactaaggggcaacaaatgcatcatgagttgcaagatgccctaatccatcttcatagcccaaaacaatttcacccatagctaaggcttggaaacagaactggaaatgtccaagctatgtatttaaattatcacatcatttttaagcactgtagctttacaaggagtaacaaaacagcctctttgcccaaatgtgattattttatgcacacctaagcccaaatataaaaacagactcttcttgcaaaaaaaaaaaaaaaa

SEQ ID NO: 13062 - DNA, 2373 bp, Homo sapiens
aacaggcaggaagaaagctttctgtactacaccagagggttggggctgtggatttagctactctcacctgaggctactgagcaagttgtcatgcaccatgagacaaagcccaagctgtcccaccaggcagtaagtatggagaggttcaggcacatggcatagctgctatttcgcacaattttcactacaccagtggtgacaaaatagaagaggttcatccatacacagaacctggtgaagagctggaggcagaaagaagtgtctatgtggagacgcaactgaaacaaaggtggcacagcaactgttccaatcccgtgtctttcctcatggcttcccaggagtttgaggttgaagctattgttgacaaaagacaggataaaaatgggaatacacagtatttggttcggtggaaaggttatgacaaacaggatgacacttgggaaccagagcagcacctcatgaactgtgaaaaatgtgtacatgattttaatagacgacagactgaaaaacagaaaaaactgacatggactacaaccagtagaattttttcaaacaatgccagaagaagaacttccagatctacaaaagcaaactattctaagaactctcctaaaacgccagtgactgataaacaccacaggtccaaaaaccgcaagttatttgctgccagcaagaacgttaggagaaaggcagcttcaattctctccgacacaaagaatatggagataataaattcaactattgagacccttgcacctgacagcccctttgaccacaaaactgtgagtggctttcagaaacttgagaaactggaccctattgcagcagatcagcaggacacggtggtcttcaaggtgacagaagggaaactcctccgggaccctttgtcacgtcctggtgcagaacagactggaatacagaacaagactcagatacacccactaatgtcgcagatgtctggctcagttactgcttctatggccacaggttcagctacccgaaagggtatagtggtattaatagacccattagcagccaatgggacaacagacatgcatacctcagttccaagagtgaaaggtgggcaaagaaatattactgatgacagcagagaccagccttttatcaagaagatgcacttcaccataaggctaacagaaagtgccagcacatacagagacattgtagtgaagaaagaggatggattcacccagatagtgctatcaactagatcgacagaaaaaaatgcactgaatacagaagtaattaaagaaatagttaatgctctgaatagcgctgctgcagatgacagcaagctcgtgctgttcagtgcagctggaagtgtcttttgctgcggtcttgattttgggtactttgtgaagcacttaaggaataacagaaacacagcaagccttgaaatggtggacaccatcaagaactttgtgaatacttttattcaatttaaaaagcctattgttgtatcagtcaatggccctgcgattggactaggtgcatccatcctgcctctttgtgatctcgtgtgggctaatgaaaaggcttggttccaaaccccttatacgacctttggacagagtccagatggctgttcttctattacattccccaaaatgatgggtaaagcatctgccaatgaaatgttaattgctgggcgaaagctgacagcaagggaggcatgcgccaaaggcctggtctctcaggtatttttgactggaactttcacccaagaggttatgattcaaattaaggagcttgcctcatacaatccaattgtactggaagaatgtaaggccctcgttcgctgtaatattaagttggagttggaacaggccaatgagagagagtgtgaggtgctgaggaagatctggagctcagcccaagggatagaatccatgttaaaaatacctctgttgggatataaagcagccttccctcccagaaagacacagaatgatcagagatggtgcccttgactttatagtggcacaaacgcttcagagacacacaattataagagacttatcttttagcataaatacttatggctcaaaatccactgacgatcattctcctaaactgaacacatgactagaattggtggtgagatatcgcttgattttcttttcctttataaatgtctagttcttacccagttaacaaaagaaaactttatcgctctaaagtaaaacttgttacaccacattagtgaattatggaatgattttggtggaaatatccaggttctaatgtgtggaatgtgcagatttaggttactttagtgtatgttctagttaataagttaaaattctggacacattattaaaggcagaaacttctttcaaagcaaaaaaaaaa

SEQ ID NO: 13063 - DNA, 1887 bp, Homo sapiens
ctgcaaaagttggagaaggtgtggcagtcctcatttctgtggaatctgaagaagcccacgcagattttaattcccactctagattctgtatctagatcaccatggcgactggacagaagttgatgagagctgttagagtttttgaatttggtgggccagaagtcctgaaattgcgatcagatattgcagtaccgattccaaaagaccatcaggttctaatcaaggtccatgcatgtggtgtcaaccccgtggagacatacattcgctctggtacttatagtagaaaaccactcttaccctatactcctggctcagatgtggctggggtgatagaagctgttggagataatgcatctgctttcaagaaaggtgacagagttttcactagcagcacgatctctgggggttatgcagagtatgctcttgcagcagaccacactgtttacaaactacctgaaaaactggactttaaacaaggagctgccatcggcattccatattttactgcttatcgagctctgatccacagtgcctgtgtgaaagctggagagagtgttctggttcatggggcaagtggaggagttggattagcagcatgccaaattgctagagcttatggcttaaagattttgggcactgctggtactgaggaaggacaaaagattgttttgcaaaatggagcccatgaagtgttcaatcacagagaagtgaattacattgataaaattaagaagtatgttggtgagaaaggaattgatataattattgaaatgttagctaatgtaaatcttagtaaagacttgagtcttctgtcacatggaggacgagtgatagttgttggcagcagaggtactattgaaataaacccacgagacaccatggcaaaggagtcgagtataattggagttactctcttttcctcaaccaaggaggaatttcagcaatatgcagcagcccttcaagctggaatggaaattggctggttgaaacctgtgataggttctcaatatccattggagaaggtggccgaggctcatgaaaatatcattcatggtagtggggctactggaaaaatgattcttctcttatgatgattaattctttcatggatttcctatgtaattagaggtactgtctttcccccagttgtacttaccctatcttttctttaattaacattcgattccatgagcttcttatgtgaaaaaataagatttttctttagagagcagaagcagaagagtaaaatttattgtatagctagcaatatttttttatgccatctgtctcaaatcaaagagtcatcatagtaggaaataacatgttagttgtcatttggcatgagtgtgcattccagtaattcttaattgatatttgattaattccatacctttgattaaaacatgctagttcaaaataagactgctcagtttccaagggttttcaagcctacttacctttataaaggttctctagtctctgattagccatgactgtattggactttgaacattttctgaactaaaaacctctattctaaactaatctcatttggatgtgtaagtcttttgtaaaggcaagaataaataatatccaggacaatttattagttttctcagtattttcccaaatattagaatatttacttcattattggttggctgccaatgaccccatatgttctgtgagaatagtagctttatctttgatataatacatagtctccaaataggtaatacttcgcaattgattagattttcagagtagatttagagttatctgtttttctggtgagggtcaaatatttttgttaattaagctcacaaatttgataaattaagaattatctgcatttgtctggtaacataataatgtgtaataaagtct

SEQ ID NO: 13064 - DNA, 1613 bp, Homo sapiens
cgagcttggctgcttctggggcctgtgtggccctgtgtgtcggaaagatggagcaagaagccgagcccgaggggcggccgcgacccctctgaccgagatcctgctgctttcgcagccaggagcaccgtccctccccggattagtgcgtacgagcgcccagtgccctggcccggagagtggaatgatccccgaggcccagggcgtcgtgcttccgcgcgccccgtgaaggaaactggggagtcttgagggacccccgactccaagcgcgaaaaccccggatggtgaggagcaggcaaatgtgcaataccaacatgtctgtacctactgatggtgctgtaaccacctcacagattccagcttcggaacaagagaccctggttagaccaaagccattgcttttgaagttattaaagtctgttggtgcacaaaaagacacttatactatgaaagaggttcttttttatcttggccagtatattatgactaaacgattatatgatgagaagcaacaacatattgtatattgttcaaatgatcttctaggagatttgtttggcgtgccaagcttctctgtgaaagagcacaggaaaatatataccatgatctacaggaacttggtagtagtcaatcagcaggaatcatcggactcaggtacatctgtgagtgagaacaggtgtcaccttgaaggtgggagtgatcaaaaggaccttgtacaagagcttcaggaagagaaaccttcatcttcacatttggtttctagaccatctacctcatctagaaggagagcaattagtgagacagaagaaacccaagacaaagaagagagtgtggaatctagtttgccccttaatgccattgaaccttgtgtgatttgtcaaggtcgacctaaaaatggttgcattgtccatggcaaaacaggacatcttatggcctgctttacatgtgcaaagaagctaaagaaaaggaataagccctgcccagtatgtagacaaccaattcaaatgattgtgctaacttatttcccctagttgacctgtctataagagaattatatatttctaactatataaccctaggaatttagacaacctgaaatttattcacatatatcaaagtgagaaaatgcctcaattcacatagatttcttctctttagtataattgacctactttggtagtggaatagtgaatacttactataatttgacttgaatatgtagctcatcctttacaccaactcctaattttaaataatttctactctgtcttaaatgagaagtacttggtttttttttttcttaaatatgtatatgacatttaaatgtaacttattattttttttgagaccgagtcttgctctgttacccaggctggagtgcagtggcgtgatcttggctcactgcaagctctgcctcccgggttcgcaccattctcctgcctcagcctcccaattagcttggcctacagtcatctgccaccacacctggctaattttttgtacttttagtagagacagggtttcaccgtgttagccaggatggtctcgatctcctgacctcgtgatccgcccacctcggcctcccaaagtgctgggattacaggcatgagccaccg

SEQ ID NO: 13065 - DNA, 1143 bp, Homo sapiens
cgagcttggctgcttctggggcctgtgtggccctgtgtgtcggaaagatggagcaagaagccgagcccgaggggcggccgcgacccctctgaccgagatcctgctgctttcgcagccaggagcaccgtccctccccggattagtgcgtacgagcgcccagtgccctggcccggagagtggaatgatccccgaggcccagggcgtcgtgcttccgcgcgccccgtgaaggaaactggggagtcttgagggacccccgactccaagcgcgaaaaccccggatggtgaggagcaggcaaatgtgcaataccaacatgtctgtacctactgatggtgctgtaaccacctcacagattccagcttcggaacaagagaccctggttagaccaaagccattgcttttgaagttattaaagtctgttggtgcacaaaaagacacttatactatgaaagaggttcttttttatcttggccagtatattatgactaaacgattatatgatgagaagcaacaacatattgtatattgttcaaatgattgtgctaacttatttcccctagttgacctgtctataagagaattatatatttctaactatataaccctaggaatttagacaacctgaaatttattcacatatatcaaagtgagaaaatgcctcaattcacatagatttcttctctttagtataattgacctactttggtagtggaatagtgaatacttactataatttgacttgaatatgtagctcatcctttacaccaactcctaattttaaataatttctactctgtcttaaatgagaagtacttggtttttttttttcttaaatatgtatatgacatttaaatgtaacttattattttttttgagaccgagtcttgctctgttacccaggctggagtgcagtggcgtgatcttggctcactgcaagctctgcctcccgggttcgcaccattctcctgcctcagcctcccaattagcttggcctacagtcatctgccaccacacctggctaattttttgtacttttagtagagacagggtttcaccgtgttagccaggatggtctcgatctcctgacctcgtgatccgcccacctcggcctcccaaagtgctgggattacaggcatgagccaccg

SEQ ID NO: 13066 - DNA, 2357 bp, Homo sapiens
cgagcttggctgcttctggggcctgtgtggccctgtgtgtcggaaagatggagcaagaagccgagcccgaggggcggccgcgacccctctgaccgagatcctgctgctttcgcagccaggagcaccgtccctccccggattagtgcgtacgagcgcccagtgccctggcccggagagtggaatgatccccgaggcccagggcgtcgtgcttccgcgcgccccgtgaaggaaactggggagtcttgagggacccccgactccaagcgcgaaaaccccggatggtgaggagcaggcaaatgtgcaataccaacatgtctgtacctactgatggtgctgtaaccacctcacagattccagcttcggaacaagagaccctggttagaccaaagccattgcttttgaagttattaaagtctgttggtgcacaaaaagacacttatactatgaaagaggttcttttttatcttggccagtatattatgactaaacgattatatgatgagaagcaacaacatattgtatattgttcaaatgatcttctaggagatttgtttggcgtgccaagcttctctgtgaaagagcacaggaaaatatataccatgatctacaggaacttggtagtagtcaatcagcaggaatcatcggactcaggtacatctgtgagtgagaacaggtgtcaccttgaaggtgggagtgatcaaaaggaccttgtacaagagcttcaggaagagaaaccttcatcttcacatttggtttctagaccatctacctcatctagaaggagagcaattagtgagacagaagaaaattcagatgaattatctggtgaacgacaaagaaaacgccacaaatctgatagtatttccctttcctttgatgaaagcctggctctgtgtgtaataagggagatatgttgtgaaagaagcagtagcagtgaatctacagggacgccatcgaatccggatcttgatgctggtgtaagtgaacattcaggtgattggttggatcaggattcagtttcagatcagtttagtgtagaatttgaagttgaatctctcgactcagaagattatagccttagtgaagaaggacaagaactctcagatgaagatgatgaggtatatcaagttactgtgtatcaggcaggggagagtgatacagattcatttgaagaagatcctgaaatttccttagctgactattggaaatgcacttcatgcaatgaaatgaatcccccccttccatcacattgcaacagatgttgggcccttcgtgagaattggcttcctgaagataaagggaaagataaaggggaaatctctgagaaagccaaactggaaaactcaacacaagctgaagagggctttgatgttcctgattgtaaaaaaactatagtgaatgattccagagagtcatgtgttgaggaaaatgatgataaaattacacaagcttcacaatcacaagaaagtgaagactattctcagccatcaacttctagtagcattatttatagcagccaagaagatgtgaaagagtttgaaagggaagaaacccaagacaaagaagagagtgtggaatctagtttgccccttaatgccattgaaccttgtgtgatttgtcaaggtcgacctaaaaatggttgcattgtccatggcaaaacaggacatcttatggcctgctttacatgtgcaaagaagctaaagaaaaggaataagccctgcccagtatgtagacaaccaattcaaatgattgtgctaacttatttcccctagttgacctgtctataagagaattatatatttctaactatataaccctaggaatttagacaacctgaaatttattcacatatatcaaagtgagaaaatgcctcaattcacatagatttcttctctttagtataattgacctactttggtagtggaatagtgaatacttactataatttgacttgaatatgtagctcatcctttacaccaactcctaattttaaataatttctactctgtcttaaatgagaagtacttggtttttttttttcttaaatatgtatatgacatttaaatgtaacttattattttttttgagaccgagtcttgctctgttacccaggctggagtgcagtggcgtgatcttggctcactgcaagctctgcctcccgggttcgcaccattctcctgcctcagcctcccaattagcttggcctacagtcatctgccaccacacctggctaattttttgtacttttagtagagacagggtttcaccgtgttagccaggatggtctcgatctcctgacctcgtgatccgcccacctcggcctcccaaagtgctgggattacaggcatgagccaccg

SEQ ID NO: 13067 - DNA, 4516 bp, Homo sapiens
atggagaagctgcaccagtgttattggaaatcaggagaacctcagtctgacgacattgaagctagccgaatgaagcgagcagctgcaaagcatctaatagaacgctactaccaccagttaactgagggctgtggaaatgaagcctgcacgaatgagttttgtgcttcctgtccaacttttcttcgtatggataataatgcagcagctattaaagccctcgagctttataagattaatgcaaaactctgtgatcctcatccctccaagaaaggagcaagctcagcttaccttgagaactcgaaaggtgcccccaacaactcctgctctgagataaaaatgaacaagaaaggcgctagaattgattttaaagatgtgacttacttaacagaagagaaggtatatgaaattcttgaattatgtagagaaagagaggattattcccctttaatccgtgttattggaagagttttttctagtgctgaggcattggtacagagcttccggaaagttaaacaacacaccaaggaagaactgaaatctcttcaagcaaaagatgaagacaaagatgaagatgaaaaggaaaaagctgcatgttctgctgctgctatggaagaagactcagaagcatcttcctcaaggataggtgatagctcacagggagacaacaatttgcaaaaattaggccctgatgatgtgtctgtggatattgatgccattagaagggtctacaccagattgctctctaatgaaaaaattgaaactgcctttctcaatgcacttgtatatttgtcacctaacgtggaatgtgacttgacgtatcacaatgtatactctcgagatcctaattatctgaatttgttcattatcgtaatggagaatagaaatctccacagtcctgaatatctggaaatggctttgccattattttgcaaagcgatgagcaagctaccccttgcagcccaaggaaaactgatcagactgtggtctaaatacaatgcagaccagattcggagaatgatggagacatttcagcaacttattacttataaagtcataagcaatgaatttaacagtcgaaatctagtgaatgatgatgatgccattgttgctgcttcgaagtgcttgaaaatggtttactatgcaaatgtagtgggaggggaagtggacacaaatcacaatgaagaagatgatgaagagcccatccctgagtccagcgagctgacacttcaggaacttttgggagaagaaagaagaaacaagaaaggtcctcgagtggaccccctggaaactgaacttggtgttaaaaccctggattgtcgaaaaccacttatcccttttgaagagtttattaatgaaccactgaatgaggttctagaaatggataaagattatacttttttcaaagtagaaacagagaacaaattctcttttatgacatgtccctttatattgaatgctgtcacaaagaatttgggattatattatgacaatagaattcgcatgtacagtgaacgaagaatcactgttctctacagcttagttcaaggacagcagttgaatccatatttgagactcaaagttagacgtgaccatatcatagatgatgcacttgtccggctagagatgatcgctatggaaaatcctgcagacttgaagaagcagttgtatgtggaatttgaaggagaacaaggagttgatgagggaggtgtttccaaagaattttttcagctggttgtggaggaaatcttcaatccagatattggtatgttcacatacgatgaatctacaaaattgttttggtttaatccatcttcttttgaaactgagggtcagtttactctgattggcatagtactgggtctggctatttacaataactgtatactggatgtacattttcccatggttgtctacaggaagctaatggggaaaaaaggaacttttcgtgacttgggagactctcacccagttctatatcagagtttaaaagatttattggagtatgaagggaatgtggaagatgacatgatgatcactttccagatatcacagacagatctttttggtaacccaatgatgtatgatctaaaggaaaatggtgataaaattccaattacaaatgaaaacaggaaggaatttgtcaatctttattctgactacattctcaataaatcagtagaaaaacagttcaaggcttttcggagaggttttcatatggtgaccaatgaatctcccttaaagtacttattcagaccagaagaaattgaattgcttatatgtggaagccggaatctagatttccaagcactagaagaaactacagaatatgacggtggctataccagggactctgttctgattagggagttctgggaaatcgttcattcatttacagatgaacagaaaagactcttcttgcagtttacaacgggcacagacagagcacctgtgggaggactaggaaaattaaagatgattatagccaaaaatggcccagacacagaaaggttacctacatctcatacttgctttaatgtgcttttacttccggaatactcaagcaaagaaaaacttaaagagagattgttgaaggccatcacgtatgccaaaggatttggcatgctgtaaaacaaaacaaaacaaaataaaacaaaaaaaaggaaggaaaaaaaaagaaaaaatttaaaaaattttaaaaatataacgagggataaatttttggtggtgatagtgtcccagtacaaaaaggctgtaagatagtcaaccacagtagtcacctatgtctgtgcctcccttctttattggggacatgtgggctggaacagcagatttcagctacatatatgaacaaatcctttattattattataattatttttttgcgtgaaagtgttacatattctttcacttgtatgtacagagaggtttttctgaatatttattttaagggttaaatcacttttgcttgtgtttattactgcttgaggttgagccttttgagtatttaaaaaatatataccaacagaactactctcccaaggaaaatattgccaccatttgtagaccacgtaaccttcaagtatgtgctacttttttgtccctgtatctaactcaaatcaggaactgtattttttttaatgatttgcttttgaaacttgaagtcttgaaaacagtgtgatgcaattactgctgttctagcccccaaagagttttctgtgcaaaatcttgagaatcaatcaataaagaaagatggaaggaagggagaaattggaatgttttaactgcagccctcagaactttagtaacagcacaacaaattaaaaacaaaaacaactcatgccacagtatgtcgtcttcatgtgtcttgcaatgaactgtttcagtagccaatcctctttcttagtatatgaaaggacagggatttttgttcttgttgttctcgttgttgttttaagtttactggggaaagtgcatttggccaaatgaaatggtagtcaagcctattgcaacaaagttaggaagtttgttgtttgtttattataaacaaaaagcatgtgaaagtgcacttaagatagagtttttattaattacttacttattacctagattttaaatagacaatccaaagtctccccttcgtgttgccatcatcttgttgaatcagccattttatcgaggcacgtgatcagtgttgcaacataatgaaaaagatggctactgtgccttgtgttacttaatcatacagtaagctgacctggaaatgaatgaaactattactcctaagaattacattgtatagccccacagattaaatttaattaattaattcaaaacatgttaaacgttactttcatgtactatggaaaagtacaagtaggtttacattactgatttccagaagtaagtagtttcccctttcctagtcttctgtgtatgtgatgttgttaatttcttttattgcattataaaataaaaggattatgtatttttaactaaggtgagacattgatatatccttttgctacaagctatagctaatgtgctgagcttgtgccttggtgattgattgattgattgactgattgttttaactgattactgtagatcaacctgatgatttgtttgtttgaaattggcaggaaaaatgcagctttcaaatcattggggggagaaaaaggatgtctttcaggattattttaattaatttttttcataattgagacagaactgtttgttatgtaccataatgctaaataaaactgtggcacttttcaccataatttaatttagtggaaaaagaagacaatgctttccatattgtgataaggtaacatggggtttttctgggccagcctttagaacactgttagggtacatacgctaccttgatgaaagggaccttcgtgcaactgtagtcatcttaaaggcttctcatccactgtgcttcttaatgtgtaattaaagtgaggagaaattaaatactctgagggcgttttatataataaattcgtgaaga
